United States Patent Application Publication US 2011/0183924 A1 - sequence listing, part 137

SEQ ID NO: 367555 - DNA, 10653 bp, Homo sapiens
  misc_feature (1514)..(1516): n is a, c, g, or t
  misc_feature (5344)..(5344): n is a, c, g, or t
  misc_feature (5388)..(5388): n is a, c, g, or t
tatcccgtcacgcccactagggactgcgctgtgcccctgctacggagacctgctgccggcaggctgcccacacttgttttctggacacagacggccaccccacctgtgatgcgtgctccccaggccacagtgggcgtcactgtgagaggtgcgcccctggctactatggcaaccccagccagggccagccatgccagagagacagccaggtgccagggcccataggctgcaactgtgacccccaaggcagcgtcagcagccagtgtgatgctgctggtcagtgccagtgcaaggcccaggtggaaggcctcacttgcagccactgccggccccaccacttccacctgagtgccagcaacccagacggctgcctgccctgcttctgtatgggcatcacccagcagtgcgccagctctgcctacacacgccacctgatctccacccactttgcccctggggacttccaaggctttgccctggtgaacccacagcgaaacagccgcctgacaggagaattcactgtggaacccgtgcccgagggtgcccagctctcttttggcaactttgcccaactcggccatgagtccttctactggcagctgccggagacataccagggagacaaggtggcggcctacggtgggaagttgcgatacaccctctcctacacagcaggcccacagggcagcccactctctgaccccgatgtgcagatcacgggcaacaacatcatgctagtggcctcccagccagcgctgcagggccctgagaggaggagctacgagatcatgttccgagaggaattctggcgccggcccgatgggcagccggccacacgcgagcacctcctgatggcactggccgacctggatgagctcctgatccgggccacgttctcctccgtgccgctggtggccagcatcagcgcagtcagcctggaggtcgcccagccggggccctcaaacagaccccgcgccctcgaggtggaggagtgccgctgcccgccaggctacatcggtctgtcctgccaggactgtgcccccggctacacgcgcaccgggagtgggctctacctcggccactgcgagctatgtgaatgcaatggccactcagacctgtgccacccagagactggggcctgctcgcaatgccagcacaacgccgcaggggagttctgcgagctttgtgcccctggctactacggagatgccacagccgggacgcctgaggactgccagccctgtgcctgcccactgaccaacccagagaacatgttttcccgcacctgtgagagcctgggagccggcgggtaccgctgcacggcctgcgaacccggctacactggccagtactgtgagcagtgtggcccaggttacgtgggtaaccccagtgtgcaagggggccagtgcctgccagagacaaaccaagccccactggtggtcgaggtccatcctgctcgaagcatagtgccccaaggtggctcccactccctgcggtgtcaggtcagtgggagnnnaccccactacttctattggtcccgtgaggatgggcggcctgtgcccagcggcacccagcagcgacatcaaggctccgagctccacttccccagcgtccagccctcggatgctggggtctacatttgcacctgccgtaatctccaccaatccaataccagccgggcagagctgctggtcactgaggctccaagcaagcccatcacagtgactgtggaggagcagcggagccagagcgtgcgccccggagctgacgtcaccttcatctgcacagccaaaagcaagtccccagcctataccctggtgtggacccgcctgcacaacgggaaactgcccacccgagccatggatttcaatggcatcctgaccattcgcaacgtccagctgagtgatgcaggcacctacgtgtgcaccggctccaacatgtttgccatggaccagggcacagccactctacatgtgcaggcctcgggcaccttgtccgcccccgtggtctccatccatccgccacagctcacagtgcagcccgggcaactggcggagttccgctgcagcgccacagggagccccacgcccaccctcgagtggacagggggccccggcggccagctccctgcgaaggcacaaatccacggcggcatcctgcgcctgccagctgtcgagcccacggatcaggcccagtacttgtgccgagcccacagcagcgctgggcagcaggtggccagggctgtgctccacgtgcatgggggcggtgggcccagagtccaagtgagcccagagaggacccaggtccacgcaggccgcaccgtcaggctgtactgcagggctgcaggcgtgcctagcgccaccatcacctggaggaaggaagggggcagcctcccaccacaggcccggtcagagcgcacagacatcgcgacactgctcatcccagccatcacgactgctgacgccggcttctacctctgcgtggccaccagccctgcaggcactgcccaggcccggatccaagtggttgtcctttcagcctcagatgccagcccaccgccggtcaagattgagtcctcatcgccttctgtgacagaagggcaaacactcgacctcaactgtgtggtggcagggtcagcccatgcccaggtcacctggtacaggcgagggggtagcctgcctccccacacccaggtgcacggctcccgtctgcggctcccccaggtctcaccagctgattctggagaatatgtgtgccgtgtggagaatggatcgggccccaaggaggcctccattactgtgtctgtgctccacggcacccattctggccccagctacaccccagtgcccggcagcacccggcccatccgcatcgagccctcctcctcacacgtggcggaagggcagaccctggatctgaactgcgtggtgcccgggcaggcccacgcccaggtcacgtggcacaagcgtgggggcagcctccctgcccggcaccagacccacggctcgctgctgcggctgcaccaggtgaccccggccgactcaggcgagtatgtgtgccatgtggtgggcacctccggccccctagaggcctcagtcctggtcaccatcgaagcctctgtcatccctggacccatcccacctgtcaggatcgagtcttcatcctccacagtggccgagggccagaccctggatctgagctgcgtggtggcagggcaggcccacgcccaggtcacatggtacaagcgtgggggcagcctccctgcccggcaccaggttcgtggctcccgcctgtacatcttccaggcctcacctgccgatgcgggacagtacgtctgccgggccagcaacggcatggaggcctccatcacggtcacagtaactgggacccagggggccaacttagcctaccctgccggcagcacccagcccatccgcatcgagccctcctcctcgcaagtggcggaagggcagaccctggatctgaactgcgtggtgcccgggcagtcccatgcccaggtcacgtggcacaagcgtgggggcagcctccctgtccggcaccagacccacggctccctgctgagactctaccaagcgtcccccgccgactcgggcgagtacgtgtgccgagtgttgggcagctccgtgcctctagaggcctctgtcctggtcaccattgagcctgcgggctcagtgcctgcacttggggtcacccccacggtccggatcgagtcatcgtcttcgcaagtggccgaggggcagaccctggacctgaactgcctcgttgctggtcaggcccatgcccaggtcacgtggcacaagcgcgggggcagcctcccggcccggcaccaggtgcatggctcgaggctacgcctgctccaggtgaccccagctgattcaggggagtacgtgtgccgtgtggtcggcagctcaggtacccaggaagcctcagtccttgtcaccatccagcagcgccttagtggctcccactcccagggtgtggcgtaccccgtccgcatcgagtcctcctcagcctccctggccaatggacacaccctggacctcaactgcctggttgccagccaggctccccacaccatcacctggtataagcgtggaggcagcttacccagccggcaccagatcgtgggctcccggctgcggatccctcaggtgactccggcagactcgggcgagtacgtgtgtcacgtcagtaacggtgcaggctcccgggagacctcgctcatcgtcaccatccagggcagcggttcctcccacgtgcccagcgtctccccaccgatcaggatcgagtcgtcttcccccacggtggtggaagggcagaccttggatctgaactgcgtggtcgccaggcagccccaggctatcatcacatggtacaagcgtgggggcagccttccctcccgacaccagacccatggctcccacctgcggttgcaccaaatgtctgtggctgactcgggcgagtatgtgtgccgggccaacaacaacatcgatgccctggaggcctccatcgtcatctccgtctcccctagcgccggcagcccctccgcccctggcagctccatgcccatcagaattgagtcatcctcctcacacgtggccgaaggggagaccctggatctgaactgcgtggtccccgggcaggcccatgcccaggtcacttggcacaagcgtgggggcagcctccccagtcaccatcagacccgcggctcacggctgcggctgcaccatgtgtccccggccgactcgggtgaatacgtgtgccgggtgatgggcagctctggccccctggaggcctcagtcctggtcaccatcgaagcctctggctcaagtgctgtccacgtccccgccccaggtggagccccacccatccgcatcgagccctcctcctcccgagtggcagaagggcagaccctggatctgaagtgcgtggtgcccgggcaggcccacgcccaggtcacgtggcacaagcgtggaggaaacctccctgcccggcaccaggtccacggcccactgctgaggctgaaccaggtgtccccggctgactctggcgagtactcgtgccaagtgaccggaagctcaggcaccctggaggcatctgtcctggtcacaattgagccctccagcccaggacccattcctgctccaggactggcccagcccatctacatcgaggcctcctcttcacacgtgactgaagggcagactctggatctgaactgtgtggtgcccgggcaggcccatgcccaggtcacgtggtacaagcgcgggggcagcctccccgcccggcaccagacccatggctcccagctgcggctccaccncgtctcccctgccgactcaggcgagtatgtgtgtcgtgcagccngcggcccaggccctgagcaagaagcctccttcacagtcaccgtcccgcccagtgaggggtcttcctaccgccttaggagcccggtcatctccatcgacccgcccagcagcaccgtgcagcagggccaggatgccagcttcaagtgcctcatccatgacggggcagcccccatcagcctcgagtggaagacccggaaccaggagctggaggacaacgtccacatcagtcccaatggctccatcatcaccatcgtgggcacccggcccagcaaccacggtacctaccgctgcgtggcctccaatgcctacggtgtggcccagagtgtggtgaacctcagtgtgcacgggccccctacagtgtccgtgctccccgagggccccgtgtgggtgaaagtgggaaaggctgtcaccctggagtgtgtcagtgccggggagccccgctcctctgctcgttggacccggatcagcagcacccctgccaagttggagcagcggacatatgggctcatggacagccacgcggtgctgcagatttcatcagctaaaccatcagatgcgggcacttatgtgtgccttgctcagaatgcactaggcacagcacagaagcaggtggaggtgatcgtggacacgggcgccatggccccaggggcccctcaggtccaagctgaagaagctgagctgactgtggaggctggacacacggccaccttgcgctgctcagccacaggcagccccgcgcccaccatccactggtccaagctgcgttccccactgccctggcagcaccggctggaaggtgacacactcatcataccccgggtagcccagcaggactcgggccagtacatctgcaatgccactagccctgctgggcacgctgaggccaccatcatcctgcacgtggagagcccaccatatgccaccacggtcccagagcacgcttcggtgcaggcaggggagacggtgcagctccagtgcctggctcacgggacacccccactcaccttccagtggagccgcgtgggcagcagccttcctgggagggcgaccgccaggaacgagctgctgcactttgagcgtgcagcccctgaggactcaggccgctaccgctgccgggtcaccaacaaggtgggctcagccgaggcctttgcccagctgctcgtccaaggccctcccggctctctccctgccacctccatcccagcagggtccacgcccaccgtgcaggtcacgcctcagctagagaccaagagcattggggccagcgttgagttccactgtgctgtgcccagcgaccggggtacccagctccgttggttcaaggaagggggtcagctgcctccgggtcacagcgtgcaggatggggtgctccgaatccagaacttggaccagagctgccaagggacgtatatatgccaggcccatggaccttgggggaaggcccaggccagtgcccagctggttatccaagccctgccctcggtgctcatcaacatccggacctctgtgcagaccgtggtggttggccacgccgtggagttcgaatgcctggcactgggtgaccccaagcctcaggtgacatggagcaaagttggagggcacctgcggccaggcattgtgcagagcggaggtgtcgtcaggatcgcccacgtagagctggctgatgcgggacagtatcgctgcactgccaccaacgcagctggcaccacacaatcccacgtcctgctgcttgtgcaagccttgccccagatctcaatgccccaagaagtccgtgtgcctgctggttctgcagctgtcttcccctgcatagcctcaggctaccccactcctgacatcagctggagcaagctggatggcagcctgccacctgacagccgcctggagaacaacatgctgatgctgccctcagtccgaccccaggacgcaggtacctacgtctgcaccgccactaaccgccagggcaaggtcaaagcctttgcccacctgcaggtgccagagcgggtggtgccctacttcacgcagaccccctactccttcctaccgctgcccaccatcaaggatgcctacaggaagttcgagatcaagatcaccttccggcccgactcagccgatgggatgctgctgtacaatgggcagaagcgagtcccagggagccccaccaacctggccaaccggcagcccgacttcatctccttcggcctcgtggggggaaggcccgagttccggttcgatgcaggctcaggcatggccaccatccgccatcccacaccactggccctgggccatttccacaccgtgaccctgctgcgcagcctcacccagggctccctgattgtgggtgacctggccccggtcaatgggacctcccagggcaagttccagggcctggatctgaacgaggaactctacctgggtggctatcctgactatggtgccatccccaaggcggggctgagcagcggcttcataggctgtgtccgggagctgcgcatccagggcgaggagatcgtcttccatgacctcaacctcacggcgcacggcatctcccactgccccacctgtcgggaccggccctgccagaatggcggtcagtgccatgactctgagagcagcagctacgtgtgcgtctgcccagctggcttcaccgggagccgctgtgagcactcgcaggccctgcactgccatccagaggcctgtgggcccgacgccacctgtgtgaaccggcctgacggtcgaggctacacctgccgctgccacctgggccgctcggggttgcggtgtgaggaaggtgtgacagtgaccaccccctcgctgtcgggtgctggctcctacctggcactgcccgccctcaccaacacacaccacgagctacgcctggacgtggagttcaagccactcgcccctgacggggtcctgctgttcagcggggggaagagcgggcctgtggaggacttcgtgtccctggcgatggtgggcggccacctggagttccgctatgagttggggtcagggctggccgttctgcggagcgccgagccgctggccctgggccgctggcaccgtgtgtctgcagagcgtctcaacaaggacggcagcctgcgggtgaatggtggacgccctgtgctgcgctcctcgcccggcaagagccagggcctcaacctgcacaccctgctctacctggggggtgtggagccttccgtgccactgtccccggccaccaacatgagcgctcacttccgcggctgtgtgggcgaggtgtcagtgaatggcaaacggctggacctcacctacagtttcctaggcagccagggcatcgggcaatgctatgatagctccccatgtgagcgccagccttgccaacatggtgccacgtgcatgcccgctggcgagtatgagttccagtgcctgtgtcgagatggattcaaaggagacctgtgtgagcacgaggagaacccctgccagctccgtgaaccctgtctgcatgggggcacctgccagggcacccgctgcctctgcctccctggcttctctggcccacgctgccaacaaggctctggacatggcatagcagagtccgactggcatcttgaaggcagcgggggcaatgatgcccctgggcagtacggagcctatttccacgatgatggcttcctcgccttccctggccatgtcttctccaggagcctgcccgaggtgcccgagaccatcgagctggaggttcggaccagcacagccagtggcctcctgctctggcagggtgtggaggtgggagaggccggccaaggcaaggacttcatcagcctcgggcttcaagacgggcaccttgtcttcaggtaccagctgggtagtggggaggcccgcctggtctctgaggaccccatcaatgacggcgagtggcaccgggtgacagcactgcgggagggccgcagaggttccatccaagtcgacggtgaggagctggtcagcggccggtccccaggtcccaacgtggcagtcaacgccaagggcagcgtctacatcggcggagcccctgacgtggccacgctgaccgggggcagattctcctcgggcatcacaggctgtgtcaagaacctggtgctgcactcggcccgacccggcgccccgcccccacagcccctggacctgcagcaccgcgcccaggccggggccaacacacgcccctgcccctcgtaggcacctgcctgccccacacggactcccgggccacgccccagcccgacaatgtcgagtatattattattaatattattatgaatttttgtaagaaaccgaggcgatgccacgctttgctgctaccgccctgggctggactggaggtgggcatgccaccctcacacacacagctgggcaaagccacaaggctggccagcaaggcaggttggatgggagtgggcacctcagaaagtcaccaggacttggggtcaggaacagtggctgggtgggcccagaactgcccccactgtccccctacccaccgatggagcccccagatagagctgggtggcctgtttctgcagcccttgggcagttctcactcctaggagagccaacctcggcttgtgggctggtgccccacagctacctgagacgggcatcgcaggagtctctgccacccactcaggattgggaattgtctttagtgccggctgtggagcaaaaggcagctcacccctgggcaggcggtccccatccccaccagctcgtttttcagcacccccacccacctccacccagcccctggcacctcctctggcagactccccctcctaccacgtcctcctggcctgcattcccaccccctcctgccagcacacagcctggggtccctccctcaggggctgtaagggaaggcccaccccaactcttaccaggagctgctacaggcagagcccagcactgatagggccccgcccaccgggccccgcccaccccaggccacatccccacccatctggaagtgaaggcccagggactcctccaacagacaacggacggacggatgccgctggtgctcaggaagagctagtgccttaggtgggggaaggcaggactcacgactgagagagagaggagggggatatgaccaccctgccccatctgcaggagcctgaagatccagctcaagtgccatcctgccagtggcccccagactgtggggttgggacgcctggcctctgtgtcctagaagggaccctcctgtggtctttgtcttgatttttcttaataaacggtgctatccccgcca

SEQ ID NO: 367556 - DNA, 8654 bp, Homo sapiens
  misc_feature (3345)..(3345): n is a, c, g, or t
  misc_feature (3389)..(3389): n is a, c, g, or t
tgttcatagctgattctagaggataaactaacggcgagtgcgtcataatggtggagctccgctgctccccggcagaaagaccccactcccaccactcgagtggacagggggccccggcggccagctccctgcgaaggcacaaatccacggcggcatcctgcgcctgccagctgtcgagcccacggatcaggcccagtacttgtgccgagcccacagcagcgctgggcagcaggtggccagggctgtgctccacgtgcatgggggcggtgggcccagagtccaagtgagcccagagaggacccaggtccacgcaggccgcaccgtcaggctgtactgcagggctgcaggcgtgcctagcgccaccatcacctggaggaaggaagggggcagcctcccaccacaggcccggtcagagcgcacagacatcgcgacactgctcatcccagccatcacgactgctgacgccggcttctacctctgcgtggccaccagccctgcaggcactgcccaggcccggatccaagtggttgtcctttcagcctcagatgccagcccaccgccggtcaagattgagtcctcatcgccttctgtgacagaagggcaaacactcgacctcaactgtgtggtggcagggtcagcccatgcccaggtcacctggtacaggcgagggggtagcctgcctccccacacccaggtgcacggctcccgtctgcggctcccccaggtctcaccagctgattctggagaatatgtgtgccgtgtggagaatggatcgggccccaaggaggcctccattactgtgtctgtgctccacggcacccattctggccccagctacaccccagtgcccggcagcacccggcccatccgcatcgagccctcctcctcacacgtggcggaagggcagaccctggatctgaactgcgtggtgcccgggcaggcccacgcccaggtcacgtggcacaagcgtgggggcagcctccctgcccggcaccagacccacggctcgctgctgcggctgcaccaggtgaccccggccgactcaggcgagtatgtgtgccatgtggtgggcacctccggccccctagaggcctcagtcctggtcaccatcgaagcctctgtcatccctggacccatcccacctgtcaggatcgagtcttcatcctccacagtggccgagggccagaccctggatctgagctgcgtggtggcagggcaggcccacgcccaggtcacatggtacaagcgtgggggcagcctccctgcccggcaccaggttcgtggctcccgcctgtacatcttccaggcctcacctgccgatgcgggacagtacgtctgccgggccagcaacggcatggaggcctccatcacggtcacagtaactgggacccagggggccaacttagcctaccctgccggcagcacccagcccatccgcatcgagccctcctcctcgcaagtggcggaagggcagaccctggatctgaactgcgtggtgcccgggcagtcccatgcccaggtcacgtggcacaagcgtgggggcagcctccctgtccggcaccagacccacggctccctgctgagactctaccaagcgtcccccgccgactcgggcgagtacgtgtgccgagtgttgggcagctccgtgcctctagaggcctctgtcctggtcaccattgagcctgcgggctcagtgcctgcacttggggtcacccccacggtccggatcgagtcatcgtcttcgcaagtggccgaggggcagaccctggacctgaactgcctcgttgctggtcaggcccatgcccaggtcacgtggcacaagcgcgggggcagcctcccggcccggcaccaggtgcatggctcgaggctacgcctgctccaggtgaccccagctgattcaggggagtacgtgtgccgtgtggtcggcagctcaggtacccaggaagcctcagtccttgtcaccatccagcagcgccttagtggctcccactcccagggtgtggcgtaccccgtccgcatcgagtcctcctcagcctccctggccaatggacacaccctggacctcaactgcctggttgccagccaggctccccacaccatcacctggtataagcgtggaggcagcttacccagccggcaccagatcgtgggctcccggctgcggatccctcaggtgactccggcagactcgggcgagtacgtgtgtcacgtcagtaacggtgcaggctcccgggagacctcgctcatcgtcaccatccagggcagcggttcctcccacgtgcccagcgtctccccaccgatcaggatcgagtcgtcttcccccacggtggtggaagggcagaccttggatctgaactgcgtggtcgccaggcagccccaggctatcatcacatggtacaagcgtgggggcagccttccctcccgacaccagacccatggctcccacctgcggttgcaccaaatgtctgtggctgactcgggcgagtatgtgtgccgggccaacaacaacatcgatgccctggaggcctccatcgtcatctccgtctcccctagcgccggcagcccctccgcccctggcagctccatgcccatcagaattgagtcatcctcctcacacgtggccgaaggggagaccctggatctgaactgcgtggtccccgggcaggcccatgcccaggtcacttggcacaagcgtgggggcagcctccccagtcaccatcagacccgcggctcacggctgcggctgcaccatgtgtccccggccgactcgggtgaatacgtgtgccgggtgatgggcagctctggccccctggaggcctcagtcctggtcaccatcgaagcctctggctcaagtgctgtccacgtccccgccccaggtggagccccacccatccgcatcgagccctcctcctcccgagtggcagaagggcagaccctggatctgaagtgcgtggtgcccgggcaggcccacgcccaggtcacgtggcacaagcgtggaggaaacctccctgcccggcaccaggtccacggcccactgctgaggctgaaccaggtgtccccggctgactctggcgagtactcgtgccaagtgaccggaagctcaggcaccctggaggcatctgtcctggtcacaattgagccctccagcccaggacccattcctgctccaggactggcccagcccatctacatcgaggcctcctcttcacacgtgactgaagggcagactctggatctgaactgtgtggtgcccgggcaggcccatgcccaggtcacgtggtacaagcgcgggggcagcctccccgcccggcaccagacccatggctcccagctgcggctccaccncgtctcccctgccgactcaggcgagtatgtgtgtcgtgcagccngcggcccaggccctgagcaagaagcctccttcacagtcaccgtcccgcccagtgaggggtcttcctaccgccttaggagcccggtcatctccatcgacccgcccagcagcaccgtgcagcagggccaggatgccagcttcaagtgcctcatccatgacggggcagcccccatcagcctcgagtggaagacccggaaccaggagctggaggacaacgtccacatcagtcccaatggctccatcatcaccatcgtgggcacccggcccagcaaccacggtacctaccgctgcgtggcctccaatgcctacggtgtggcccagagtgtggtgaacctcagtgtgcacgggccccctacagtgtccgtgctccccgagggccccgtgtgggtgaaagtgggaaaggctgtcaccctggagtgtgtcagtgccggggagccccgctcctctgctcgttggacccggatcagcagcacccctgccaagttggagcagcggacatatgggctcatggacagccacgcggtgctgcagatttcatcagctaaaccatcagatgcgggcacttatgtgtgccttgctcagaatgcactaggcacagcacagaagcaggtggaggtgatcgtggacacgggcgccatggccccaggggcccctcaggtccaagctgaagaagctgagctgactgtggaggctggacacacggccaccttgcgctgctcagccacaggcagccccgcgcccaccatccactggtccaagctgcgttccccactgccctggcagcaccggctggaaggtgacacactcatcataccccgggtagcccagcaggactcgggccagtacatctgcaatgccactagccctgctgggcacgctgaggccaccatcatcctgcacgtggagagcccaccatatgccaccacggtcccagagcacgcttcggtgcaggcaggggagacggtgcagctccagtgcctggctcacgggacacccccactcaccttccagtggagccgcgtgggcagcagccttcctgggagggcgaccgccaggaacgagctgctgcactttgagcgtgcagcccctgaggactcaggccgctaccgctgccgggtcaccaacaaggtgggctcagccgaggcctttgcccagctgctcgtccaaggccctcccggctctctccctgccacctccatcccagcagggtccacgcccaccgtgcaggtcacgcctcagctagagaccaagagcattggggccagcgttgagttccactgtgctgtgcccagcgaccggggtacccagctccgttggttcaaggaagggggtcagctgcctccgggtcacagcgtgcaggatggggtgctccgaatccagaacttggaccagagctgccaagggacgtatatatgccaggcccatggaccttgggggaaggcccaggccagtgcccagctggttatccaagccctgccctcggtgctcatcaacatccggacctctgtgcagaccgtggtggttggccacgccgtggagttcgaatgcctggcactgggtgaccccaagcctcaggtgacatggagcaaagttggagggcacctgcggccaggcattgtgcagagcggaggtgtcgtcaggatcgcccacgtagagctggctgatgcgggacagtatcgctgcactgccaccaacgcagctggcaccacacaatcccacgtcctgctgcttgtgcaagccttgccccagatctcaatgccccaagaagtccgtgtgcctgctggttctgcagctgtcttcccctgcatagcctcaggctaccccactcctgacatcagctggagcaagctggatggcagcctgccacctgacagccgcctggagaacaacatgctgatgctgccctcagtccgaccccaggacgcaggtacctacgtctgcaccgccactaaccgccagggcaaggtcaaagcctttgcccacctgcaggtgccagagcgggtggtgccctacttcacgcagaccccctactccttcctaccgctgcccaccatcaaggatgcctacaggaagttcgagatcaagatcaccttccggcccgactcagccgatgggatgctgctgtacaatgggcagaagcgagtcccagggagccccaccaacctggccaaccggcagcccgacttcatctccttcggcctcgtggggggaaggcccgagttccggttcgatgcaggctcaggcatggccaccatccgccatcccacaccactggccctgggccatttccacaccgtgaccctgctgcgcagcctcacccagggctccctgattgtgggtgacctggccccggtcaatgggacctcccagggcaagttccagggcctggatctgaacgaggaactctacctgggtggctatcctgactatggtgccatccccaaggcggggctgagcagcggcttcataggctgtgtccgggagctgcgcatccagggcgaggagatcgtcttccatgacctcaacctcacggcgcacggcatctcccactgccccacctgtcgggaccggccctgccagaatggcggtcagtgccatgactctgagagcagcagctacgtgtgcgtctgcccagctggcttcaccgggagccgctgtgagcactcgcaggccctgcactgccatccagaggcctgtgggcccgacgccacctgtgtgaaccggcctgacggtcgaggctacacctgccgctgccacctgggccgctcggggttgcggtgtgaggaaggtgtgacagtgaccaccccctcgctgtcgggtgctggctcctacctggcactgcccgccctcaccaacacacaccacgagctacgcctggacgtggagttcaagccactcgcccctgacggggtcctgctgttcagcggggggaagagcgggcctgtggaggacttcgtgtccctggcgatggtgggcggccacctggagttccgctatgagttggggtcagggctggccgttctgcggagcgccgagccgctggccctgggccgctggcaccgtgtgtctgcagagcgtctcaacaaggacggcagcctgcgggtgaatggtggacgccctgtgctgcgctcctcgcccggcaagagccagggcctcaacctgcacaccctgctctacctggggggtgtggagccttccgtgccactgtccccggccaccaacatgagcgctcacttccgcggctgtgtgggcgaggtgtcagtgaatggcaaacggctggacctcacctacagtttcctaggcagccagggcatcgggcaatgctatgatagctccccatgtgagcgccagccttgccaacatggtgccacgtgcatgcccgctggcgagtatgagttccagtgcctgtgtcgagatggattcaaaggagacctgtgtgagcacgaggagaacccctgccagctccgtgaaccctgtctgcatgggggcacctgccagggcacccgctgcctctgcctccctggcttctctggcccacgctgccaacaaggctctggacatggcatagcagagtccgactggcatcttgaaggcagcgggggcaatgatgcccctgggcagtacggagcctatttccacgatgatggcttcctcgccttccctggccatgtcttctccaggagcctgcccgaggtgcccgagaccatcgagctggaggttcggaccagcacagccagtggcctcctgctctggcagggtgtggaggtgggagaggccggccaaggcaaggacttcatcagcctcgggcttcaagacgggcaccttgtcttcaggtaccagctgggtagtggggaggcccgcctggtctctgaggaccccatcaatgacggcgagtggcaccgggtgacagcactgcgggagggccgcagaggttccatccaagtcgacggtgaggagctggtcagcggccggtccccaggtcccaacgtggcagtcaacgccaagggcagcgtctacatcggcggagcccctgacgtggccacgctgaccgggggcagattctcctcgggcatcacaggctgtgtcaagaacctggtgctgcactcggcccgacccggcgccccgcccccacagcccctggacctgcagcaccgcgcccaggccggggccaacacacgcccctgcccctcgtaggcacctgcctgccccacacggactcccgggccacgccccagcccgacaatgtcgagtatattattattaatattattatgaatttttgtaagaaaccgaggcgatgccacgctttgctgctaccgccctgggctggactggaggtgggcatgccaccctcacacacacagctgggcaaagccacaaggctggccagcaaggcaggttggatgggagtgggcacctcagaaagtcaccaggacttggggtcaggaacagtggctgggtgggcccagaactgcccccactgtccccctacccaccgatggagcccccagatagagctgggtggcctgtttctgcagcccttgggcagttctcactcctaggagagccaacctcggcttgtgggctggtgccccacagctacctgagacgggcatcgcaggagtctctgccacccactcaggattgggaattgtctttagtgccggctgtggagcaaaaggcagctcacccctgggcaggcggtccccatccccaccagctcgtttttcagcacccccacccacctccacccagcccctggcacctcctctggcagactccccctcctaccacgtcctcctggcctgcattcccaccccctcctgccagcacacagcctggggtccctccctcaggggctgtaagggaaggcccaccccaactcttaccaggagctgctacaggcagagcccagcactgatagggccccgcccaccgggccccgcccaccccaggccacatccccacccatctggaagtgaaggcccagggactcctccaacagacaacggacggacggatgccgctggtgctcaggaagagctagtgccttaggtgggggaaggcaggactcacgactgagagagagaggagggggatatgaccaccctgccccatctgcaggagcctgaagatccagctcaagtgccatcctgccagtggcccccagactgtggggttgggacgcctggcctctgtgtcctagaagggaccctcctgtggtctttgtcttgatttttcttaataaacggtgctatccccgcca

SEQ ID NO: 367557 - DNA, 8450 bp, Homo sapiens
  misc_feature (3141)..(3141): n is a, c, g, or t
  misc_feature (3185)..(3185): n is a, c, g, or t
ctgacctccttataggcgagtcgggtagcaggtggcaggtagtgctccacgtgcatggggcggtgggcccagagtccaagtgagcccagagaggacccaggtccacgcaggccgcaccgtcaggctgtactgcagggctgcaggcgtgcctagcgccaccatcacctggaggaaggaagggggcagcctcccaccacaggcccggtcagagcgcacagacatcgcgacactgctcatcccagccatcacgactgctgacgccggcttctacctctgcgtggccaccagccctgcaggcactgcccaggcccggatccaagtggttgtcctttcagcctcagatgccagcccaccgccggtcaagattgagtcctcatcgccttctgtgacagaagggcaaacactcgacctcaactgtgtggtggcagggtcagcccatgcccaggtcacctggtacaggcgagggggtagcctgcctccccacacccaggtgcacggctcccgtctgcggctcccccaggtctcaccagctgattctggagaatatgtgtgccgtgtggagaatggatcgggccccaaggaggcctccattactgtgtctgtgctccacggcacccattctggccccagctacaccccagtgcccggcagcacccggcccatccgcatcgagccctcctcctcacacgtggcggaagggcagaccctggatctgaactgcgtggtgcccgggcaggcccacgcccaggtcacgtggcacaagcgtgggggcagcctccctgcccggcaccagacccacggctcgctgctgcggctgcaccaggtgaccccggccgactcaggcgagtatgtgtgccatgtggtgggcacctccggccccctagaggcctcagtcctggtcaccatcgaagcctctgtcatccctggacccatcccacctgtcaggatcgagtcttcatcctccacagtggccgagggccagaccctggatctgagctgcgtggtggcagggcaggcccacgcccaggtcacatggtacaagcgtgggggcagcctccctgcccggcaccaggttcgtggctcccgcctgtacatcttccaggcctcacctgccgatgcgggacagtacgtctgccgggccagcaacggcatggaggcctccatcacggtcacagtaactgggacccagggggccaacttagcctaccctgccggcagcacccagcccatccgcatcgagccctcctcctcgcaagtggcggaagggcagaccctggatctgaactgcgtggtgcccgggcagtcccatgcccaggtcacgtggcacaagcgtgggggcagcctccctgtccggcaccagacccacggctccctgctgagactctaccaagcgtcccccgccgactcgggcgagtacgtgtgccgagtgttgggcagctccgtgcctctagaggcctctgtcctggtcaccattgagcctgcgggctcagtgcctgcacttggggtcacccccacggtccggatcgagtcatcgtcttcgcaagtggccgaggggcagaccctggacctgaactgcctcgttgctggtcaggcccatgcccaggtcacgtggcacaagcgcgggggcagcctcccggcccggcaccaggtgcatggctcgaggctacgcctgctccaggtgaccccagctgattcaggggagtacgtgtgccgtgtggtcggcagctcaggtacccaggaagcctcagtccttgtcaccatccagcagcgccttagtggctcccactcccagggtgtggcgtaccccgtccgcatcgagtcctcctcagcctccctggccaatggacacaccctggacctcaactgcctggttgccagccaggctccccacaccatcacctggtataagcgtggaggcagcttacccagccggcaccagatcgtgggctcccggctgcggatccctcaggtgactccggcagactcgggcgagtacgtgtgtcacgtcagtaacggtgcaggctcccgggagacctcgctcatcgtcaccatccagggcagcggttcctcccacgtgcccagcgtctccccaccgatcaggatcgagtcgtcttcccccacggtggtggaagggcagaccttggatctgaactgcgtggtcgccaggcagccccaggctatcatcacatggtacaagcgtgggggcagccttccctcccgacaccagacccatggctcccacctgcggttgcaccaaatgtctgtggctgactcgggcgagtatgtgtgccgggccaacaacaacatcgatgccctggaggcctccatcgtcatctccgtctcccctagcgccggcagcccctccgcccctggcagctccatgcccatcagaattgagtcatcctcctcacacgtggccgaaggggagaccctggatctgaactgcgtggtccccgggcaggcccatgcccaggtcacttggcacaagcgtgggggcagcctccccagtcaccatcagacccgcggctcacggctgcggctgcaccatgtgtccccggccgactcgggtgaatacgtgtgccgggtgatgggcagctctggccccctggaggcctcagtcctggtcaccatcgaagcctctggctcaagtgctgtccacgtccccgccccaggtggagccccacccatccgcatcgagccctcctcctcccgagtggcagaagggcagaccctggatctgaagtgcgtggtgcccgggcaggcccacgcccaggtcacgtggcacaagcgtggaggaaacctccctgcccggcaccaggtccacggcccactgctgaggctgaaccaggtgtccccggctgactctggcgagtactcgtgccaagtgaccggaagctcaggcaccctggaggcatctgtcctggtcacaattgagccctccagcccaggacccattcctgctccaggactggcccagcccatctacatcgaggcctcctcttcacacgtgactgaagggcagactctggatctgaactgtgtggtgcccgggcaggcccatgcccaggtcacgtggtacaagcgcgggggcagcctccccgcccggcaccagacccatggctcccagctgcggctccaccncgtctcccctgccgactcaggcgagtatgtgtgtcgtgcagccngcggcccaggccctgagcaagaagcctccttcacagtcaccgtcccgcccagtgaggggtcttcctaccgccttaggagcccggtcatctccatcgacccgcccagcagcaccgtgcagcagggccaggatgccagcttcaagtgcctcatccatgacggggcagcccccatcagcctcgagtggaagacccggaaccaggagctggaggacaacgtccacatcagtcccaatggctccatcatcaccatcgtgggcacccggcccagcaaccacggtacctaccgctgcgtggcctccaatgcctacggtgtggcccagagtgtggtgaacctcagtgtgcacgggccccctacagtgtccgtgctccccgagggccccgtgtgggtgaaagtgggaaaggctgtcaccctggagtgtgtcagtgccggggagccccgctcctctgctcgttggacccggatcagcagcacccctgccaagttggagcagcggacatatgggctcatggacagccacgcggtgctgcagatttcatcagctaaaccatcagatgcgggcacttatgtgtgccttgctcagaatgcactaggcacagcacagaagcaggtggaggtgatcgtggacacgggcgccatggccccaggggcccctcaggtccaagctgaagaagctgagctgactgtggaggctggacacacggccaccttgcgctgctcagccacaggcagccccgcgcccaccatccactggtccaagctgcgttccccactgccctggcagcaccggctggaaggtgacacactcatcataccccgggtagcccagcaggactcgggccagtacatctgcaatgccactagccctgctgggcacgctgaggccaccatcatcctgcacgtggagagcccaccatatgccaccacggtcccagagcacgcttcggtgcaggcaggggagacggtgcagctccagtgcctggctcacgggacacccccactcaccttccagtggagccgcgtgggcagcagccttcctgggagggcgaccgccaggaacgagctgctgcactttgagcgtgcagcccctgaggactcaggccgctaccgctgccgggtcaccaacaaggtgggctcagccgaggcctttgcccagctgctcgtccaaggccctcccggctctctccctgccacctccatcccagcagggtccacgcccaccgtgcaggtcacgcctcagctagagaccaagagcattggggccagcgttgagttccactgtgctgtgcccagcgaccggggtacccagctccgttggttcaaggaagggggtcagctgcctccgggtcacagcgtgcaggatggggtgctccgaatccagaacttggaccagagctgccaagggacgtatatatgccaggcccatggaccttgggggaaggcccaggccagtgcccagctggttatccaagccctgccctcggtgctcatcaacatccggacctctgtgcagaccgtggtggttggccacgccgtggagttcgaatgcctggcactgggtgaccccaagcctcaggtgacatggagcaaagttggagggcacctgcggccaggcattgtgcagagcggaggtgtcgtcaggatcgcccacgtagagctggctgatgcgggacagtatcgctgcactgccaccaacgcagctggcaccacacaatcccacgtcctgctgcttgtgcaagccttgccccagatctcaatgccccaagaagtccgtgtgcctgctggttctgcagctgtcttcccctgcatagcctcaggctaccccactcctgacatcagctggagcaagctggatggcagcctgccacctgacagccgcctggagaacaacatgctgatgctgccctcagtccgaccccaggacgcaggtacctacgtctgcaccgccactaaccgccagggcaaggtcaaagcctttgcccacctgcaggtgccagagcgggtggtgccctacttcacgcagaccccctactccttcctaccgctgcccaccatcaaggatgcctacaggaagttcgagatcaagatcaccttccggcccgactcagccgatgggatgctgctgtacaatgggcagaagcgagtcccagggagccccaccaacctggccaaccggcagcccgacttcatctccttcggcctcgtggggggaaggcccgagttccggttcgatgcaggctcaggcatggccaccatccgccatcccacaccactggccctgggccatttccacaccgtgaccctgctgcgcagcctcacccagggctccctgattgtgggtgacctggccccggtcaatgggacctcccagggcaagttccagggcctggatctgaacgaggaactctacctgggtggctatcctgactatggtgccatccccaaggcggggctgagcagcggcttcataggctgtgtccgggagctgcgcatccagggcgaggagatcgtcttccatgacctcaacctcacggcgcacggcatctcccactgccccacctgtcgggaccggccctgccagaatggcggtcagtgccatgactctgagagcagcagctacgtgtgcgtctgcccagctggcttcaccgggagccgctgtgagcactcgcaggccctgcactgccatccagaggcctgtgggcccgacgccacctgtgtgaaccggcctgacggtcgaggctacacctgccgctgccacctgggccgctcggggttgcggtgtgaggaaggtgtgacagtgaccaccccctcgctgtcgggtgctggctcctacctggcactgcccgccctcaccaacacacaccacgagctacgcctggacgtggagttcaagccactcgcccctgacggggtcctgctgttcagcggggggaagagcgggcctgtggaggacttcgtgtccctggcgatggtgggcggccacctggagttccgctatgagttggggtcagggctggccgttctgcggagcgccgagccgctggccctgggccgctggcaccgtgtgtctgcagagcgtctcaacaaggacggcagcctgcgggtgaatggtggacgccctgtgctgcgctcctcgcccggcaagagccagggcctcaacctgcacaccctgctctacctggggggtgtggagccttccgtgccactgtccccggccaccaacatgagcgctcacttccgcggctgtgtgggcgaggtgtcagtgaatggcaaacggctggacctcacctacagtttcctaggcagccagggcatcgggcaatgctatgatagctccccatgtgagcgccagccttgccaacatggtgccacgtgcatgcccgctggcgagtatgagttccagtgcctgtgtcgagatggattcaaaggagacctgtgtgagcacgaggagaacccctgccagctccgtgaaccctgtctgcatgggggcacctgccagggcacccgctgcctctgcctccctggcttctctggcccacgctgccaacaaggctctggacatggcatagcagagtccgactggcatcttgaaggcagcgggggcaatgatgcccctgggcagtacggagcctatttccacgatgatggcttcctcgccttccctggccatgtcttctccaggagcctgcccgaggtgcccgagaccatcgagctggaggttcggaccagcacagccagtggcctcctgctctggcagggtgtggaggtgggagaggccggccaaggcaaggacttcatcagcctcgggcttcaagacgggcaccttgtcttcaggtaccagctgggtagtggggaggcccgcctggtctctgaggaccccatcaatgacggcgagtggcaccgggtgacagcactgcgggagggccgcagaggttccatccaagtcgacggtgaggagctggtcagcggccggtccccaggtcccaacgtggcagtcaacgccaagggcagcgtctacatcggcggagcccctgacgtggccacgctgaccgggggcagattctcctcgggcatcacaggctgtgtcaagaacctggtgctgcactcggcccgacccggcgccccgcccccacagcccctggacctgcagcaccgcgcccaggccggggccaacacacgcccctgcccctcgtaggcacctgcctgccccacacggactcccgggccacgccccagcccgacaatgtcgagtatattattattaatattattatgaatttttgtaagaaaccgaggcgatgccacgctttgctgctaccgccctgggctggactggaggtgggcatgccaccctcacacacacagctgggcaaagccacaaggctggccagcaaggcaggttggatgggagtgggcacctcagaaagtcaccaggacttggggtcaggaacagtggctgggtgggcccagaactgcccccactgtccccctacccaccgatggagcccccagatagagctgggtggcctgtttctgcagcccttgggcagttctcactcctaggagagccaacctcggcttgtgggctggtgccccacagctacctgagacgggcatcgcaggagtctctgccacccactcaggattgggaattgtctttagtgccggctgtggagcaaaaggcagctcacccctgggcaggcggtccccatccccaccagctcgtttttcagcacccccacccacctccacccagcccctggcacctcctctggcagactccccctcctaccacgtcctcctggcctgcattcccaccccctcctgccagcacacagcctggggtccctccctcaggggctgtaagggaaggcccaccccaactcttaccaggagctgctacaggcagagcccagcactgatagggccccgcccaccgggccccgcccaccccaggccacatccccacccatctggaagtgaaggcccagggactcctccaacagacaacggacggacggatgccgctggtgctcaggaagagctagtgccttaggtgggggaaggcaggactcacgactgagagagagaggagggggatatgaccaccctgccccatctgcaggagcctgaagatccagctcaagtgccatcctgccagtggcccccagactgtggggttgggacgcctggcctctgtgtcctagaagggaccctcctgtggtctttgtcttgatttttcttaataaacggtgctatccccgcca

SEQ ID NO: 367558 - DNA, 9764 bp, Homo sapiens
  misc_feature (625)..(627): n is a, c, g, or t
  misc_feature (4455)..(4455): n is a, c, g, or t
  misc_feature (4499)..(4499): n is a, c, g, or t
cgatatttgtggttctggccctagaagaatgtggtggggcccaggcctctgtcctttttgtccttcccagtagggccccatctcaagttgaatagtgcagggtggcccagggctgcttccaggacttgcctgtcctccctgagtttggatgggagagacacaagggcctggacctcagttttctgttctctgccccagctcagtgcacctgtgcaacaactccatccagaagcacctggagtactcatgccatcggcatccactgcttccgccagaaccacaaatatccgatctttgtgcccctggctactacggagatgccacagccgggacgcctgaggactgccagccctgtgcctgcccactgaccaacccagagaacatgttttcccgcacctgtgagagcctgggagccggcgggtaccgctgcacggcctgcgaacccggctacactggccagtactgtgagcagtgtggcccaggttacgtgggtaaccccagtgtgcaagggggccagtgcctgccagagacaaaccaagccccactggtggtcgaggtccatcctgctcgaagcatagtgccccaaggtggctcccactccctgcggtgtcaggtcagtgggagnnnaccccactacttctattggtcccgtgaggatgggcggcctgtgcccagcggcacccagcagcgacatcaaggctccgagctccacttccccagcgtccagccctcggatgctggggtctacatttgcacctgccgtaatctccaccaatccaataccagccgggcagagctgctggtcactgaggctccaagcaagcccatcacagtgactgtggaggagcagcggagccagagcgtgcgccccggagctgacgtcaccttcatctgcacagccaaaagcaagtccccagcctataccctggtgtggacccgcctgcacaacgggaaactgcccacccgagccatggatttcaatggcatcctgaccattcgcaacgtccagctgagtgatgcaggcacctacgtgtgcaccggctccaacatgtttgccatggaccagggcacagccactctacatgtgcaggcctcgggcaccttgtccgcccccgtggtctccatccatccgccacagctcacagtgcagcccgggcaactggcggagttccgctgcagcgccacagggagccccacgcccaccctcgagtggacagggggccccggcggccagctccctgcgaaggcacaaatccacggcggcatcctgcgcctgccagctgtcgagcccacggatcaggcccagtacttgtgccgagcccacagcagcgctgggcagcaggtggccagggctgtgctccacgtgcatgggggcggtgggcccagagtccaagtgagcccagagaggacccaggtccacgcaggccgcaccgtcaggctgtactgcagggctgcaggcgtgcctagcgccaccatcacctggaggaaggaagggggcagcctcccaccacaggcccggtcagagcgcacagacatcgcgacactgctcatcccagccatcacgactgctgacgccggcttctacctctgcgtggccaccagccctgcaggcactgcccaggcccggatccaagtggttgtcctttcagcctcagatgccagcccaccgccggtcaagattgagtcctcatcgccttctgtgacagaagggcaaacactcgacctcaactgtgtggtggcagggtcagcccatgcccaggtcacctggtacaggcgagggggtagcctgcctccccacacccaggtgcacggctcccgtctgcggctcccccaggtctcaccagctgattctggagaatatgtgtgccgtgtggagaatggatcgggccccaaggaggcctccattactgtgtctgtgctccacggcacccattctggccccagctacaccccagtgcccggcagcacccggcccatccgcatcgagccctcctcctcacacgtggcggaagggcagaccctggatctgaactgcgtggtgcccgggcaggcccacgcccaggtcacgtggcacaagcgtgggggcagcctccctgcccggcaccagacccacggctcgctgctgcggctgcaccaggtgaccccggccgactcaggcgagtatgtgtgccatgtggtgggcacctccggccccctagaggcctcagtcctggtcaccatcgaagcctctgtcatccctggacccatcccacctgtcaggatcgagtcttcatcctccacagtggccgagggccagaccctggatctgagctgcgtggtggcagggcaggcccacgcccaggtcacatggtacaagcgtgggggcagcctccctgcccggcaccaggttcgtggctcccgcctgtacatcttccaggcctcacctgccgatgcgggacagtacgtctgccgggccagcaacggcatggaggcctccatcacggtcacagtaactgggacccagggggccaacttagcctaccctgccggcagcacccagcccatccgcatcgagccctcctcctcgcaagtggcggaagggcagaccctggatctgaactgcgtggtgcccgggcagtcccatgcccaggtcacgtggcacaagcgtgggggcagcctccctgtccggcaccagacccacggctccctgctgagactctaccaagcgtcccccgccgactcgggcgagtacgtgtgccgagtgttgggcagctccgtgcctctagaggcctctgtcctggtcaccattgagcctgcgggctcagtgcctgcacttggggtcacccccacggtccggatcgagtcatcgtcttcgcaagtggccgaggggcagaccctggacctgaactgcctcgttgctggtcaggcccatgcccaggtcacgtggcacaagcgcgggggcagcctcccggcccggcaccaggtgcatggctcgaggctacgcctgctccaggtgaccccagctgattcaggggagtacgtgtgccgtgtggtcggcagctcaggtacccaggaagcctcagtccttgtcaccatccagcagcgccttagtggctcccactcccagggtgtggcgtaccccgtccgcatcgagtcctcctcagcctccctggccaatggacacaccctggacctcaactgcctggttgccagccaggctccccacaccatcacctggtataagcgtggaggcagcttacccagccggcaccagatcgtgggctcccggctgcggatccctcaggtgactccggcagactcgggcgagtacgtgtgtcacgtcagtaacggtgcaggctcccgggagacctcgctcatcgtcaccatccagggcagcggttcctcccacgtgcccagcgtctccccaccgatcaggatcgagtcgtcttcccccacggtggtggaagggcagaccttggatctgaactgcgtggtcgccaggcagccccaggctatcatcacatggtacaagcgtgggggcagccttccctcccgacaccagacccatggctcccacctgcggttgcaccaaatgtctgtggctgactcgggcgagtatgtgtgccgggccaacaacaacatcgatgccctggaggcctccatcgtcatctccgtctcccctagcgccggcagcccctccgcccctggcagctccatgcccatcagaattgagtcatcctcctcacacgtggccgaaggggagaccctggatctgaactgcgtggtccccgggcaggcccatgcccaggtcacttggcacaagcgtgggggcagcctccccagtcaccatcagacccgcggctcacggctgcggctgcaccatgtgtccccggccgactcgggtgaatacgtgtgccgggtgatgggcagctctggccccctggaggcctcagtcctggtcaccatcgaagcctctggctcaagtgctgtccacgtccccgccccaggtggagccccacccatccgcatcgagccctcctcctcccgagtggcagaagggcagaccctggatctgaagtgcgtggtgcccgggcaggcccacgcccaggtcacgtggcacaagcgtggaggaaacctccctgcccggcaccaggtccacggcccactgctgaggctgaaccaggtgtccccggctgactctggcgagtactcgtgccaagtgaccggaagctcaggcaccctggaggcatctgtcctggtcacaattgagccctccagcccaggacccattcctgctccaggactggcccagcccatctacatcgaggcctcctcttcacacgtgactgaagggcagactctggatctgaactgtgtggtgcccgggcaggcccatgcccaggtcacgtggtacaagcgcgggggcagcctccccgcccggcaccagacccatggctcccagctgcggctccaccncgtctcccctgccgactcaggcgagtatgtgtgtcgtgcagccngcggcccaggccctgagcaagaagcctccttcacagtcaccgtcccgcccagtgaggggtcttcctaccgccttaggagcccggtcatctccatcgacccgcccagcagcaccgtgcagcagggccaggatgccagcttcaagtgcctcatccatgacggggcagcccccatcagcctcgagtggaagacccggaaccaggagctggaggacaacgtccacatcagtcccaatggctccatcatcaccatcgtgggcacccggcccagcaaccacggtacctaccgctgcgtggcctccaatgcctacggtgtggcccagagtgtggtgaacctcagtgtgcacgggccccctacagtgtccgtgctccccgagggccccgtgtgggtgaaagtgggaaaggctgtcaccctggagtgtgtcagtgccggggagccccgctcctctgctcgttggacccggatcagcagcacccctgccaagttggagcagcggacatatgggctcatggacagccacgcggtgctgcagatttcatcagctaaaccatcagatgcgggcacttatgtgtgccttgctcagaatgcactaggcacagcacagaagcaggtggaggtgatcgtggacacgggcgccatggccccaggggcccctcaggtccaagctgaagaagctgagctgactgtggaggctggacacacggccaccttgcgctgctcagccacaggcagccccgcgcccaccatccactggtccaagctgcgttccccactgccctggcagcaccggctggaaggtgacacactcatcataccccgggtagcccagcaggactcgggccagtacatctgcaatgccactagccctgctgggcacgctgaggccaccatcatcctgcacgtggagagcccaccatatgccaccacggtcccagagcacgcttcggtgcaggcaggggagacggtgcagctccagtgcctggctcacgggacacccccactcaccttccagtggagccgcgtgggcagcagccttcctgggagggcgaccgccaggaacgagctgctgcactttgagcgtgcagcccctgaggactcaggccgctaccgctgccgggtcaccaacaaggtgggctcagccgaggcctttgcccagctgctcgtccaaggccctcccggctctctccctgccacctccatcccagcagggtccacgcccaccgtgcaggtcacgcctcagctagagaccaagagcattggggccagcgttgagttccactgtgctgtgcccagcgaccggggtacccagctccgttggttcaaggaagggggtcagctgcctccgggtcacagcgtgcaggatggggtgctccgaatccagaacttggaccagagctgccaagggacgtatatatgccaggcccatggaccttgggggaaggcccaggccagtgcccagctggttatccaagccctgccctcggtgctcatcaacatccggacctctgtgcagaccgtggtggttggccacgccgtggagttcgaatgcctggcactgggtgaccccaagcctcaggtgacatggagcaaagttggagggcacctgcggccaggcattgtgcagagcggaggtgtcgtcaggatcgcccacgtagagctggctgatgcgggacagtatcgctgcactgccaccaacgcagctggcaccacacaatcccacgtcctgctgcttgtgcaagccttgccccagatctcaatgccccaagaagtccgtgtgcctgctggttctgcagctgtcttcccctgcatagcctcaggctaccccactcctgacatcagctggagcaagctggatggcagcctgccacctgacagccgcctggagaacaacatgctgatgctgccctcagtccgaccccaggacgcaggtacctacgtctgcaccgccactaaccgccagggcaaggtcaaagcctttgcccacctgcaggtgccagagcgggtggtgccctacttcacgcagaccccctactccttcctaccgctgcccaccatcaaggatgcctacaggaagttcgagatcaagatcaccttccggcccgactcagccgatgggatgctgctgtacaatgggcagaagcgagtcccagggagccccaccaacctggccaaccggcagcccgacttcatctccttcggcctcgtggggggaaggcccgagttccggttcgatgcaggctcaggcatggccaccatccgccatcccacaccactggccctgggccatttccacaccgtgaccctgctgcgcagcctcacccagggctccctgattgtgggtgacctggccccggtcaatgggacctcccagggcaagttccagggcctggatctgaacgaggaactctacctgggtggctatcctgactatggtgccatccccaaggcggggctgagcagcggcttcataggctgtgtccgggagctgcgcatccagggcgaggagatcgtcttccatgacctcaacctcacggcgcacggcatctcccactgccccacctgtcgggaccggccctgccagaatggcggtcagtgccatgactctgagagcagcagctacgtgtgcgtctgcccagctggcttcaccgggagccgctgtgagcactcgcaggccctgcactgccatccagaggcctgtgggcccgacgccacctgtgtgaaccggcctgacggtcgaggctacacctgccgctgccacctgggccgctcggggttgcggtgtgaggaaggtgtgacagtgaccaccccctcgctgtcgggtgctggctcctacctggcactgcccgccctcaccaacacacaccacgagctacgcctggacgtggagttcaagccactcgcccctgacggggtcctgctgttcagcggggggaagagcgggcctgtggaggacttcgtgtccctggcgatggtgggcggccacctggagttccgctatgagttggggtcagggctggccgttctgcggagcgccgagccgctggccctgggccgctggcaccgtgtgtctgcagagcgtctcaacaaggacggcagcctgcgggtgaatggtggacgccctgtgctgcgctcctcgcccggcaagagccagggcctcaacctgcacaccctgctctacctggggggtgtggagccttccgtgccactgtccccggccaccaacatgagcgctcacttccgcggctgtgtgggcgaggtgtcagtgaatggcaaacggctggacctcacctacagtttcctaggcagccagggcatcgggcaatgctatgatagctccccatgtgagcgccagccttgccaacatggtgccacgtgcatgcccgctggcgagtatgagttccagtgcctgtgtcgagatggattcaaaggagacctgtgtgagcacgaggagaacccctgccagctccgtgaaccctgtctgcatgggggcacctgccagggcacccgctgcctctgcctccctggcttctctggcccacgctgccaacaaggctctggacatggcatagcagagtccgactggcatcttgaaggcagcgggggcaatgatgcccctgggcagtacggagcctatttccacgatgatggcttcctcgccttccctggccatgtcttctccaggagcctgcccgaggtgcccgagaccatcgagctggaggttcggaccagcacagccagtggcctcctgctctggcagggtgtggaggtgggagaggccggccaaggcaaggacttcatcagcctcgggcttcaagacgggcaccttgtcttcaggtaccagctgggtagtggggaggcccgcctggtctctgaggaccccatcaatgacggcgagtggcaccgggtgacagcactgcgggagggccgcagaggttccatccaagtcgacggtgaggagctggtcagcggccggtccccaggtcccaacgtggcagtcaacgccaagggcagcgtctacatcggcggagcccctgacgtggccacgctgaccgggggcagattctcctcgggcatcacaggctgtgtcaagaacctggtgctgcactcggcccgacccggcgccccgcccccacagcccctggacctgcagcaccgcgcccaggccggggccaacacacgcccctgcccctcgtaggcacctgcctgccccacacggactcccgggccacgccccagcccgacaatgtcgagtatattattattaatattattatgaatttttgtaagaaaccgaggcgatgccacgctttgctgctaccgccctgggctggactggaggtgggcatgccaccctcacacacacagctgggcaaagccacaaggctggccagcaaggcaggttggatgggagtgggcacctcagaaagtcaccaggacttggggtcaggaacagtggctgggtgggcccagaactgcccccactgtccccctacccaccgatggagcccccagatagagctgggtggcctgtttctgcagcccttgggcagttctcactcctaggagagccaacctcggcttgtgggctggtgccccacagctacctgagacgggcatcgcaggagtctctgccacccactcaggattgggaattgtctttagtgccggctgtggagcaaaaggcagctcacccctgggcaggcggtccccatccccaccagctcgtttttcagcacccccacccacctccacccagcccctggcacctcctctggcagactccccctcctaccacgtcctcctggcctgcattcccaccccctcctgccagcacacagcctggggtccctccctcaggggctgtaagggaaggcccaccccaactcttaccaggagctgctacaggcagagcccagcactgatagggccccgcccaccgggccccgcccaccccaggccacatccccacccatctggaagtgaaggcccagggactcctccaacagacaacggacggacggatgccgctggtgctcaggaagagctagtgccttaggtgggggaaggcaggactcacgactgagagagagaggagggggatatgaccaccctgccccatctgcaggagcctgaagatccagctcaagtgccatcctgccagtggcccccagactgtggggttgggacgcctggcctctgtgtcctagaagggaccctcctgtggtctttgtcttgatttttcttaataaacggtgctatccccgcca

SEQ ID NO: 367559 - DNA, 3853 bp, Homo sapiens
  misc_feature (43)..(43): n is a, c, g, or t
  misc_feature (45)..(46): n is a, c, g, or t
aactcacacccatcaaccctcaataagctaggtacgagctggntnnaatcggccgaggccctgccctcggtgctcatcaacatccggacctctgtgcagaccgtggtggttggccacgccgtggagttcgaatgcctggcactgggtgaccccaagcctcaggtgacatggagcaaagttggagggcacctgcggccaggcattgtgcagagcggaggtgtcgtcaggatcgcccacgtagagctggctgatgcgggacagtatcgctgcactgccaccaacgcagctggcaccacacaatcccacgtcctgctgcttgtgcaagccttgccccagatctcaatgccccaagaagtccgtgtgcctgctggttctgcagctgtcttcccctgcatagcctcaggctaccccactcctgacatcagctggagcaagctggatggcagcctgccacctgacagccgcctggagaacaacatgctgatgctgccctcagtccgaccccaggacgcaggtacctacgtctgcaccgccactaaccgccagggcaaggtcaaagcctttgcccacctgcaggtgccagagcgggtggtgccctacttcacgcagaccccctactccttcctaccgctgcccaccatcaaggatgcctacaggaagttcgagatcaagatcaccttccggcccgactcagccgatgggatgctgctgtacaatgggcagaagcgagtcccagggagccccaccaacctggccaaccggcagcccgacttcatctccttcggcctcgtggggggaaggcccgagttccggttcgatgcaggctcaggcatggccaccatccgccatcccacaccactggccctgggccatttccacaccgtgaccctgctgcgcagcctcacccagggctccctgattgtgggtgacctggccccggtcaatgggacctcccagggcaagttccagggcctggatctgaacgaggaactctacctgggtggctatcctgactatggtgccatccccaaggcggggctgagcagcggcttcataggctgtgtccgggagctgcgcatccagggcgaggagatcgtcttccatgacctcaacctcacggcgcacggcatctcccactgccccacctgtcgggaccggccctgccagaatggcggtcagtgccatgactctgagagcagcagctacgtgtgcgtctgcccagctggcttcaccgggagccgctgtgagcactcgcaggccctgcactgccatccagaggcctgtgggcccgacgccacctgtgtgaaccggcctgacggtcgaggctacacctgccgctgccacctgggccgctcggggttgcggtgtgaggaaggtgtgacagtgaccaccccctcgctgtcgggtgctggctcctacctggcactgcccgccctcaccaacacacaccacgagctacgcctggacgtggagttcaagccactcgcccctgacggggtcctgctgttcagcggggggaagagcgggcctgtggaggacttcgtgtccctggcgatggtgggcggccacctggagttccgctatgagttggggtcagggctggccgttctgcggagcgccgagccgctggccctgggccgctggcaccgtgtgtctgcagagcgtctcaacaaggacggcagcctgcgggtgaatggtggacgccctgtgctgcgctcctcgcccggcaagagccagggcctcaacctgcacaccctgctctacctggggggtgtggagccttccgtgccactgtccccggccaccaacatgagcgctcacttccgcggctgtgtgggcgaggtgtcagtgaatggcaaacggctggacctcacctacagtttcctaggcagccagggcatcgggcaatgctatgatagctccccatgtgagcgccagccttgccaacatggtgccacgtgcatgcccgctggcgagtatgagttccagtgcctgtgtcgagatggattcaaaggagacctgtgtgagcacgaggagaacccctgccagctccgtgaaccctgtctgcatgggggcacctgccagggcacccgctgcctctgcctccctggcttctctggcccacgctgccaacaaggctctggacatggcatagcagagtccgactggcatcttgaaggcagcgggggcaatgatgcccctgggcagtacggagcctatttccacgatgatggcttcctcgccttccctggccatgtcttctccaggagcctgcccgaggtgcccgagaccatcgagctggaggttcggaccagcacagccagtggcctcctgctctggcagggtgtggaggtgggagaggccggccaaggcaaggacttcatcagcctcgggcttcaagacgggcaccttgtcttcaggtaccagctgggtagtggggaggcccgcctggtctctgaggaccccatcaatgacggcgagtggcaccgggtgacagcactgcgggagggccgcagaggttccatccaagtcgacggtgaggagctggtcagcggccggtccccaggtcccaacgtggcagtcaacgccaagggcagcgtctacatcggcggagcccctgacgtggccacgctgaccgggggcagattctcctcgggcatcacaggctgtgtcaagaacctggtgctgcactcggcccgacccggcgccccgcccccacagcccctggacctgcagcaccgcgcccaggccggggccaacacacgcccctgcccctcgtaggcacctgcctgccccacacggactcccgggccacgccccagcccgacaatgtcgagtatattattattaatattattatgaatttttgtaagaaaccgaggcgatgccacgctttgctgctaccgccctgggctggactggaggtgggcatgccaccctcacacacacagctgggcaaagccacaaggctggccagcaaggcaggttggatgggagtgggcacctcagaaagtcaccaggacttggggtcaggaacagtggctgggtgggcccagaactgcccccactgtccccctacccaccgatggagcccccagatagagctgggtggcctgtttctgcagcccttgggcagttctcactcctaggagagccaacctcggcttgtgggctggtgccccacagctacctgagacgggcatcgcaggagtctctgccacccactcaggattgggaattgtctttagtgccggctgtggagcaaaaggcagctcacccctgggcaggcggtccccatccccaccagctcgtttttcagcacccccacccacctccacccagcccctggcacctcctctggcagactccccctcctaccacgtcctcctggcctgcattcccaccccctcctgccagcacacagcctggggtccctccctcaggggctgtaagggaaggcccaccccaactcttaccaggagctgctacaggcagagcccagcactgatagggccccgcccaccgggccccgcccaccccaggccacatccccacccatctggaagtgaaggcccagggactcctccaacagacaacggacggacggatgccgctggtgctcaggaagagctagtgccttaggtgggggaaggcaggactcacgactgagagagagaggagggggatatgaccaccctgccccatctgcaggagcctgaagatccagctcaagtgccatcctgccagtggcccccagactgtggggttgggacgcctggcctctgtgtcctagaagggaccctcctgtggtctttgtcttgatttttcttaataaacggtgctatccccgcca

SEQ ID NO: 367560 - DNA, 14153 bp, Homo sapiens
  misc_feature (1383)..(1383): n is a, c, g, or t
  misc_feature (1392)..(1392): n is a, c, g, or t
  misc_feature (5192)..(5194): n is a, c, g, or t
  misc_feature (9022)..(9022): n is a, c, g, or t
  misc_feature (9066)..(9066): n is a, c, g, or t
ggccggcgagcgggcggctgcgggcggcgcggagcgggcggcgcggagcgagcgagcgagagagcggcgcgggccgggccatggggtggcgggcgccgggcgcgctgctgctggcgctgctgctgcacgggcggctgctggcggtgacccatgggctgagggcatacgatggcttgtctctgcctgaggacatagagaccgtcacagcaagccaaatgcgctggacacattcgtacctttctgatgatgaggacatgctggctgacagcatctcaggagacgacctgggcagtggggacctgggcagcggggacttccagatggtttatttccgagccctggtgaatttcactcgctccatcgagtacagccctcagctggaggatgcaggctccagagagtttcgagaggtgtccgaggctgtggtagacacgctggagtcggagtacttgaaaattcccggagaccaggttgtcagtgtggtgttcatcaaggagctggatggctgggtttttgtggagctcgatgtgggctcggaagggaatgcggatggtgctcagattcaggagatgctgctcagggtcatctccagcggctctgtggcctcctacgtcacctctccccagggattccagttccgacgcctgggcacagtgccccagttcccaagagcctgcacggaggccgagtttgcctgccacagctacaatgagtgtgtggccctggagtatcgctgtgaccggcggcccgactgcagggacatgtctgatgagctcaattgtgaggagccagtcctgggtatcagccccacattctctctccttgtggagacgacatctttaccgccccggccagagacaaccatcatgcgacagccaccagtcacccacgctcctcagcccctgcttcccggttccgtcaggcccctgccctgtgggccccaggaggccgcatgccgcaatgggcactgcatccccagagactacctctgcgacggacaggaggactgcgaggacggcagcgatgagctagactgtggccccccgccaccctgtgagcccaacgagttcccctgcgggaatggacattgtgccctcaagctgtggcgctgcgatggtgactttgactgtgaggaccgaactgatgaagccaactgccccaccaagcgtcctgaggaagtgtgcgggcccacacagttccgatgcgtctctaccaacatgtgcatcccagccagcttccactgtgacgaggagagcgactgtcctgaccggagcgacgagtttggctgcatgcccccccaggtggtgacacctccccgggagtccatccaggcttcccggggccagacagtgaccttcacctgcgtggccattggcgtccccnccccctttntcatcaattggaggctcaactggggccacatcccctctcatcccagggtgacagtgaccagcgagggtggccgtggcacactgatcatccgtgatgtgaaggagtcagaccagggtgcctacacctgtgaggccatgaacgcccggggcatggtgtttggcattcctgacggtgtccttgagctcgtcccacaacgaggcccctgccctgacggccacttctacctggagcacagcgccgcctgcctgccctgcttctgctttggcatcaccagcgtgtgccagagcacccgccgcttccgggaccagatcaggctgcgctttgaccaacccgatgacttcaagggtgtgaatgtgacaatgcctgcgcagcccggcacgccacccctctcctccacgcagctgcagatcgacccatccctgcacgagttccagctagtcgacctgtcccgccgcttcctcgtccacgactccttctgggctctgcctgaacagttcctgggcaacaaggtggactcctatggcggctccctgcgttacaacgtgcgctacgagttggcccgtggcatgctggagccagtgcagcggccggacgtggtcctcgtgggtgccgggtaccgcctcctctcccgaggccacacacccacccaacctggtgctctgaaccagcgccaggtccagttctctgaggagcactgggtccatgagtctggccggccggtgcagcgcgcggagctgctgcaggtgctgcagagcctggaggccgtgctcatccagaccgtgtacaacaccaagatggctagcgtgggacttagcgacatcgccatggataccaccgtcacccatgccaccagccatggccgtgcccacagtgtggaggagtgcagatgccccattggctattctggcttgtcctgcgagagctgtgatgcccacttcactcgggtgcctggtgggccctacctgggcacctgctctggttgcagttgcaatggccatgccagctcctgtgaccctgtgtatggccactgcctgaattgccagcacaacacggaggggccacagtgcaacaagtgcaaggctggcttctttggggacgccatgaaggccacggccacttcctgccggccctgcccttgcccatacatcgatgcctcccgcagattctcagacacttgcttcctggacacggatggccaagccacatgtgacgcctgtgccccaggctacactggccgccgctgtgagagctgtgcccccggatacgagggcaaccccatccagcccggcgggaagtgcaggcccgtcaaccaggagattgtgcgctgtgacgagcgtggcagcatggggacctccggggaggcctgccgctgtaagaacaatgtggtggggcgcttgtgcaatgaatgtgctgacggctctttccacctgagtacccgaaaccccgatggctgcctcaagtgcttctgcatgggtgtcagtcgccactgcaccagctcttcatggagccgtgcccagttgcatggggcctctgaggagcctggtcacttcagcctgaccaacgccgcaagcacccacaccaccaacgagggcatcttctcccccacgcccggggaactgggattctcctccttccacagactcttatctggaccctacttctggagcctcccttcacgcttcctgggggacaaggtgacctcctatggaggagagctgcgcttcacagtgacccagaggtcccagccgggctccacacccctgcacgggcagccgttggtggtgctgcaaggtaacaacatcatcctagagcaccatgtggcccaggagcccagccccggccagcccagcaccttcattgtgcctttccgggagcaagcatggcagcggcccgatgggcagccagccacacgggagcacctgctgatggcactggcaggcatcgacaccctcctgatccgagcatcctacgcccagcagcccgctgagagcagggtctctggcatcagcatggacgtggctgtgcccgaggaaaccggccaggaccccgcgctggaagtggaacagtgctcctgcccacccgggtaccgtgggccgtcctgccaggactgtgacacaggctacacacgcacgcccagtggcctctacctgggtacctgtgaacgctgcagctgccatggccactcagaggcctgcgagccagaaacaggtgcctgccagggctgccagcatcacacggagggccctcggtgtgagcagtgccagccaggatactacggggacgcccagcgggggacaccacaggactgccagctgtgcccctgctacggagaccctgctgccggccaggctgcccacacttgttttctggacacagacggccaccccacctgtgatgcgtgctccccaggccacagtgggcgtcactgtgagaggtgcgcccctggctactatggcaaccccagccagggccagccatgccagagagacagccaggtgccagggcccataggctgcaactgtgacccccaaggcagcgtcagcagccagtgtgatgctgctggtcagtgccagtgcaaggcccaggtggaaggcctcacttgcagccactgccggccccaccacttccacctgagtgccagcaacccagacggctgcctgccctgcttctgtatgggcatcacccagcagtgcgccagctctgcctacacacgccacctgatctccacccactttgcccctggggacttccaaggctttgccctggtgaacccacagcgaaacagccgcctgacaggagaattcactgtggaacccgtgcccgagggtgcccagctctcttttggcaactttgcccaactcggccatgagtccttctactggcagctgccggagacataccagggagacaaggtggcggcctacggtgggaagttgcgatacaccctctcctacacagcaggcccacagggcagcccactctctgaccccgatgtgcagatcacgggcaacaacatcatgctagtggcctcccagccagcgctgcagggccctgagaggaggagctacgagatcatgttccgagaggaattctggcgccggcccgatgggcagccggccacacgcgagcacctcctgatggcactggccgacctggatgagctcctgatccgggccacgttctcctccgtgccgctggtggccagcatcagcgcagtcagcctggaggtcgcccagccggggccctcaaacagaccccgcgccctcgaggtggaggagtgccgctgcccgccaggctacatcggtctgtcctgccaggactgtgcccccggctacacgcgcaccgggagtgggctctacctcggccactgcgagctatgtgaatgcaatggccactcagacctgtgccacccagagactggggcctgctcgcaatgccagcacaacgccgcaggggagttctgcgagctttgtgcccctggctactacggagatgccacagccgggacgcctgaggactgccagccctgtgcctgcccactgaccaacccagagaacatgttttcccgcacctgtgagagcctgggagccggcgggtaccgctgcacggcctgcgaacccggctacactggccagtactgtgagcagtgtggcccaggttacgtgggtaaccccagtgtgcaagggggccagtgcctgccagagacaaaccaagccccactggtggtcgaggtccatcctgctcgaagcatagtgccccaaggtggctcccactccctgcggtgtcaggtcagtgggagnnnaccccactacttctattggtcccgtgaggatgggcggcctgtgcccagcggcacccagcagcgacatcaaggctccgagctccacttccccagcgtccagccctcggatgctggggtctacatttgcacctgccgtaatctccaccaatccaataccagccgggcagagctgctggtcactgaggctccaagcaagcccatcacagtgactgtggaggagcagcggagccagagcgtgcgccccggagctgacgtcaccttcatctgcacagccaaaagcaagtccccagcctataccctggtgtggacccgcctgcacaacgggaaactgcccacccgagccatggatttcaatggcatcctgaccattcgcaacgtccagctgagtgatgcaggcacctacgtgtgcaccggctccaacatgtttgccatggaccagggcacagccactctacatgtgcaggcctcgggcaccttgtccgcccccgtggtctccatccatccgccacagctcacagtgcagcccgggcaactggcggagttccgctgcagcgccacagggagccccacgcccaccctcgagtggacagggggccccggcggccagctccctgcgaaggcacaaatccacggcggcatcctgcgcctgccagctgtcgagcccacggatcaggcccagtacttgtgccgagcccacagcagcgctgggcagcaggtggccagggctgtgctccacgtgcatgggggcggtgggcccagagtccaagtgagcccagagaggacccaggtccacgcaggccgcaccgtcaggctgtactgcagggctgcaggcgtgcctagcgccaccatcacctggaggaaggaagggggcagcctcccaccacaggcccggtcagagcgcacagacatcgcgacactgctcatcccagccatcacgactgctgacgccggcttctacctctgcgtggccaccagccctgcaggcactgcccaggcccggatccaagtggttgtcctttcagcctcagatgccagcccaccgccggtcaagattgagtcctcatcgccttctgtgacagaagggcaaacactcgacctcaactgtgtggtggcagggtcagcccatgcccaggtcacctggtacaggcgagggggtagcctgcctccccacacccaggtgcacggctcccgtctgcggctcccccaggtctcaccagctgattctggagaatatgtgtgccgtgtggagaatggatcgggccccaaggaggcctccattactgtgtctgtgctccacggcacccattctggccccagctacaccccagtgcccggcagcacccggcccatccgcatcgagccctcctcctcacacgtggcggaagggcagaccctggatctgaactgcgtggtgcccgggcaggcccacgcccaggtcacgtggcacaagcgtgggggcagcctccctgcccggcaccagacccacggctcgctgctgcggctgcaccaggtgaccccggccgactcaggcgagtatgtgtgccatgtggtgggcacctccggccccctagaggcctcagtcctggtcaccatcgaagcctctgtcatccctggacccatcccacctgtcaggatcgagtcttcatcctccacagtggccgagggccagaccctggatctgagctgcgtggtggcagggcaggcccacgcccaggtcacatggtacaagcgtgggggcagcctccctgcccggcaccaggttcgtggctcccgcctgtacatcttccaggcctcacctgccgatgcgggacagtacgtctgccgggccagcaacggcatggaggcctccatcacggtcacagtaactgggacccagggggccaacttagcctaccctgccggcagcacccagcccatccgcatcgagccctcctcctcgcaagtggcggaagggcagaccctggatctgaactgcgtggtgcccgggcagtcccatgcccaggtcacgtggcacaagcgtgggggcagcctccctgtccggcaccagacccacggctccctgctgagactctaccaagcgtcccccgccgactcgggcgagtacgtgtgccgagtgttgggcagctccgtgcctctagaggcctctgtcctggtcaccattgagcctgcgggctcagtgcctgcacttggggtcacccccacggtccggatcgagtcatcgtcttcgcaagtggccgaggggcagaccctggacctgaactgcctcgttgctggtcaggcccatgcccaggtcacgtggcacaagcgcgggggcagcctcccggcccggcaccaggtgcatggctcgaggctacgcctgctccaggtgaccccagctgattcaggggagtacgtgtgccgtgtggtcggcagctcaggtacccaggaagcctcagtccttgtcaccatccagcagcgccttagtggctcccactcccagggtgtggcgtaccccgtccgcatcgagtcctcctcagcctccctggccaatggacacaccctggacctcaactgcctggttgccagccaggctccccacaccatcacctggtataagcgtggaggcagcttacccagccggcaccagatcgtgggctcccggctgcggatccctcaggtgactccggcagactcgggcgagtacgtgtgtcacgtcagtaacggtgcaggctcccgggagacctcgctcatcgtcaccatccagggcagcggttcctcccacgtgcccagcgtctccccaccgatcaggatcgagtcgtcttcccccacggtggtggaagggcagaccttggatctgaactgcgtggtcgccaggcagccccaggctatcatcacatggtacaagcgtgggggcagccttccctcccgacaccagacccatggctcccacctgcggttgcaccaaatgtctgtggctgactcgggcgagtatgtgtgccgggccaacaacaacatcgatgccctggaggcctccatcgtcatctccgtctcccctagcgccggcagcccctccgcccctggcagctccatgcccatcagaattgagtcatcctcctcacacgtggccgaaggggagaccctggatctgaactgcgtggtccccgggcaggcccatgcccaggtcacttggcacaagcgtgggggcagcctccccagtcaccatcagacccgcggctcacggctgcggctgcaccatgtgtccccggccgactcgggtgaatacgtgtgccgggtgatgggcagctctggccccctggaggcctcagtcctggtcaccatcgaagcctctggctcaagtgctgtccacgtccccgccccaggtggagccccacccatccgcatcgagccctcctcctcccgagtggcagaagggcagaccctggatctgaagtgcgtggtgcccgggcaggcccacgcccaggtcacgtggcacaagcgtggaggaaacctccctgcccggcaccaggtccacggcccactgctgaggctgaaccaggtgtccccggctgactctggcgagtactcgtgccaagtgaccggaagctcaggcaccctggaggcatctgtcctggtcacaattgagccctccagcccaggacccattcctgctccaggactggcccagcccatctacatcgaggcctcctcttcacacgtgactgaagggcagactctggatctgaactgtgtggtgcccgggcaggcccatgcccaggtcacgtggtacaagcgcgggggcagcctccccgcccggcaccagacccatggctcccagctgcggctccaccncgtctcccctgccgactcaggcgagtatgtgtgtcgtgcagccngcggcccaggccctgagcaagaagcctccttcacagtcaccgtcccgcccagtgaggggtcttcctaccgccttaggagcccggtcatctccatcgacccgcccagcagcaccgtgcagcagggccaggatgccagcttcaagtgcctcatccatgacggggcagcccccatcagcctcgagtggaagacccggaaccaggagctggaggacaacgtccacatcagtcccaatggctccatcatcaccatcgtgggcacccggcccagcaaccacggtacctaccgctgcgtggcctccaatgcctacggtgtggcccagagtgtggtgaacctcagtgtgcacgggccccctacagtgtccgtgctccccgagggccccgtgtgggtgaaagtgggaaaggctgtcaccctggagtgtgtcagtgccggggagccccgctcctctgctcgttggacccggatcagcagcacccctgccaagttggagcagcggacatatgggctcatggacagccacgcggtgctgcagatttcatcagctaaaccatcagatgcgggcacttatgtgtgccttgctcagaatgcactaggcacagcacagaagcaggtggaggtgatcgtggacacgggcgccatggccccaggggcccctcaggtccaagctgaagaagctgagctgactgtggaggctggacacacggccaccttgcgctgctcagccacaggcagccccgcgcccaccatccactggtccaagctgcgttccccactgccctggcagcaccggctggaaggtgacacactcatcataccccgggtagcccagcaggactcgggccagtacatctgcaatgccactagccctgctgggcacgctgaggccaccatcatcctgcacgtggagagcccaccatatgccaccacggtcccagagcacgcttcggtgcaggcaggggagacggtgcagctccagtgcctggctcacgggacacccccactcaccttccagtggagccgcgtgggcagcagccttcctgggagggcgaccgccaggaacgagctgctgcactttgagcgtgcagcccctgaggactcaggccgctaccgctgccgggtcaccaacaaggtgggctcagccgaggcctttgcccagctgctcgtccaaggccctcccggctctctccctgccacctccatcccagcagggtccacgcccaccgtgcaggtcacgcctcagctagagaccaagagcattggggccagcgttgagttccactgtgctgtgcccagcgaccggggtacccagctccgttggttcaaggaagggggtcagctgcctccgggtcacagcgtgcaggatggggtgctccgaatccagaacttggaccagagctgccaagggacgtatatatgccaggcccatggaccttgggggaaggcccaggccagtgcccagctggttatccaagccctgccctcggtgctcatcaacatccggacctctgtgcagaccgtggtggttggccacgccgtggagttcgaatgcctggcactgggtgaccccaagcctcaggtgacatggagcaaagttggagggcacctgcggccaggcattgtgcagagcggaggtgtcgtcaggatcgcccacgtagagctggctgatgcgggacagtatcgctgcactgccaccaacgcagctggcaccacacaatcccacgtcctgctgcttgtgcaagccttgccccagatctcaatgccccaagaagtccgtgtgcctgctggttctgcagctgtcttcccctgcatagcctcaggctaccccactcctgacatcagctggagcaagctggatggcagcctgccacctgacagccgcctggagaacaacatgctgatgctgccctcagtccgaccccaggacgcaggtacctacgtctgcaccgccactaaccgccagggcaaggtcaaagcctttgcccacctgcaggtgccagagcgggtggtgccctacttcacgcagaccccctactccttcctaccgctgcccaccatcaaggatgcctacaggaagttcgagatcaagatcaccttccggcccgactcagccgatgggatgctgctgtacaatgggcagaagcgagtcccagggagccccaccaacctggccaaccggcagcccgacttcatctccttcggcctcgtggggggaaggcccgagttccggttcgatgcaggctcaggcatggccaccatccgccatcccacaccactggccctgggccatttccacaccgtgaccctgctgcgcagcctcacccagggctccctgattgtgggtgacctggccccggtcaatgggacctcccagggcaagttccagggcctggatctgaacgaggaactctacctgggtggctatcctgactatggtgccatccccaaggcggggctgagcagcggcttcataggctgtgtccgggagctgcgcatccagggcgaggagatcgtcttccatgacctcaacctcacggcgcacggcatctcccactgccccacctgtcgggaccggccctgccagaatggcggtcagtgccatgactctgagagcagcagctacgtgtgcgtctgcccagctggcttcaccgggagccgctgtgagcactcgcaggccctgcactgccatccagaggcctgtgggcccgacgccacctgtgtgaaccggcctgacggtcgaggctacacctgccgctgccacctgggccgctcggggttgcggtgtgaggaaggtgtgacagtgaccaccccctcgctgtcgggtgctggctcctacctggcactgcccgccctcaccaacacacaccacgagctacgcctggacgtggagttcaagccactcgcccctgacggggtcctgctgttcagcggggggaagagcgggcctgtggaggacttcgtgtccctggcgatggtgggcggccacctggagttccgctatgagttggggtcagggctggccgttctgcggagcgccgagccgctggccctgggccgctggcaccgtgtgtctgcagagcgtctcaacaaggacggcagcctgcgggtgaatggtggacgccctgtgctgcgctcctcgcccggcaagagccagggcctcaacctgcacaccctgctctacctggggggtgtggagccttccgtgccactgtccccggccaccaacatgagcgctcacttccgcggctgtgtgggcgaggtgtcagtgaatggcaaacggctggacctcacctacagtttcctaggcagccagggcatcgggcaatgctatgatagctccccatgtgagcgccagccttgccaacatggtgccacgtgcatgcccgctggcgagtatgagttccagtgcctgtgtcgagatggattcaaaggagacctgtgtgagcacgaggagaacccctgccagctccgtgaaccctgtctgcatgggggcacctgccagggcacccgctgcctctgcctccctggcttctctggcccacgctgccaacaaggctctggacatggcatagcagagtccgactggcatcttgaaggcagcgggggcaatgatgcccctgggcagtacggagcctatttccacgatgatggcttcctcgccttccctggccatgtcttctccaggagcctgcccgaggtgcccgagaccatcgagctggaggttcggaccagcacagccagtggcctcctgctctggcagggtgtggaggtgggagaggccggccaaggcaaggacttcatcagcctcgggcttcaagacgggcaccttgtcttcaggtaccagctgggtagtggggaggcccgcctggtctctgaggaccccatcaatgacggcgagtggcaccgggtgacagcactgcgggagggccgcagaggttccatccaagtcgacggtgaggagctggtcagcggccggtccccaggtcccaacgtggcagtcaacgccaagggcagcgtctacatcggcggagcccctgacgtggccacgctgaccgggggcagattctcctcgggcatcacaggctgtgtcaagaacctggtgctgcactcggcccgacccggcgccccgcccccacagcccctggacctgcagcaccgcgcccaggccggggccaacacacgcccctgcccctcgtaggcacctgcctgccccacacggactcccgggccacgccccagcccgacaatgtcgagtatattattattaatattattatgaatttttgtaagaaaccgaggcgatgccacgctttgctgctaccgccctgggctggactggaggtgggcatgccaccctcacacacacagctgggcaaagccacaaggctggccagcaaggcaggttggatgggagtgggcacctcagaaagtcaccaggacttggggtcaggaacagtggctgggtgggcccagaactgcccccactgtccccctacccaccgatggagcccccagatagagctgggtggcctgtttctgcagcccttgggcagttctcactcctaggagagccaacctcggcttgtgggctggtgccccacagctacctgagacgggcatcgcaggagtctctgccacccactcaggattgggaattgtctttagtgccggctgtggagcaaaaggcagctcaccccacgcctggcctctgtgtcctagaagggaccctcctgtggtctttgtcttgatttttcttaataaacggtgctatccccgtttattacacatccccacccatctggaagtgaaggcccagggactcctccaacagacaacggacggacggatgccgctggtgctcaggaagagctagtgccttaggtgggggaaggcaggactcacgactgagagagagaggagggggatatgaccaccctgccccatctgcaggagcctgaagatccagctcaagtgccatcctgccagtggcccccagactgtggggttgggacgcctggcctctgtgtcctagaagggaccctcctgtggtctttgtcttgatttttcttaataaacggtgctatccccgcca

SEQ ID NO: 367561 - DNA, 2709 bp, Homo sapiens
cccttattgagtgagggcccccaaagaggacccctgtcatattggagctcctcccagccccgtgtgcaagggcaggggggctcctgtgccactgcagctggtgccaactggtcctgagcctctgggcctggagagtgaggcaggcaagggtcccagaggaaggcagagtagctggaccccacccgagggtccaggatccccactgcctcagctgagctgtggctgctgcaggtgtgacagtgaccaccccctcgctgtcgggtgctggctcctacctggcactgcccgccctcaccaacacacaccacgagctacgcctggacgtggagttcaagccactcgcccctgacggggtcctgctgttcagcggggggaagagcgggcctgtggaggacttcgtgtccctggcgatggtgggcggccacctggagttccgctatgagttggggtcagggctggccgttctgcggagcgccgagccgctggccctgggccgctggcaccgtgtgtctgcagagcgtctcaacaaggacggcagcctgcgggtgaatggtggacgccctgtgctgcgctcctcgcccggcaagagccagggcctcaacctgcacaccctgctctacctggggggtgtggagccttccgtgccactgtccccggccaccaacatgagcgctcacttccgcggctgtgtgggcgaggtgtcagtgaatggcaaacggctggacctcacctacagtttcctaggcagccagggcatcgggcaatgctatgatagctccccatgtgagcgccagccttgccaacatggtgccacgtgcatgcccgctggcgagtatgagttccagtgcctgtgtcgagatggattcaaaggagacctgtgtgagcacgaggagaacccctgccagctccgtgaaccctgtctgcatgggggcacctgccagggcacccgctgcctctgcctccctggcttctctggcccacgctgccaacaaggctctggacatggcatagcagagtccgactggcatcttgaaggcagcgggggcaatgatgcccctgggcagtacggagcctatttccacgatgatggcttcctcgccttccctggccatgtcttctccaggagcctgcccgaggtgcccgagaccatcgagctggaggttcggaccagcacagccagtggcctcctgctctggcagggtgtggaggtgggagaggccggccaaggcaaggacttcatcagcctcgggcttcaagacgggcaccttgtcttcaggtaccagctgggtagtggggaggcccgcctggtctctgaggaccccatcaatgacggcgagtggcaccgggtgacagcactgcgggagggccgcagaggttccatccaagtcgacggtgaggagctggtcagcggccggtccccaggtcccaacgtggcagtcaacgccaagggcagcgtctacatcggcggagcccctgacgtggccacgctgaccgggggcagattctcctcgggcatcacaggctgtgtcaagaacctggtgctgcactcggcccgacccggcgccccgcccccacagcccctggacctgcagcaccgcgcccaggccggggccaacacacgcccctgcccctcgtaggcacctgcctgccccacacggactcccgggccacgccccagcccgacaatgtcgagtatattattattaatattattatgaatttttgtaagaaaccgaggcgatgccacgctttgctgctaccgccctgggctggactggaggtgggcatgccaccctcacacacacagctgggcaaagccacaaggctggccagcaaggcaggttggatgggagtgggcacctcagaaagtcaccaggacttggggtcaggaacagtggctgggtgggcccagaactgcccccactgtccccctacccaccgatggagcccccagatagagctgggtggcctgtttctgcagcccttgggcagttctcactcctaggagagccaacctcggcttgtgggctggtgccccacagctacctgagacgggcatcgcaggagtctctgccacccactcaggattgggaattgtctttagtgccggctgtggagcaaaaggcagctcacccctgggcaggcggtccccatccccaccagctcgtttttcagcacccccacccacctccacccagcccctggcacctcctctggcagactccccctcctaccacgtcctcctggcctgcattcccaccccctcctgccagcacacagcctggggtccctccctcaggggctgtaagggaaggcccaccccaactcttaccaggagctgctacaggcagagcccagcactgatagggccccgcccaccgggccccgcccaccccaggccacatccccacccatctggaagtgaaggcccagggactcctccaacagacaacggacggacggatgccgctggtgctcaggaagagctagtgccttaggtgggggaaggcaggactcacgactgagagagagaggagggggatatgaccaccctgccccatctgcaggagcctgaagatccagctcaagtgccatcctgccagtggcccccagactgtggggttgggacgcctggcctctgtgtcctagaagggaccctcctgtggtctttgtcttgatttttcttaataaacggtgctatccccgcca

SEQ ID NO: 367562 - DNA, 13683 bp, Homo sapiens
  misc_feature (1383)..(1383): n is a, c, g, or t
  misc_feature (1392)..(1392): n is a, c, g, or t
  misc_feature (5192)..(5194): n is a, c, g, or t
  misc_feature (9022)..(9022): n is a, c, g, or t
  misc_feature (9066)..(9066): n is a, c, g, or t
ggccggcgagcgggcggctgcgggcggcgcggagcgggcggcgcggagcgagcgagcgagagagcggcgcgggccgggccatggggtggcgggcgccgggcgcgctgctgctggcgctgctgctgcacgggcggctgctggcggtgacccatgggctgagggcatacgatggcttgtctctgcctgaggacatagagaccgtcacagcaagccaaatgcgctggacacattcgtacctttctgatgatgaggacatgctggctgacagcatctcaggagacgacctgggcagtggggacctgggcagcggggacttccagatggtttatttccgagccctggtgaatttcactcgctccatcgagtacagccctcagctggaggatgcaggctccagagagtttcgagaggtgtccgaggctgtggtagacacgctggagtcggagtacttgaaaattcccggagaccaggttgtcagtgtggtgttcatcaaggagctggatggctgggtttttgtggagctcgatgtgggctcggaagggaatgcggatggtgctcagattcaggagatgctgctcagggtcatctccagcggctctgtggcctcctacgtcacctctccccagggattccagttccgacgcctgggcacagtgccccagttcccaagagcctgcacggaggccgagtttgcctgccacagctacaatgagtgtgtggccctggagtatcgctgtgaccggcggcccgactgcagggacatgtctgatgagctcaattgtgaggagccagtcctgggtatcagccccacattctctctccttgtggagacgacatctttaccgccccggccagagacaaccatcatgcgacagccaccagtcacccacgctcctcagcccctgcttcccggttccgtcaggcccctgccctgtgggccccaggaggccgcatgccgcaatgggcactgcatccccagagactacctctgcgacggacaggaggactgcgaggacggcagcgatgagctagactgtggccccccgccaccctgtgagcccaacgagttcccctgcgggaatggacattgtgccctcaagctgtggcgctgcgatggtgactttgactgtgaggaccgaactgatgaagccaactgccccaccaagcgtcctgaggaagtgtgcgggcccacacagttccgatgcgtctctaccaacatgtgcatcccagccagcttccactgtgacgaggagagcgactgtcctgaccggagcgacgagtttggctgcatgcccccccaggtggtgacacctccccgggagtccatccaggcttcccggggccagacagtgaccttcacctgcgtggccattggcgtccccnccccctttntcatcaattggaggctcaactggggccacatcccctctcatcccagggtgacagtgaccagcgagggtggccgtggcacactgatcatccgtgatgtgaaggagtcagaccagggtgcctacacctgtgaggccatgaacgcccggggcatggtgtttggcattcctgacggtgtccttgagctcgtcccacaacgaggcccctgccctgacggccacttctacctggagcacagcgccgcctgcctgccctgcttctgctttggcatcaccagcgtgtgccagagcacccgccgcttccgggaccagatcaggctgcgctttgaccaacccgatgacttcaagggtgtgaatgtgacaatgcctgcgcagcccggcacgccacccctctcctccacgcagctgcagatcgacccatccctgcacgagttccagctagtcgacctgtcccgccgcttcctcgtccacgactccttctgggctctgcctgaacagttcctgggcaacaaggtggactcctatggcggctccctgcgttacaacgtgcgctacgagttggcccgtggcatgctggagccagtgcagcggccggacgtggtcctcgtgggtgccgggtaccgcctcctctcccgaggccacacacccacccaacctggtgctctgaaccagcgccaggtccagttctctgaggagcactgggtccatgagtctggccggccggtgcagcgcgcggagctgctgcaggtgctgcagagcctggaggccgtgctcatccagaccgtgtacaacaccaagatggctagcgtgggacttagcgacatcgccatggataccaccgtcacccatgccaccagccatggccgtgcccacagtgtggaggagtgcagatgccccattggctattctggcttgtcctgcgagagctgtgatgcccacttcactcgggtgcctggtgggccctacctgggcacctgctctggttgcagttgcaatggccatgccagctcctgtgaccctgtgtatggccactgcctgaattgccagcacaacacggaggggccacagtgcaacaagtgcaaggctggcttctttggggacgccatgaaggccacggccacttcctgccggccctgcccttgcccatacatcgatgcctcccgcagattctcagacacttgcttcctggacacggatggccaagccacatgtgacgcctgtgccccaggctacactggccgccgctgtgagagctgtgcccccggatacgagggcaaccccatccagcccggcgggaagtgcaggcccgtcaaccaggagattgtgcgctgtgacgagcgtggcagcatggggacctccggggaggcctgccgctgtaagaacaatgtggtggggcgcttgtgcaatgaatgtgctgacggctctttccacctgagtacccgaaaccccgatggctgcctcaagtgcttctgcatgggtgtcagtcgccactgcaccagctcttcatggagccgtgcccagttgcatggggcctctgaggagcctggtcacttcagcctgaccaacgccgcaagcacccacaccaccaacgagggcatcttctcccccacgcccggggaactgggattctcctccttccacagactcttatctggaccctacttctggagcctcccttcacgcttcctgggggacaaggtgacctcctatggaggagagctgcgcttcacagtgacccagaggtcccagccgggctccacacccctgcacgggcagccgttggtggtgctgcaaggtaacaacatcatcctagagcaccatgtggcccaggagcccagccccggccagcccagcaccttcattgtgcctttccgggagcaagcatggcagcggcccgatgggcagccagccacacgggagcacctgctgatggcactggcaggcatcgacaccctcctgatccgagcatcctacgcccagcagcccgctgagagcagggtctctggcatcagcatggacgtggctgtgcccgaggaaaccggccaggaccccgcgctggaagtggaacagtgctcctgcccacccgggtaccgtgggccgtcctgccaggactgtgacacaggctacacacgcacgcccagtggcctctacctgggtacctgtgaacgctgcagctgccatggccactcagaggcctgcgagccagaaacaggtgcctgccagggctgccagcatcacacggagggccctcggtgtgagcagtgccagccaggatactacggggacgcccagcgggggacaccacaggactgccagctgtgcccctgctacggagaccctgctgccggccaggctgcccacacttgttttctggacacagacggccaccccacctgtgatgcgtgctccccaggccacagtgggcgtcactgtgagaggtgcgcccctggctactatggcaaccccagccagggccagccatgccagagagacagccaggtgccagggcccataggctgcaactgtgacccccaaggcagcgtcagcagccagtgtgatgctgctggtcagtgccagtgcaaggcccaggtggaaggcctcacttgcagccactgccggccccaccacttccacctgagtgccagcaacccagacggctgcctgccctgcttctgtatgggcatcacccagcagtgcgccagctctgcctacacacgccacctgatctccacccactttgcccctggggacttccaaggctttgccctggtgaacccacagcgaaacagccgcctgacaggagaattcactgtggaacccgtgcccgagggtgcccagctctcttttggcaactttgcccaactcggccatgagtccttctactggcagctgccggagacataccagggagacaaggtggcggcctacggtgggaagttgcgatacaccctctcctacacagcaggcccacagggcagcccactctctgaccccgatgtgcagatcacgggcaacaacatcatgctagtggcctcccagccagcgctgcagggccctgagaggaggagctacgagatcatgttccgagaggaattctggcgccggcccgatgggcagccggccacacgcgagcacctcctgatggcactggccgacctggatgagctcctgatccgggccacgttctcctccgtgccgctggtggccagcatcagcgcagtcagcctggaggtcgcccagccggggccctcaaacagaccccgcgccctcgaggtggaggagtgccgctgcccgccaggctacatcggtctgtcctgccaggactgtgcccccggctacacgcgcaccgggagtgggctctacctcggccactgcgagctatgtgaatgcaatggccactcagacctgtgccacccagagactggggcctgctcgcaatgccagcacaacgccgcaggggagttctgcgagctttgtgcccctggctactacggagatgccacagccgggacgcctgaggactgccagccctgtgcctgcccactgaccaacccagagaacatgttttcccgcacctgtgagagcctgggagccggcgggtaccgctgcacggcctgcgaacccggctacactggccagtactgtgagcagtgtggcccaggttacgtgggtaaccccagtgtgcaagggggccagtgcctgccagagacaaaccaagccccactggtggtcgaggtccatcctgctcgaagcatagtgccccaaggtggctcccactccctgcggtgtcaggtcagtgggagnnnaccccactacttctattggtcccgtgaggatgggcggcctgtgcccagcggcacccagcagcgacatcaaggctccgagctccacttccccagcgtccagccctcggatgctggggtctacatttgcacctgccgtaatctccaccaatccaataccagccgggcagagctgctggtcactgaggctccaagcaagcccatcacagtgactgtggaggagcagcggagccagagcgtgcgccccggagctgacgtcaccttcatctgcacagccaaaagcaagtccccagcctataccctggtgtggacccgcctgcacaacgggaaactgcccacccgagccatggatttcaatggcatcctgaccattcgcaacgtccagctgagtgatgcaggcacctacgtgtgcaccggctccaacatgtttgccatggaccagggcacagccactctacatgtgcaggcctcgggcaccttgtccgcccccgtggtctccatccatccgccacagctcacagtgcagcccgggcaactggcggagttccgctgcagcgccacagggagccccacgcccaccctcgagtggacagggggccccggcggccagctccctgcgaaggcacaaatccacggcggcatcctgcgcctgccagctgtcgagcccacggatcaggcccagtacttgtgccgagcccacagcagcgctgggcagcaggtggccagggctgtgctccacgtgcatgggggcggtgggcccagagtccaagtgagcccagagaggacccaggtccacgcaggccgcaccgtcaggctgtactgcagggctgcaggcgtgcctagcgccaccatcacctggaggaaggaagggggcagcctcccaccacaggcccggtcagagcgcacagacatcgcgacactgctcatcccagccatcacgactgctgacgccggcttctacctctgcgtggccaccagccctgcaggcactgcccaggcccggatccaagtggttgtcctttcagcctcagatgccagcccaccgccggtcaagattgagtcctcatcgccttctgtgacagaagggcaaacactcgacctcaactgtgtggtggcagggtcagcccatgcccaggtcacctggtacaggcgagggggtagcctgcctccccacacccaggtgcacggctcccgtctgcggctcccccaggtctcaccagctgattctggagaatatgtgtgccgtgtggagaatggatcgggccccaaggaggcctccattactgtgtctgtgctccacggcacccattctggccccagctacaccccagtgcccggcagcacccggcccatccgcatcgagccctcctcctcacacgtggcggaagggcagaccctggatctgaactgcgtggtgcccgggcaggcccacgcccaggtcacgtggcacaagcgtgggggcagcctccctgcccggcaccagacccacggctcgctgctgcggctgcaccaggtgaccccggccgactcaggcgagtatgtgtgccatgtggtgggcacctccggccccctagaggcctcagtcctggtcaccatcgaagcctctgtcatccctggacccatcccacctgtcaggatcgagtcttcatcctccacagtggccgagggccagaccctggatctgagctgcgtggtggcagggcaggcccacgcccaggtcacatggtacaagcgtgggggcagcctccctgcccggcaccaggttcgtggctcccgcctgtacatcttccaggcctcacctgccgatgcgggacagtacgtctgccgggccagcaacggcatggaggcctccatcacggtcacagtaactgggacccagggggccaacttagcctaccctgccggcagcacccagcccatccgcatcgagccctcctcctcgcaagtggcggaagggcagaccctggatctgaactgcgtggtgcccgggcagtcccatgcccaggtcacgtggcacaagcgtgggggcagcctccctgtccggcaccagacccacggctccctgctgagactctaccaagcgtcccccgccgactcgggcgagtacgtgtgccgagtgttgggcagctccgtgcctctagaggcctctgtcctggtcaccattgagcctgcgggctcagtgcctgcacttggggtcacccccacggtccggatcgagtcatcgtcttcgcaagtggccgaggggcagaccctggacctgaactgcctcgttgctggtcaggcccatgcccaggtcacgtggcacaagcgcgggggcagcctcccggcccggcaccaggtgcatggctcgaggctacgcctgctccaggtgaccccagctgattcaggggagtacgtgtgccgtgtggtcggcagctcaggtacccaggaagcctcagtccttgtcaccatccagcagcgccttagtggctcccactcccagggtgtggcgtaccccgtccgcatcgagtcctcctcagcctccctggccaatggacacaccctggacctcaactgcctggttgccagccaggctccccacaccatcacctggtataagcgtggaggcagcttacccagccggcaccagatcgtgggctcccggctgcggatccctcaggtgactccggcagactcgggcgagtacgtgtgtcacgtcagtaacggtgcaggctcccgggagacctcgctcatcgtcaccatccagggcagcggttcctcccacgtgcccagcgtctccccaccgatcaggatcgagtcgtcttcccccacggtggtggaagggcagaccttggatctgaactgcgtggtcgccaggcagccccaggctatcatcacatggtacaagcgtgggggcagccttccctcccgacaccagacccatggctcccacctgcggttgcaccaaatgtctgtggctgactcgggcgagtatgtgtgccgggccaacaacaacatcgatgccctggaggcctccatcgtcatctccgtctcccctagcgccggcagcccctccgcccctggcagctccatgcccatcagaattgagtcatcctcctcacacgtggccgaaggggagaccctggatctgaactgcgtggtccccgggcaggcccatgcccaggtcacttggcacaagcgtgggggcagcctccccagtcaccatcagacccgcggctcacggctgcggctgcaccatgtgtccccggccgactcgggtgaatacgtgtgccgggtgatgggcagctctggccccctggaggcctcagtcctggtcaccatcgaagcctctggctcaagtgctgtccacgtccccgccccaggtggagccccacccatccgcatcgagccctcctcctcccgagtggcagaagggcagaccctggatctgaagtgcgtggtgcccgggcaggcccacgcccaggtcacgtggcacaagcgtggaggaaacctccctgcccggcaccaggtccacggcccactgctgaggctgaaccaggtgtccccggctgactctggcgagtactcgtgccaagtgaccggaagctcaggcaccctggaggcatctgtcctggtcacaattgagccctccagcccaggacccattcctgctccaggactggcccagcccatctacatcgaggcctcctcttcacacgtgactgaagggcagactctggatctgaactgtgtggtgcccgggcaggcccatgcccaggtcacgtggtacaagcgcgggggcagcctccccgcccggcaccagacccatggctcccagctgcggctccaccncgtctcccctgccgactcaggcgagtatgtgtgtcgtgcagccngcggcccaggccctgagcaagaagcctccttcacagtcaccgtcccgcccagtgaggggtcttcctaccgccttaggagcccggtcatctccatcgacccgcccagcagcaccgtgcagcagggccaggatgccagcttcaagtgcctcatccatgacggggcagcccccatcagcctcgagtggaagacccggaaccaggagctggaggacaacgtccacatcagtcccaatggctccatcatcaccatcgtgggcacccggcccagcaaccacggtacctaccgctgcgtggcctccaatgcctacggtgtggcccagagtgtggtgaacctcagtgtgcacgggccccctacagtgtccgtgctccccgagggccccgtgtgggtgaaagtgggaaaggctgtcaccctggagtgtgtcagtgccggggagccccgctcctctgctcgttggacccggatcagcagcacccctgccaagttggagcagcggacatatgggctcatggacagccacgcggtgctgcagatttcatcagctaaaccatcagatgcgggcacttatgtgtgccttgctcagaatgcactaggcacagcacagaagcaggtggaggtgatcgtggacacgggcgccatggccccaggggcccctcaggtccaagctgaagaagctgagctgactgtggaggctggacacacggccaccttgcgctgctcagccacaggcagccccgcgcccaccatccactggtccaagctgcgttccccactgccctggcagcaccggctggaaggtgacacactcatcataccccgggtagcccagcaggactcgggccagtacatctgcaatgccactagccctgctgggcacgctgaggccaccatcatcctgcacgtggagagcccaccatatgccaccacggtcccagagcacgcttcggtgcaggcaggggagacggtgcagctccagtgcctggctcacgggacacccccactcaccttccagtggagccgcgtgggcagcagccttcctgggagggcgaccgccaggaacgagctgctgcactttgagcgtgcagcccctgaggactcaggccgctaccgctgccgggtcaccaacaaggtgggctcagccgaggcctttgcccagctgctcgtccaaggccctcccggctctctccctgccacctccatcccagcagggtccacgcccaccgtgcaggtcacgcctcagctagagaccaagagcattggggccagcgttgagttccactgtgctgtgcccagcgaccggggtacccagctccgttggttcaaggaagggggtcagctgcctccgggtcacagcgtgcaggatggggtgctccgaatccagaacttggaccagagctgccaagggacgtatatatgccaggcccatggaccttgggggaaggcccaggccagtgcccagctggttatccaagccctgccctcggtgctcatcaacatccggacctctgtgcagaccgtggtggttggccacgccgtggagttcgaatgcctggcactgggtgaccccaagcctcaggtgacatggagcaaagttggagggcacctgcggccaggcattgtgcagagcggaggtgtcgtcaggatcgcccacgtagagctggctgatgcgggacagtatcgctgcactgccaccaacgcagctggcaccacacaatcccacgtcctgctgcttgtgcaagccttgccccagatctcaatgccccaagaagtccgtgtgcctgctggttctgcagctgtcttcccctgcatagcctcaggctaccccactcctgacatcagctggagcaagctggatggcagcctgccacctgacagccgcctggagaacaacatgctgatgctgccctcagtccgaccccaggacgcaggtacctacgtctgcaccgccactaaccgccagggcaaggtcaaagcctttgcccacctgcaggtgccagagcgggtggtgccctacttcacgcagaccccctactccttcctaccgctgcccaccatcaaggatgcctacaggaagttcgagatcaagatcaccttccggcccgactcagccgatgggatgctgctgtacaatgggcagaagcgagtcccagggagccccaccaacctggccaaccggcagcccgacttcatctccttcggcctcgtggggggaaggcccgagttccggttcgatgcaggctcaggcatggccaccatccgccatcccacaccactggccctgggccatttccacaccgtgaccctgctgcgcagcctcacccagggctccctgattgtgggtgacctggccccggtcaatgggacctcccagggcaagttccagggcctggatctgaacgaggaactctacctgggtggctatcctgactatggtgccatccccaaggcggggctgagcagcggcttcataggctgtgtccgggagctgcgcatccagggcgaggagatcgtcttccatgacctcaacctcacggcgcacggcatctcccactgccccacctgtcgggaccggccctgccagaatggcggtcagtgccatgactctgagagcagcagctacgtgtgcgtctgcccagctggcttcaccgggagccgctgtgagcactcgcaggccctgcactgccatccagaggcctgtgggcccgacgccacctgtgtgaaccggcctgacggtcgaggctacacctgccgctgccacctgggccgctcggggttgcggtgtgaggaaggtgtgacagtgaccaccccctcgctgtcgggtgctggctcctacctggcactgcccgccctcaccaacacacaccacgagctacgcctggacgtggagttcaagccactcgcccctgacggggtcctgctgttcagcggggggaagagcgggcctgtggaggacttcgtgtccctggcgatggtgggcggccacctggagttccgctatgagttggggtcagggctggccgttctgcggagcgccgagccgctggccctgggccgctggcaccgtgtgtctgcagagcgtctcaacaaggacggcagcctgcgggtgaatggtggacgccctgtgctgcgctcctcgcccggcaagagccagggcctcaacctgcacaccctgctctacctggggggtgtggagccttccgtgccactgtccccggccaccaacatgagcgctcacttccgcggctgtgtgggcgaggtgtcagtgaatggcaaacggctggacctcacctacagtttcctaggcagccagggcatcgggcaatgctatgatagctccccatgtgagcgccagccttgccaacatggtgccacgtgcatgcccgctggcgagtatgagttccagtgcctgtgtcgagatggattcaaaggagacctgtgtgagcacgaggagaacccctgccagctccgtgaaccctgtctgcatgggggcacctgccagggcacccgctgcctctgcctccctggcttctctggcccacgctgccaacaaggctctggacatggcatagcagagtccgactggcatcttgaaggcagcgggggcaatgatgcccctgggcagtacggagcctatttccacgatgatggcttcctcgccttccctggccatgtcttctccaggagcctgcccgaggtgcccgagaccatcgagctggaggttcggaccagcacagccagtggcctcctgctctggcagggtgtggaggtgggagaggccggccaaggcaaggacttcatcagcctcgggcttcaagacgggcaccttgtcttcaggtaccagctgggtagtggggaggcccgcctggtctctgaggaccccatcaatgacggcgagtggcaccgggtgacagcactgcgggagggccgcagaggttccatccaagtcgacggtgaggagctggtcagcggccggtccccaggtcccaacgtggcagtcaacgccaagggcagcgtctacatcggcggagcccctgacgtggccacgctgaccgggggcagattctcctcgggcatcacaggctgtgtcaagaacctggtgctgcactcggcccgacccggcgccccgcccccacagcccctggacctgcagcaccgcgcccaggccggggccaacacacgcccctgcccctcgtaggcacctgcctgccccacacggactcccgggccacgccccagcccgacaatgagctgctacaggcagagcccagcactgatagggccccgcccaccgggccccgcccaccccaggccacatccccacccatctggaagtgaaggcccagggactcctccaacagacaacggacggacggatgccgctggtgctcaggaagagctagtgccttaggtgggggaaggcaggactcacgactgagagagagaggagggggatatgaccaccctgccccatctgcaggagcctgaagatccagctcaagtgccatcctgccagtggcccccagactgtggggttgggacgcctggcctctgtgtcctagaagggaccctcctgtggtctttgtcttgatttttcttaataaacggtgctatccccgcca

SEQ ID NO: 367563 - DNA, 13489 bp, Homo sapiens
  misc_feature (1383)..(1383): n is a, c, g, or t
  misc_feature (1392)..(1392): n is a, c, g, or t
  misc_feature (5192)..(5194): n is a, c, g, or t
  misc_feature (9022)..(9022): n is a, c, g, or t
  misc_feature (9066)..(9066): n is a, c, g, or t
ggccggcgagcgggcggctgcgggcggcgcggagcgggcggcgcggagcgagcgagcgagagagcggcgcgggccgggccatggggtggcgggcgccgggcgcgctgctgctggcgctgctgctgcacgggcggctgctggcggtgacccatgggctgagggcatacgatggcttgtctctgcctgaggacatagagaccgtcacagcaagccaaatgcgctggacacattcgtacctttctgatgatgaggacatgctggctgacagcatctcaggagacgacctgggcagtggggacctgggcagcggggacttccagatggtttatttccgagccctggtgaatttcactcgctccatcgagtacagccctcagctggaggatgcaggctccagagagtttcgagaggtgtccgaggctgtggtagacacgctggagtcggagtacttgaaaattcccggagaccaggttgtcagtgtggtgttcatcaaggagctggatggctgggtttttgtggagctcgatgtgggctcggaagggaatgcggatggtgctcagattcaggagatgctgctcagggtcatctccagcggctctgtggcctcctacgtcacctctccccagggattccagttccgacgcctgggcacagtgccccagttcccaagagcctgcacggaggccgagtttgcctgccacagctacaatgagtgtgtggccctggagtatcgctgtgaccggcggcccgactgcagggacatgtctgatgagctcaattgtgaggagccagtcctgggtatcagccccacattctctctccttgtggagacgacatctttaccgccccggccagagacaaccatcatgcgacagccaccagtcacccacgctcctcagcccctgcttcccggttccgtcaggcccctgccctgtgggccccaggaggccgcatgccgcaatgggcactgcatccccagagactacctctgcgacggacaggaggactgcgaggacggcagcgatgagctagactgtggccccccgccaccctgtgagcccaacgagttcccctgcgggaatggacattgtgccctcaagctgtggcgctgcgatggtgactttgactgtgaggaccgaactgatgaagccaactgccccaccaagcgtcctgaggaagtgtgcgggcccacacagttccgatgcgtctctaccaacatgtgcatcccagccagcttccactgtgacgaggagagcgactgtcctgaccggagcgacgagtttggctgcatgcccccccaggtggtgacacctccccgggagtccatccaggcttcccggggccagacagtgaccttcacctgcgtggccattggcgtccccnccccctttntcatcaattggaggctcaactggggccacatcccctctcatcccagggtgacagtgaccagcgagggtggccgtggcacactgatcatccgtgatgtgaaggagtcagaccagggtgcctacacctgtgaggccatgaacgcccggggcatggtgtttggcattcctgacggtgtccttgagctcgtcccacaacgaggcccctgccctgacggccacttctacctggagcacagcgccgcctgcctgccctgcttctgctttggcatcaccagcgtgtgccagagcacccgccgcttccgggaccagatcaggctgcgctttgaccaacccgatgacttcaagggtgtgaatgtgacaatgcctgcgcagcccggcacgccacccctctcctccacgcagctgcagatcgacccatccctgcacgagttccagctagtcgacctgtcccgccgcttcctcgtccacgactccttctgggctctgcctgaacagttcctgggcaacaaggtggactcctatggcggctccctgcgttacaacgtgcgctacgagttggcccgtggcatgctggagccagtgcagcggccggacgtggtcctcgtgggtgccgggtaccgcctcctctcccgaggccacacacccacccaacctggtgctctgaaccagcgccaggtccagttctctgaggagcactgggtccatgagtctggccggccggtgcagcgcgcggagctgctgcaggtgctgcagagcctggaggccgtgctcatccagaccgtgtacaacaccaagatggctagcgtgggacttagcgacatcgccatggataccaccgtcacccatgccaccagccatggccgtgcccacagtgtggaggagtgcagatgccccattggctattctggcttgtcctgcgagagctgtgatgcccacttcactcgggtgcctggtgggccctacctgggcacctgctctggttgcagttgcaatggccatgccagctcctgtgaccctgtgtatggccactgcctgaattgccagcacaacacggaggggccacagtgcaacaagtgcaaggctggcttctttggggacgccatgaaggccacggccacttcctgccggccctgcccttgcccatacatcgatgcctcccgcagattctcagacacttgcttcctggacacggatggccaagccacatgtgacgcctgtgccccaggctacactggccgccgctgtgagagctgtgcccccggatacgagggcaaccccatccagcccggcgggaagtgcaggcccgtcaaccaggagattgtgcgctgtgacgagcgtggcagcatggggacctccggggaggcctgccgctgtaagaacaatgtggtggggcgcttgtgcaatgaatgtgctgacggctctttccacctgagtacccgaaaccccgatggctgcctcaagtgcttctgcatgggtgtcagtcgccactgcaccagctcttcatggagccgtgcccagttgcatggggcctctgaggagcctggtcacttcagcctgaccaacgccgcaagcacccacaccaccaacgagggcatcttctcccccacgcccggggaactgggattctcctccttccacagactcttatctggaccctacttctggagcctcccttcacgcttcctgggggacaaggtgacctcctatggaggagagctgcgcttcacagtgacccagaggtcccagccgggctccacacccctgcacgggcagccgttggtggtgctgcaaggtaacaacatcatcctagagcaccatgtggcccaggagcccagccccggccagcccagcaccttcattgtgcctttccgggagcaagcatggcagcggcccgatgggcagccagccacacgggagcacctgctgatggcactggcaggcatcgacaccctcctgatccgagcatcctacgcccagcagcccgctgagagcagggtctctggcatcagcatggacgtggctgtgcccgaggaaaccggccaggaccccgcgctggaagtggaacagtgctcctgcccacccgggtaccgtgggccgtcctgccaggactgtgacacaggctacacacgcacgcccagtggcctctacctgggtacctgtgaacgctgcagctgccatggccactcagaggcctgcgagccagaaacaggtgcctgccagggctgccagcatcacacggagggccctcggtgtgagcagtgccagccaggatactacggggacgcccagcgggggacaccacaggactgccagctgtgcccctgctacggagaccctgctgccggccaggctgcccacacttgttttctggacacagacggccaccccacctgtgatgcgtgctccccaggccacagtgggcgtcactgtgagaggtgcgcccctggctactatggcaaccccagccagggccagccatgccagagagacagccaggtgccagggcccataggctgcaactgtgacccccaaggcagcgtcagcagccagtgtgatgctgctggtcagtgccagtgcaaggcccaggtggaaggcctcacttgcagccactgccggccccaccacttccacctgagtgccagcaacccagacggctgcctgccctgcttctgtatgggcatcacccagcagtgcgccagctctgcctacacacgccacctgatctccacccactttgcccctggggacttccaaggctttgccctggtgaacccacagcgaaacagccgcctgacaggagaattcactgtggaacccgtgcccgagggtgcccagctctcttttggcaactttgcccaactcggccatgagtccttctactggcagctgccggagacataccagggagacaaggtggcggcctacggtgggaagttgcgatacaccctctcctacacagcaggcccacagggcagcccactctctgaccccgatgtgcagatcacgggcaacaacatcatgctagtggcctcccagccagcgctgcagggccctgagaggaggagctacgagatcatgttccgagaggaattctggcgccggcccgatgggcagccggccacacgcgagcacctcctgatggcactggccgacctggatgagctcctgatccgggccacgttctcctccgtgccgctggtggccagcatcagcgcagtcagcctggaggtcgcccagccggggccctcaaacagaccccgcgccctcgaggtggaggagtgccgctgcccgccaggctacatcggtctgtcctgccaggactgtgcccccggctacacgcgcaccgggagtgggctctacctcggccactgcgagctatgtgaatgcaatggccactcagacctgtgccacccagagactggggcctgctcgcaatgccagcacaacgccgcaggggagttctgcgagctttgtgcccctggctactacggagatgccacagccgggacgcctgaggactgccagccctgtgcctgcccactgaccaacccagagaacatgttttcccgcacctgtgagagcctgggagccggcgggtaccgctgcacggcctgcgaacccggctacactggccagtactgtgagcagtgtggcccaggttacgtgggtaaccccagtgtgcaagggggccagtgcctgccagagacaaaccaagccccactggtggtcgaggtccatcctgctcgaagcatagtgccccaaggtggctcccactccctgcggtgtcaggtcagtgggagnnnaccccactacttctattggtcccgtgaggatgggcggcctgtgcccagcggcacccagcagcgacatcaaggctccgagctccacttccccagcgtccagccctcggatgctggggtctacatttgcacctgccgtaatctccaccaatccaataccagccgggcagagctgctggtcactgaggctccaagcaagcccatcacagtgactgtggaggagcagcggagccagagcgtgcgccccggagctgacgtcaccttcatctgcacagccaaaagcaagtccccagcctataccctggtgtggacccgcctgcacaacgggaaactgcccacccgagccatggatttcaatggcatcctgaccattcgcaacgtccagctgagtgatgcaggcacctacgtgtgcaccggctccaacatgtttgccatggaccagggcacagccactctacatgtgcaggcctcgggcaccttgtccgcccccgtggtctccatccatccgccacagctcacagtgcagcccgggcaactggcggagttccgctgcagcgccacagggagccccacgcccaccctcgagtggacagggggccccggcggccagctccctgcgaaggcacaaatccacggcggcatcctgcgcctgccagctgtcgagcccacggatcaggcccagtacttgtgccgagcccacagcagcgctgggcagcaggtggccagggctgtgctccacgtgcatgggggcggtgggcccagagtccaagtgagcccagagaggacccaggtccacgcaggccgcaccgtcaggctgtactgcagggctgcaggcgtgcctagcgccaccatcacctggaggaaggaagggggcagcctcccaccacaggcccggtcagagcgcacagacatcgcgacactgctcatcccagccatcacgactgctgacgccggcttctacctctgcgtggccaccagccctgcaggcactgcccaggcccggatccaagtggttgtcctttcagcctcagatgccagcccaccgccggtcaagattgagtcctcatcgccttctgtgacagaagggcaaacactcgacctcaactgtgtggtggcagggtcagcccatgcccaggtcacctggtacaggcgagggggtagcctgcctccccacacccaggtgcacggctcccgtctgcggctcccccaggtctcaccagctgattctggagaatatgtgtgccgtgtggagaatggatcgggccccaaggaggcctccattactgtgtctgtgctccacggcacccattctggccccagctacaccccagtgcccggcagcacccggcccatccgcatcgagccctcctcctcacacgtggcggaagggcagaccctggatctgaactgcgtggtgcccgggcaggcccacgcccaggtcacgtggcacaagcgtgggggcagcctccctgcccggcaccagacccacggctcgctgctgcggctgcaccaggtgaccccggccgactcaggcgagtatgtgtgccatgtggtgggcacctccggccccctagaggcctcagtcctggtcaccatcgaagcctctgtcatccctggacccatcccacctgtcaggatcgagtcttcatcctccacagtggccgagggccagaccctggatctgagctgcgtggtggcagggcaggcccacgcccaggtcacatggtacaagcgtgggggcagcctccctgcccggcaccaggttcgtggctcccgcctgtacatcttccaggcctcacctgccgatgcgggacagtacgtctgccgggccagcaacggcatggaggcctccatcacggtcacagtaactgggacccagggggccaacttagcctaccctgccggcagcacccagcccatccgcatcgagccctcctcctcgcaagtggcggaagggcagaccctggatctgaactgcgtggtgcccgggcagtcccatgcccaggtcacgtggcacaagcgtgggggcagcctccctgtccggcaccagacccacggctccctgctgagactctaccaagcgtcccccgccgactcgggcgagtacgtgtgccgagtgttgggcagctccgtgcctctagaggcctctgtcctggtcaccattgagcctgcgggctcagtgcctgcacttggggtcacccccacggtccggatcgagtcatcgtcttcgcaagtggccgaggggcagaccctggacctgaactgcctcgttgctggtcaggcccatgcccaggtcacgtggcacaagcgcgggggcagcctcccggcccggcaccaggtgcatggctcgaggctacgcctgctccaggtgaccccagctgattcaggggagtacgtgtgccgtgtggtcggcagctcaggtacccaggaagcctcagtccttgtcaccatccagcagcgccttagtggctcccactcccagggtgtggcgtaccccgtccgcatcgagtcctcctcagcctccctggccaatggacacaccctggacctcaactgcctggttgccagccaggctccccacaccatcacctggtataagcgtggaggcagcttacccagccggcaccagatcgtgggctcccggctgcggatccctcaggtgactccggcagactcgggcgagtacgtgtgtcacgtcagtaacggtgcaggctcccgggagacctcgctcatcgtcaccatccagggcagcggttcctcccacgtgcccagcgtctccccaccgatcaggatcgagtcgtcttcccccacggtggtggaagggcagaccttggatctgaactgcgtggtcgccaggcagccccaggctatcatcacatggtacaagcgtgggggcagccttccctcccgacaccagacccatggctcccacctgcggttgcaccaaatgtctgtggctgactcgggcgagtatgtgtgccgggccaacaacaacatcgatgccctggaggcctccatcgtcatctccgtctcccctagcgccggcagcccctccgcccctggcagctccatgcccatcagaattgagtcatcctcctcacacgtggccgaaggggagaccctggatctgaactgcgtggtccccgggcaggcccatgcccaggtcacttggcacaagcgtgggggcagcctccccagtcaccatcagacccgcggctcacggctgcggctgcaccatgtgtccccggccgactcgggtgaatacgtgtgccgggtgatgggcagctctggccccctggaggcctcagtcctggtcaccatcgaagcctctggctcaagtgctgtccacgtccccgccccaggtggagccccacccatccgcatcgagccctcctcctcccgagtggcagaagggcagaccctggatctgaagtgcgtggtgcccgggcaggcccacgcccaggtcacgtggcacaagcgtggaggaaacctccctgcccggcaccaggtccacggcccactgctgaggctgaaccaggtgtccccggctgactctggcgagtactcgtgccaagtgaccggaagctcaggcaccctggaggcatctgtcctggtcacaattgagccctccagcccaggacccattcctgctccaggactggcccagcccatctacatcgaggcctcctcttcacacgtgactgaagggcagactctggatctgaactgtgtggtgcccgggcaggcccatgcccaggtcacgtggtacaagcgcgggggcagcctccccgcccggcaccagacccatggctcccagctgcggctccaccncgtctcccctgccgactcaggcgagtatgtgtgtcgtgcagccngcggcccaggccctgagcaagaagcctccttcacagtcaccgtcccgcccagtgaggggtcttcctaccgccttaggagcccggtcatctccatcgacccgcccagcagcaccgtgcagcagggccaggatgccagcttcaagtgcctcatccatgacggggcagcccccatcagcctcgagtggaagacccggaaccaggagctggaggacaacgtccacatcagtcccaatggctccatcatcaccatcgtgggcacccggcccagcaaccacggtacctaccgctgcgtggcctccaatgcctacggtgtggcccagagtgtggtgaacctcagtgtgcacgggccccctacagtgtccgtgctccccgagggccccgtgtgggtgaaagtgggaaaggctgtcaccctggagtgtgtcagtgccggggagccccgctcctctgctcgttggacccggatcagcagcacccctgccaagttggagcagcggacatatgggctcatggacagccacgcggtgctgcagatttcatcagctaaaccatcagatgcgggcacttatgtgtgccttgctcagaatgcactaggcacagcacagaagcaggtggaggtgatcgtggacacgggcgccatggccccaggggcccctcaggtccaagctgaagaagctgagctgactgtggaggctggacacacggccaccttgcgctgctcagccacaggcagccccgcgcccaccatccactggtccaagctgcgttccccactgccctggcagcaccggctggaaggtgacacactcatcataccccgggtagcccagcaggactcgggccagtacatctgcaatgccactagccctgctgggcacgctgaggccaccatcatcctgcacgtggagagcccaccatatgccaccacggtcccagagcacgcttcggtgcaggcaggggagacggtgcagctccagtgcctggctcacgggacacccccactcaccttccagtggagccgcgtgggcagcagccttcctgggagggcgaccgccaggaacgagctgctgcactttgagcgtgcagcccctgaggactcaggccgctaccgctgccgggtcaccaacaaggtgggctcagccgaggcctttgcccagctgctcgtccaaggccctcccggctctctccctgccacctccatcccagcagggtccacgcccaccgtgcaggtcacgcctcagctagagaccaagagcattggggccagcgttgagttccactgtgctgtgcccagcgaccggggtacccagctccgttggttcaaggaagggggtcagctgcctccgggtcacagcgtgcaggatggggtgctccgaatccagaacttggaccagagctgccaagggacgtatatatgccaggcccatggaccttgggggaaggcccaggccagtgcccagctggttatccaagccctgccctcggtgctcatcaacatccggacctctgtgcagaccgtggtggttggccacgccgtggagttcgaatgcctggcactgggtgaccccaagcctcaggtgacatggagcaaagttggagggcacctgcggccaggcattgtgcagagcggaggtgtcgtcaggatcgcccacgtagagctggctgatgcgggacagtatcgctgcactgccaccaacgcagctggcaccacacaatcccacgtcctgctgcttgtgcaagccttgccccagatctcaatgccccaagaagtccgtgtgcctgctggttctgcagctgtcttcccctgcatagcctcaggctaccccactcctgacatcagctggagcaagctggatggcagcctgccacctgacagccgcctggagaacaacatgctgatgctgccctcagtccgaccccaggacgcaggtacctacgtctgcaccgccactaaccgccagggcaaggtcaaagcctttgcccacctgcaggtgccagagcgggtggtgccctacttcacgcagaccccctactccttcctaccgctgcccaccatcaaggatgcctacaggaagttcgagatcaagatcaccttccggcccgactcagccgatgggatgctgctgtacaatgggcagaagcgagtcccagggagccccaccaacctggccaaccggcagcccgacttcatctccttcggcctcgtggggggaaggcccgagttccggttcgatgcaggctcaggcatggccaccatccgccatcccacaccactggccctgggccatttccacaccgtgaccctgctgcgcagcctcacccagggctccctgattgtgggtgacctggccccggtcaatgggacctcccagggcaagttccagggcctggatctgaacgaggaactctacctgggtggctatcctgactatggtgccatccccaaggcggggctgagcagcggcttcataggctgtgtccgggagctgcgcatccagggcgaggagatcgtcttccatgacctcaacctcacggcgcacggcatctcccactgccccacctgtcgggaccggccctgccagaatggcggtcagtgccatgactctgagagcagcagctacgtgtgcgtctgcccagctggcttcaccgggagccgctgtgagcactcgcaggccctgcactgccatccagaggcctgtgggcccgacgccacctgtgtgaaccggcctgacggtcgaggctacacctgccgctgccacctgggccgctcggggttgcggtgtgaggaaggtgtgacagtgaccaccccctcgctgtcgggtgctggctcctacctggcactgcccgccctcaccaacacacaccacgagctacgcctggacgtggagttcaagccactcgcccctgacggggtcctgctgttcagcggggggaagagcgggcctgtggaggacttcgtgtccctggcgatggtgggcggccacctggagttccgctatgagttggggtcagggctggccgttctgcggagcgccgagccgctggccctgggccgctggcaccgtgtgtctgcagagcgtctcaacaaggacggcagcctgcgggtgaatggtggacgccctgtgctgcgctcctcgcccggcaagagccagggcctcaacctgcacaccctgctctacctggggggtgtggagccttccgtgccactgtccccggccaccaacatgagcgctcacttccgcggctgtgtgggcgaggtgtcagtgaatggcaaacggctggacctcacctacagtttcctaggcagccagggcatcgggcaatgctatgatagctccccatgtgagcgccagccttgccaacatggtgccacgtgcatgcccgctggcgagtatgagttccagtgcctgtgtcgagatggattcaaaggagacctgtgtgagcacgaggagaacccctgccagctccgtgaaccctgtctgcatgggggcacctgccagggcacccgctgcctctgcctccctggcttctctggcccacgctgccaacaaggctctggacatggcatagcagagtccgactggcatcttgaaggcagcgggggcaatgatgcccctgggcagtacggagcctatttccacgatgatggcttcctcgccttccctggccatgtcttctccaggagcctgcccgaggtgcccgagaccatcgagctggaggttcggaccagcacagccagtggcctcctgctctggcagggtgtggaggtgggagaggccggccaaggcaaggacttcatcagcctcgggcttcaagacgggcaccttgtcttcaggtaccagctgggtagtggggaggcccgcctggtctctgaggaccccatcaatgacggcgagtggcaccgggtgacagcactgcgggagggccgcagaggttccatccaagtcgacggtgaggagctggtcagcggccggtccccaggtcccaacgtggcagtcaacgccaagggcagcgtctacatcggcggagcccctgacgtggccacgctgaccgggggcagattctcctcgggcatcacaggctgtgtcaagaacctggtgctgcactcggcccgacccggcgccccgcccccacagcccctggacctgcagcaccgcgcccaggccggggccaacacacgcccctgcccctcgtaggcacctgcctgccccacacggactcccgggccacgccccagcccgacaatgtcgagtatattattattaatattattatgaatttttgtaagaaaccgaggcgatgccacgctttgctgctaccgccctgggctggactggaggtgggcatgccaccctctgtgtcctagaagggaccctcctgtggtctttgtcttgatttttcttaataaacggtgctatccccgcca

SEQ ID NO: 367564 - DNA, 1260 bp, Homo sapiens
cctaccaccgatggagcccccagatagagctgggtggcctgtttctgcagcccttggcgagttctcactcctaggagagccaacctcggcttgtgggctggtgcccacagctacctgagacgggcatcgcaggagtctctgccacccactcaggattgggaattgtctttagtgccggctgtggagcaaaaggcagctgccccacacggactcccgggccacgccccagcccgacaatgtcgagtatattattattaatattattatgaatttttgtaagaaaccgaggcgatgccacgctttgctgctaccgccctgggctggactggaggtgggcatgccaccctcacacacacagctgggcaaagccacaaggctggccagcaaggcaggttggatgggagtgggcacctcagaaagtcaccaggacttggggtcaggaacagtggctgggtgggcccagaactgcccccactgtccccctacccaccgatggagcccccagatagagctgggtggcctgtttctgcagcccttgggcagttctcactcctaggagagccaacctcggcttgtgggctggtgccccacagctacctgagacgggcatcgcaggagtctctgccacccactcaggattgggaattgtctttagtgccggctgtggagcaaaaggcagctcacccctgggcaggcggtccccatccccaccagctcgtttttcagcacccccacccacctccacccagcccctggcacctcctctggcagactccccctcctaccacgtcctcctggcctgcattcccaccccctcctgccagcacacagcctggggtccctccctcaggggctgtaagggaaggcccaccccaactcttaccaggagctgctacaggcagagcccagcactgatagggccccgcccaccgggccccgcccaccccaggccacatccccacccatctggaagtgaaggcccagggactcctccaacagacaacggacggacggatgccgctggtgctcaggaagagctagtgccttaggtgggggaaggcaggactcacgactgagagagagaggagggggatatgaccaccctgccccatctgcaggagcctgaagatccagctcaagtgccatcctgccagtggcccccagactgtggggttgggacgcctggcctctgtgtcctagaagggaccctcctgtggtctttgtcttgatttttcttaataaacggtgctatccccgcca

SEQ ID NO: 367565 - DNA, 11062 bp, Homo sapiens
  misc_feature (1383)..(1383): n is a, c, g, or t
  misc_feature (1392)..(1392): n is a, c, g, or t
  misc_feature (5192)..(5194): n is a, c, g, or t
  misc_feature (9022)..(9022): n is a, c, g, or t
  misc_feature (9066)..(9066): n is a, c, g, or t
ggccggcgagcgggcggctgcgggcggcgcggagcgggcggcgcggagcgagcgagcgagagagcggcgcgggccgggccatggggtggcgggcgccgggcgcgctgctgctggcgctgctgctgcacgggcggctgctggcggtgacccatgggctgagggcatacgatggcttgtctctgcctgaggacatagagaccgtcacagcaagccaaatgcgctggacacattcgtacctttctgatgatgaggacatgctggctgacagcatctcaggagacgacctgggcagtggggacctgggcagcggggacttccagatggtttatttccgagccctggtgaatttcactcgctccatcgagtacagccctcagctggaggatgcaggctccagagagtttcgagaggtgtccgaggctgtggtagacacgctggagtcggagtacttgaaaattcccggagaccaggttgtcagtgtggtgttcatcaaggagctggatggctgggtttttgtggagctcgatgtgggctcggaagggaatgcggatggtgctcagattcaggagatgctgctcagggtcatctccagcggctctgtggcctcctacgtcacctctccccagggattccagttccgacgcctgggcacagtgccccagttcccaagagcctgcacggaggccgagtttgcctgccacagctacaatgagtgtgtggccctggagtatcgctgtgaccggcggcccgactgcagggacatgtctgatgagctcaattgtgaggagccagtcctgggtatcagccccacattctctctccttgtggagacgacatctttaccgccccggccagagacaaccatcatgcgacagccaccagtcacccacgctcctcagcccctgcttcccggttccgtcaggcccctgccctgtgggccccaggaggccgcatgccgcaatgggcactgcatccccagagactacctctgcgacggacaggaggactgcgaggacggcagcgatgagctagactgtggccccccgccaccctgtgagcccaacgagttcccctgcgggaatggacattgtgccctcaagctgtggcgctgcgatggtgactttgactgtgaggaccgaactgatgaagccaactgccccaccaagcgtcctgaggaagtgtgcgggcccacacagttccgatgcgtctctaccaacatgtgcatcccagccagcttccactgtgacgaggagagcgactgtcctgaccggagcgacgagtttggctgcatgcccccccaggtggtgacacctccccgggagtccatccaggcttcccggggccagacagtgaccttcacctgcgtggccattggcgtccccnccccctttntcatcaattggaggctcaactggggccacatcccctctcatcccagggtgacagtgaccagcgagggtggccgtggcacactgatcatccgtgatgtgaaggagtcagaccagggtgcctacacctgtgaggccatgaacgcccggggcatggtgtttggcattcctgacggtgtccttgagctcgtcccacaacgaggcccctgccctgacggccacttctacctggagcacagcgccgcctgcctgccctgcttctgctttggcatcaccagcgtgtgccagagcacccgccgcttccgggaccagatcaggctgcgctttgaccaacccgatgacttcaagggtgtgaatgtgacaatgcctgcgcagcccggcacgccacccctctcctccacgcagctgcagatcgacccatccctgcacgagttccagctagtcgacctgtcccgccgcttcctcgtccacgactccttctgggctctgcctgaacagttcctgggcaacaaggtggactcctatggcggctccctgcgttacaacgtgcgctacgagttggcccgtggcatgctggagccagtgcagcggccggacgtggtcctcgtgggtgccgggtaccgcctcctctcccgaggccacacacccacccaacctggtgctctgaaccagcgccaggtccagttctctgaggagcactgggtccatgagtctggccggccggtgcagcgcgcggagctgctgcaggtgctgcagagcctggaggccgtgctcatccagaccgtgtacaacaccaagatggctagcgtgggacttagcgacatcgccatggataccaccgtcacccatgccaccagccatggccgtgcccacagtgtggaggagtgcagatgccccattggctattctggcttgtcctgcgagagctgtgatgcccacttcactcgggtgcctggtgggccctacctgggcacctgctctggttgcagttgcaatggccatgccagctcctgtgaccctgtgtatggccactgcctgaattgccagcacaacacggaggggccacagtgcaacaagtgcaaggctggcttctttggggacgccatgaaggccacggccacttcctgccggccctgcccttgcccatacatcgatgcctcccgcagattctcagacacttgcttcctggacacggatggccaagccacatgtgacgcctgtgccccaggctacactggccgccgctgtgagagctgtgcccccggatacgagggcaaccccatccagcccggcgggaagtgcaggcccgtcaaccaggagattgtgcgctgtgacgagcgtggcagcatggggacctccggggaggcctgccgctgtaagaacaatgtggtggggcgcttgtgcaatgaatgtgctgacggctctttccacctgagtacccgaaaccccgatggctgcctcaagtgcttctgcatgggtgtcagtcgccactgcaccagctcttcatggagccgtgcccagttgcatggggcctctgaggagcctggtcacttcagcctgaccaacgccgcaagcacccacaccaccaacgagggcatcttctcccccacgcccggggaactgggattctcctccttccacagactcttatctggaccctacttctggagcctcccttcacgcttcctgggggacaaggtgacctcctatggaggagagctgcgcttcacagtgacccagaggtcccagccgggctccacacccctgcacgggcagccgttggtggtgctgcaaggtaacaacatcatcctagagcaccatgtggcccaggagcccagccccggccagcccagcaccttcattgtgcctttccgggagcaagcatggcagcggcccgatgggcagccagccacacgggagcacctgctgatggcactggcaggcatcgacaccctcctgatccgagcatcctacgcccagcagcccgctgagagcagggtctctggcatcagcatggacgtggctgtgcccgaggaaaccggccaggaccccgcgctggaagtggaacagtgctcctgcccacccgggtaccgtgggccgtcctgccaggactgtgacacaggctacacacgcacgcccagtggcctctacctgggtacctgtgaacgctgcagctgccatggccactcagaggcctgcgagccagaaacaggtgcctgccagggctgccagcatcacacggagggccctcggtgtgagcagtgccagccaggatactacggggacgcccagcgggggacaccacaggactgccagctgtgcccctgctacggagaccctgctgccggccaggctgcccacacttgttttctggacacagacggccaccccacctgtgatgcgtgctccccaggccacagtgggcgtcactgtgagaggtgcgcccctggctactatggcaaccccagccagggccagccatgccagagagacagccaggtgccagggcccataggctgcaactgtgacccccaaggcagcgtcagcagccagtgtgatgctgctggtcagtgccagtgcaaggcccaggtggaaggcctcacttgcagccactgccggccccaccacttccacctgagtgccagcaacccagacggctgcctgccctgcttctgtatgggcatcacccagcagtgcgccagctctgcctacacacgccacctgatctccacccactttgcccctggggacttccaaggctttgccctggtgaacccacagcgaaacagccgcctgacaggagaattcactgtggaacccgtgcccgagggtgcccagctctcttttggcaactttgcccaactcggccatgagtccttctactggcagctgccggagacataccagggagacaaggtggcggcctacggtgggaagttgcgatacaccctctcctacacagcaggcccacagggcagcccactctctgaccccgatgtgcagatcacgggcaacaacatcatgctagtggcctcccagccagcgctgcagggccctgagaggaggagctacgagatcatgttccgagaggaattctggcgccggcccgatgggcagccggccacacgcgagcacctcctgatggcactggccgacctggatgagctcctgatccgggccacgttctcctccgtgccgctggtggccagcatcagcgcagtcagcctggaggtcgcccagccggggccctcaaacagaccccgcgccctcgaggtggaggagtgccgctgcccgccaggctacatcggtctgtcctgccaggactgtgcccccggctacacgcgcaccgggagtgggctctacctcggccactgcgagctatgtgaatgcaatggccactcagacctgtgccacccagagactggggcctgctcgcaatgccagcacaacgccgcaggggagttctgcgagctttgtgcccctggctactacggagatgccacagccgggacgcctgaggactgccagccctgtgcctgcccactgaccaacccagagaacatgttttcccgcacctgtgagagcctgggagccggcgggtaccgctgcacggcctgcgaacccggctacactggccagtactgtgagcagtgtggcccaggttacgtgggtaaccccagtgtgcaagggggccagtgcctgccagagacaaaccaagccccactggtggtcgaggtccatcctgctcgaagcatagtgccccaaggtggctcccactccctgcggtgtcaggtcagtgggagnnnaccccactacttctattggtcccgtgaggatgggcggcctgtgcccagcggcacccagcagcgacatcaaggctccgagctccacttccccagcgtccagccctcggatgctggggtctacatttgcacctgccgtaatctccaccaatccaataccagccgggcagagctgctggtcactgaggctccaagcaagcccatcacagtgactgtggaggagcagcggagccagagcgtgcgccccggagctgacgtcaccttcatctgcacagccaaaagcaagtccccagcctataccctggtgtggacccgcctgcacaacgggaaactgcccacccgagccatggatttcaatggcatcctgaccattcgcaacgtccagctgagtgatgcaggcacctacgtgtgcaccggctccaacatgtttgccatggaccagggcacagccactctacatgtgcaggcctcgggcaccttgtccgcccccgtggtctccatccatccgccacagctcacagtgcagcccgggcaactggcggagttccgctgcagcgccacagggagccccacgcccaccctcgagtggacagggggccccggcggccagctccctgcgaaggcacaaatccacggcggcatcctgcgcctgccagctgtcgagcccacggatcaggcccagtacttgtgccgagcccacagcagcgctgggcagcaggtggccagggctgtgctccacgtgcatgggggcggtgggcccagagtccaagtgagcccagagaggacccaggtccacgcaggccgcaccgtcaggctgtactgcagggctgcaggcgtgcctagcgccaccatcacctggaggaaggaagggggcagcctcccaccacaggcccggtcagagcgcacagacatcgcgacactgctcatcccagccatcacgactgctgacgccggcttctacctctgcgtggccaccagccctgcaggcactgcccaggcccggatccaagtggttgtcctttcagcctcagatgccagcccaccgccggtcaagattgagtcctcatcgccttctgtgacagaagggcaaacactcgacctcaactgtgtggtggcagggtcagcccatgcccaggtcacctggtacaggcgagggggtagcctgcctccccacacccaggtgcacggctcccgtctgcggctcccccaggtctcaccagctgattctggagaatatgtgtgccgtgtggagaatggatcgggccccaaggaggcctccattactgtgtctgtgctccacggcacccattctggccccagctacaccccagtgcccggcagcacccggcccatccgcatcgagccctcctcctcacacgtggcggaagggcagaccctggatctgaactgcgtggtgcccgggcaggcccacgcccaggtcacgtggcacaagcgtgggggcagcctccctgcccggcaccagacccacggctcgctgctgcggctgcaccaggtgaccccggccgactcaggcgagtatgtgtgccatgtggtgggcacctccggccccctagaggcctcagtcctggtcaccatcgaagcctctgtcatccctggacccatcccacctgtcaggatcgagtcttcatcctccacagtggccgagggccagaccctggatctgagctgcgtggtggcagggcaggcccacgcccaggtcacatggtacaagcgtgggggcagcctccctgcccggcaccaggttcgtggctcccgcctgtacatcttccaggcctcacctgccgatgcgggacagtacgtctgccgggccagcaacggcatggaggcctccatcacggtcacagtaactgggacccagggggccaacttagcctaccctgccggcagcacccagcccatccgcatcgagccctcctcctcgcaagtggcggaagggcagaccctggatctgaactgcgtggtgcccgggcagtcccatgcccaggtcacgtggcacaagcgtgggggcagcctccctgtccggcaccagacccacggctccctgctgagactctaccaagcgtcccccgccgactcgggcgagtacgtgtgccgagtgttgggcagctccgtgcctctagaggcctctgtcctggtcaccattgagcctgcgggctcagtgcctgcacttggggtcacccccacggtccggatcgagtcatcgtcttcgcaagtggccgaggggcagaccctggacctgaactgcctcgttgctggtcaggcccatgcccaggtcacgtggcacaagcgcgggggcagcctcccggcccggcaccaggtgcatggctcgaggctacgcctgctccaggtgaccccagctgattcaggggagtacgtgtgccgtgtggtcggcagctcaggtacccaggaagcctcagtccttgtcaccatccagcagcgccttagtggctcccactcccagggtgtggcgtaccccgtccgcatcgagtcctcctcagcctccctggccaatggacacaccctggacctcaactgcctggttgccagccaggctccccacaccatcacctggtataagcgtggaggcagcttacccagccggcaccagatcgtgggctcccggctgcggatccctcaggtgactccggcagactcgggcgagtacgtgtgtcacgtcagtaacggtgcaggctcccgggagacctcgctcatcgtcaccatccagggcagcggttcctcccacgtgcccagcgtctccccaccgatcaggatcgagtcgtcttcccccacggtggtggaagggcagaccttggatctgaactgcgtggtcgccaggcagccccaggctatcatcacatggtacaagcgtgggggcagccttccctcccgacaccagacccatggctcccacctgcggttgcaccaaatgtctgtggctgactcgggcgagtatgtgtgccgggccaacaacaacatcgatgccctggaggcctccatcgtcatctccgtctcccctagcgccggcagcccctccgcccctggcagctccatgcccatcagaattgagtcatcctcctcacacgtggccgaaggggagaccctggatctgaactgcgtggtccccgggcaggcccatgcccaggtcacttggcacaagcgtgggggcagcctccccagtcaccatcagacccgcggctcacggctgcggctgcaccatgtgtccccggccgactcgggtgaatacgtgtgccgggtgatgggcagctctggccccctggaggcctcagtcctggtcaccatcgaagcctctggctcaagtgctgtccacgtccccgccccaggtggagccccacccatccgcatcgagccctcctcctcccgagtggcagaagggcagaccctggatctgaagtgcgtggtgcccgggcaggcccacgcccaggtcacgtggcacaagcgtggaggaaacctccctgcccggcaccaggtccacggcccactgctgaggctgaaccaggtgtccccggctgactctggcgagtactcgtgccaagtgaccggaagctcaggcaccctggaggcatctgtcctggtcacaattgagccctccagcccaggacccattcctgctccaggactggcccagcccatctacatcgaggcctcctcttcacacgtgactgaagggcagactctggatctgaactgtgtggtgcccgggcaggcccatgcccaggtcacgtggtacaagcgcgggggcagcctccccgcccggcaccagacccatggctcccagctgcggctccaccncgtctcccctgccgactcaggcgagtatgtgtgtcgtgcagccngcggcccaggccctgagcaagaagcctccttcacagtcaccgtcccgcccagtgaggggtcttcctaccgccttaggagcccggtcatctccatcgacccgcccagcagcaccgtgcagcagggccaggatgccagcttcaagtgcctcatccatgacggggcagcccccatcagcctcgagtggaagacccggaaccaggagctggaggacaacgtccacatcagtcccaatggctccatcatcaccatcgtgggcacccggcccagcaaccacggtacctaccgctgcgtggcctccaatgcctacggtgtggcccagagtgtggtgaacctcagtgtgcacgggccccctacagtgtccgtgctccccgagggccccgtgtgggtgaaagtgggaaaggctgtcaccctggagtgtgtcagtgccggggagccccgctcctctgctcgttggacccggatcagcagcacccctgccaagttggagcagcggacatatgggctcatggacagccacgcggtgctgcagatttcatcagctaaaccatcagatgcgggcacttatgtgtgccttgctcagaatgcactaggcacagcacagaagcaggtggaggtgatcgtggacacgggcgccatggccccaggggcccctcaggtccaagctgaagaagctgagctgactgtggaggctggacacacggccaccttgcgctgctcagccacaggcagccccgcgcccaccatccactggtccaagctgcgttccccactgccctggcagcaccggctggaaggtgacacactcatcataccccgggtagcccagcaggactcgggccagtacatctgcaatgccactagccctgctgggcacgctgaggccaccatcatcctgcacgtggagagcccaccatatgccaccacggtcccagagcacgcttcggtgcaggcaggggagacggtgcagctccagtgcctggctcacgggacacccccactcaccttccagtggagccgcgtgggcagcagccttcctgggagggcgaccgccaggaacgagctgctgcactttgagcgtgcagcccctgaggactcaggccgctaccgctgccgggtcaccaacaaggtgggctcagccgaggcctttgcccagctgctcgtccaaggccctcccggctctctccctgccacctccatcccagcagggtccacgcccaccgtgcaggtcacgcctcagctagagaccaagagcattggggccagcgttgagttccactgtgctgtgcccagcgaccggggtacccagctccgttggttcaaggaagggggtcagctgcctccgggtcacagcgtgcaggatggggtgctccgaatccagaacttggaccagagctgccaagggacgtatatatgccaggcccatggaccttgggggaaggcccaggccagtgcccagctggttatccaaggtaggagggtggcttcaggcctctgctaagagcagggaacagagatgagaaaggcagagaggcacaaggcccagaccctgttccctaggaatccccctaaatgtgtcagaataaagagaattattccattttgccttgcttgtgtctagcatagagtaaaaggggcttgatacatatttcaagggagggaagaaggatatggatggagtgtgtgagtgctcagatgaaccgatgaagattgaatcagtgtgaaccgggcatggtggaacgcacctgtagtcccacctactcaggaggctaagctgggagcattgcttgagcgcatgaattctaggctgtggtgagccgtgatcacacctgtgaatacaaccaagaccctttgtctaaaaaaaaaagaagtggacacgtgagtgagtaaatgcataagacctgacaagtgagtgtgtttgtgagtgaatgcatgaaaaagtgaatgaggagtgaatgaatgctggagcttcagtgctcacctttccttgggcagtct

SEQ ID NO: 367566 - DNA, 5651 bp, Homo sapiens
  misc_feature (1383)..(1383): n is a, c, g, or t
  misc_feature (1392)..(1392): n is a, c, g, or t
  misc_feature (5192)..(5194): n is a, c, g, or t
ggccggcgagcgggcggctgcgggcggcgcggagcgggcggcgcggagcgagcgagcgagagagcggcgcgggccgggccatggggtggcgggcgccgggcgcgctgctgctggcgctgctgctgcacgggcggctgctggcggtgacccatgggctgagggcatacgatggcttgtctctgcctgaggacatagagaccgtcacagcaagccaaatgcgctggacacattcgtacctttctgatgatgaggacatgctggctgacagcatctcaggagacgacctgggcagtggggacctgggcagcggggacttccagatggtttatttccgagccctggtgaatttcactcgctccatcgagtacagccctcagctggaggatgcaggctccagagagtttcgagaggtgtccgaggctgtggtagacacgctggagtcggagtacttgaaaattcccggagaccaggttgtcagtgtggtgttcatcaaggagctggatggctgggtttttgtggagctcgatgtgggctcggaagggaatgcggatggtgctcagattcaggagatgctgctcagggtcatctccagcggctctgtggcctcctacgtcacctctccccagggattccagttccgacgcctgggcacagtgccccagttcccaagagcctgcacggaggccgagtttgcctgccacagctacaatgagtgtgtggccctggagtatcgctgtgaccggcggcccgactgcagggacatgtctgatgagctcaattgtgaggagccagtcctgggtatcagccccacattctctctccttgtggagacgacatctttaccgccccggccagagacaaccatcatgcgacagccaccagtcacccacgctcctcagcccctgcttcccggttccgtcaggcccctgccctgtgggccccaggaggccgcatgccgcaatgggcactgcatccccagagactacctctgcgacggacaggaggactgcgaggacggcagcgatgagctagactgtggccccccgccaccctgtgagcccaacgagttcccctgcgggaatggacattgtgccctcaagctgtggcgctgcgatggtgactttgactgtgaggaccgaactgatgaagccaactgccccaccaagcgtcctgaggaagtgtgcgggcccacacagttccgatgcgtctctaccaacatgtgcatcccagccagcttccactgtgacgaggagagcgactgtcctgaccggagcgacgagtttggctgcatgcccccccaggtggtgacacctccccgggagtccatccaggcttcccggggccagacagtgaccttcacctgcgtggccattggcgtccccnccccctttntcatcaattggaggctcaactggggccacatcccctctcatcccagggtgacagtgaccagcgagggtggccgtggcacactgatcatccgtgatgtgaaggagtcagaccagggtgcctacacctgtgaggccatgaacgcccggggcatggtgtttggcattcctgacggtgtccttgagctcgtcccacaacgaggcccctgccctgacggccacttctacctggagcacagcgccgcctgcctgccctgcttctgctttggcatcaccagcgtgtgccagagcacccgccgcttccgggaccagatcaggctgcgctttgaccaacccgatgacttcaagggtgtgaatgtgacaatgcctgcgcagcccggcacgccacccctctcctccacgcagctgcagatcgacccatccctgcacgagttccagctagtcgacctgtcccgccgcttcctcgtccacgactccttctgggctctgcctgaacagttcctgggcaacaaggtggactcctatggcggctccctgcgttacaacgtgcgctacgagttggcccgtggcatgctggagccagtgcagcggccggacgtggtcctcgtgggtgccgggtaccgcctcctctcccgaggccacacacccacccaacctggtgctctgaaccagcgccaggtccagttctctgaggagcactgggtccatgagtctggccggccggtgcagcgcgcggagctgctgcaggtgctgcagagcctggaggccgtgctcatccagaccgtgtacaacaccaagatggctagcgtgggacttagcgacatcgccatggataccaccgtcacccatgccaccagccatggccgtgcccacagtgtggaggagtgcagatgccccattggctattctggcttgtcctgcgagagctgtgatgcccacttcactcgggtgcctggtgggccctacctgggcacctgctctggttgcagttgcaatggccatgccagctcctgtgaccctgtgtatggccactgcctgaattgccagcacaacacggaggggccacagtgcaacaagtgcaaggctggcttctttggggacgccatgaaggccacggccacttcctgccggccctgcccttgcccatacatcgatgcctcccgcagattctcagacacttgcttcctggacacggatggccaagccacatgtgacgcctgtgccccaggctacactggccgccgctgtgagagctgtgcccccggatacgagggcaaccccatccagcccggcgggaagtgcaggcccgtcaaccaggagattgtgcgctgtgacgagcgtggcagcatggggacctccggggaggcctgccgctgtaagaacaatgtggtggggcgcttgtgcaatgaatgtgctgacggctctttccacctgagtacccgaaaccccgatggctgcctcaagtgcttctgcatgggtgtcagtcgccactgcaccagctcttcatggagccgtgcccagttgcatggggcctctgaggagcctggtcacttcagcctgaccaacgccgcaagcacccacaccaccaacgagggcatcttctcccccacgcccggggaactgggattctcctccttccacagactcttatctggaccctacttctggagcctcccttcacgcttcctgggggacaaggtgacctcctatggaggagagctgcgcttcacagtgacccagaggtcccagccgggctccacacccctgcacgggcagccgttggtggtgctgcaaggtaacaacatcatcctagagcaccatgtggcccaggagcccagccccggccagcccagcaccttcattgtgcctttccgggagcaagcatggcagcggcccgatgggcagccagccacacgggagcacctgctgatggcactggcaggcatcgacaccctcctgatccgagcatcctacgcccagcagcccgctgagagcagggtctctggcatcagcatggacgtggctgtgcccgaggaaaccggccaggaccccgcgctggaagtggaacagtgctcctgcccacccgggtaccgtgggccgtcctgccaggactgtgacacaggctacacacgcacgcccagtggcctctacctgggtacctgtgaacgctgcagctgccatggccactcagaggcctgcgagccagaaacaggtgcctgccagggctgccagcatcacacggagggccctcggtgtgagcagtgccagccaggatactacggggacgcccagcgggggacaccacaggactgccagctgtgcccctgctacggagaccctgctgccggccaggctgcccacacttgttttctggacacagacggccaccccacctgtgatgcgtgctccccaggccacagtgggcgtcactgtgagaggtgcgcccctggctactatggcaaccccagccagggccagccatgccagagagacagccaggtgccagggcccataggctgcaactgtgacccccaaggcagcgtcagcagccagtgtgatgctgctggtcagtgccagtgcaaggcccaggtggaaggcctcacttgcagccactgccggccccaccacttccacctgagtgccagcaacccagacggctgcctgccctgcttctgtatgggcatcacccagcagtgcgccagctctgcctacacacgccacctgatctccacccactttgcccctggggacttccaaggctttgccctggtgaacccacagcgaaacagccgcctgacaggagaattcactgtggaacccgtgcccgagggtgcccagctctcttttggcaactttgcccaactcggccatgagtccttctactggcagctgccggagacataccagggagacaaggtggcggcctacggtgggaagttgcgatacaccctctcctacacagcaggcccacagggcagcccactctctgaccccgatgtgcagatcacgggcaacaacatcatgctagtggcctcccagccagcgctgcagggccctgagaggaggagctacgagatcatgttccgagaggaattctggcgccggcccgatgggcagccggccacacgcgagcacctcctgatggcactggccgacctggatgagctcctgatccgggccacgttctcctccgtgccgctggtggccagcatcagcgcagtcagcctggaggtcgcccagccggggccctcaaacagaccccgcgccctcgaggtggaggagtgccgctgcccgccaggctacatcggtctgtcctgccaggactgtgcccccggctacacgcgcaccgggagtgggctctacctcggccactgcgagctatgtgaatgcaatggccactcagacctgtgccacccagagactggggcctgctcgcaatgccagcacaacgccgcaggggagttctgcgagctttgtgcccctggctactacggagatgccacagccgggacgcctgaggactgccagccctgtgcctgcccactgaccaacccagagaacatgttttcccgcacctgtgagagcctgggagccggcgggtaccgctgcacggcctgcgaacccggctacactggccagtactgtgagcagtgtggcccaggttacgtgggtaaccccagtgtgcaagggggccagtgcctgccagagacaaaccaagccccactggtggtcgaggtccatcctgctcgaagcatagtgccccaaggtggctcccactccctgcggtgtcaggtcagtgggagnnnaccccactacttctattggtcccgtgaggatgggcggcctgtgcccagcggcacccagcagcgacatcaaggctccgagctccacttccccagcgtccagccctcggatgctggggtctacatttgcacctgccgtaatctccaccaatccaataccagccgggcagagctgctggtcactgaggctccaagcaagcccatcacagtgactgtggaggagcagcggagccagagcgtgcgccccggagctgacgtcaccttcatctgcacagccaaaagcaagtccccagcctataccctggtgtggacccgcctgcacaacgggaaactgcccacccgagccatggatttcaatggcatcctgaccattcgcaacgtccagctgagtgatgcaggtgaaatggaccctctcctacacagcaggcccacagggcagcccactctctgaccccgatgt

SEQ ID NO: 367567 - DNA, 4115 bp, Homo sapiens
  misc_feature (1383)..(1383): n is a, c, g, or t
  misc_feature (1392)..(1392): n is a, c, g, or t
ggccggcgagcgggcggctgcgggcggcgcggagcgggcggcgcggagcgagcgagcgagagagcggcgcgggccgggccatggggtggcgggcgccgggcgcgctgctgctggcgctgctgctgcacgggcggctgctggcggtgacccatgggctgagggcatacgatggcttgtctctgcctgaggacatagagaccgtcacagcaagccaaatgcgctggacacattcgtacctttctgatgatgaggacatgctggctgacagcatctcaggagacgacctgggcagtggggacctgggcagcggggacttccagatggtttatttccgagccctggtgaatttcactcgctccatcgagtacagccctcagctggaggatgcaggctccagagagtttcgagaggtgtccgaggctgtggtagacacgctggagtcggagtacttgaaaattcccggagaccaggttgtcagtgtggtgttcatcaaggagctggatggctgggtttttgtggagctcgatgtgggctcggaagggaatgcggatggtgctcagattcaggagatgctgctcagggtcatctccagcggctctgtggcctcctacgtcacctctccccagggattccagttccgacgcctgggcacagtgccccagttcccaagagcctgcacggaggccgagtttgcctgccacagctacaatgagtgtgtggccctggagtatcgctgtgaccggcggcccgactgcagggacatgtctgatgagctcaattgtgaggagccagtcctgggtatcagccccacattctctctccttgtggagacgacatctttaccgccccggccagagacaaccatcatgcgacagccaccagtcacccacgctcctcagcccctgcttcccggttccgtcaggcccctgccctgtgggccccaggaggccgcatgccgcaatgggcactgcatccccagagactacctctgcgacggacaggaggactgcgaggacggcagcgatgagctagactgtggccccccgccaccctgtgagcccaacgagttcccctgcgggaatggacattgtgccctcaagctgtggcgctgcgatggtgactttgactgtgaggaccgaactgatgaagccaactgccccaccaagcgtcctgaggaagtgtgcgggcccacacagttccgatgcgtctctaccaacatgtgcatcccagccagcttccactgtgacgaggagagcgactgtcctgaccggagcgacgagtttggctgcatgcccccccaggtggtgacacctccccgggagtccatccaggcttcccggggccagacagtgaccttcacctgcgtggccattggcgtccccnccccctttntcatcaattggaggctcaactggggccacatcccctctcatcccagggtgacagtgaccagcgagggtggccgtggcacactgatcatccgtgatgtgaaggagtcagaccagggtgcctacacctgtgaggccatgaacgcccggggcatggtgtttggcattcctgacggtgtccttgagctcgtcccacaacgaggcccctgccctgacggccacttctacctggagcacagcgccgcctgcctgccctgcttctgctttggcatcaccagcgtgtgccagagcacccgccgcttccgggaccagatcaggctgcgctttgaccaacccgatgacttcaagggtgtgaatgtgacaatgcctgcgcagcccggcacgccacccctctcctccacgcagctgcagatcgacccatccctgcacgagttccagctagtcgacctgtcccgccgcttcctcgtccacgactccttctgggctctgcctgaacagttcctgggcaacaaggtggactcctatggcggctccctgcgttacaacgtgcgctacgagttggcccgtggcatgctggagccagtgcagcggccggacgtggtcctcgtgggtgccgggtaccgcctcctctcccgaggccacacacccacccaacctggtgctctgaaccagcgccaggtccagttctctgaggagcactgggtccatgagtctggccggccggtgcagcgcgcggagctgctgcaggtgctgcagagcctggaggccgtgctcatccagaccgtgtacaacaccaagatggctagcgtgggacttagcgacatcgccatggataccaccgtcacccatgccaccagccatggccgtgcccacagtgtggaggagtgcagatgccccattggctattctggcttgtcctgcgagagctgtgatgcccacttcactcgggtgcctggtgggccctacctgggcacctgctctggttgcagttgcaatggccatgccagctcctgtgaccctgtgtatggccactgcctgaattgccagcacaacacggaggggccacagtgcaacaagtgcaaggctggcttctttggggacgccatgaaggccacggccacttcctgccggccctgcccttgcccatacatcgatgcctcccgcagattctcagacacttgcttcctggacacggatggccaagccacatgtgacgcctgtgccccaggctacactggccgccgctgtgagagctgtgcccccggatacgagggcaaccccatccagcccggcgggaagtgcaggcccgtcaaccaggagattgtgcgctgtgacgagcgtggcagcatggggacctccggggaggcctgccgctgtaagaacaatgtggtggggcgcttgtgcaatgaatgtgctgacggctctttccacctgagtacccgaaaccccgatggctgcctcaagtgcttctgcatgggtgtcagtcgccactgcaccagctcttcatggagccgtgcccagttgcatggggcctctgaggagcctggtcacttcagcctgaccaacgccgcaagcacccacaccaccaacgagggcatcttctcccccacgcccggggaactgggattctcctccttccacagactcttatctggaccctacttctggagcctcccttcacgcttcctgggggacaaggtgacctcctatggaggagagctgcgcttcacagtgacccagaggtcccagccgggctccacacccctgcacgggcagccgttggtggtgctgcaaggtaacaacatcatcctagagcaccatgtggcccaggagcccagccccggccagcccagcaccttcattgtgcctttccgggagcaagcatggcagcggcccgatgggcagccagccacacgggagcacctgctgatggcactggcaggcatcgacaccctcctgatccgagcatcctacgcccagcagcccgctgagagcagggtctctggcatcagcatggacgtggctgtgcccgaggaaaccggccaggaccccgcgctggaagtggaacagtgctcctgcccacccgggtaccgtgggccgtcctgccaggactgtgacacaggctacacacgcacgcccagtggcctctacctgggtacctgtgaacgctgcagctgccatggccactcagaggcctgcgagccagaaacaggtgcctgccagggctgccagcatcacacggagggccctcggtgtgagcagtgccagccaggatactacggggacgcccagcgggggacaccacaggactgccagctgtgcccctgctacggagaccctgctgccggccaggctgcccacacttgttttctggacacagacggccaccccacctgtgatgcgtgctccccaggccacagtgggcgtcactgtgagaggtgcgcccctggctactatggcaaccccagccagggccagccatgccagagagacagccaggtgccagggcccataggctgcaactgtgacccccaaggcagcgtcagcagccagtgtgatgctgctggtcagtgccagtgcaaggtcagtccgaatccctgtccctgcggggcctgctctgccccgctgcccagaccctgcggggaaatcaggcagcatctggtggaagccgagacctgggcatggggggcagggcatgggggacagggcaggggctgcccggggctg

SEQ ID NO: 367568 - DNA, 2973 bp, Homo sapiens
  misc_feature (1383)..(1383): n is a, c, g, or t
  misc_feature (1392)..(1392): n is a, c, g, or t
ggccggcgagcgggcggctgcgggcggcgcggagcgggcggcgcggagcgagcgagcgagagagcggcgcgggccgggccatggggtggcgggcgccgggcgcgctgctgctggcgctgctgctgcacgggcggctgctggcggtgacccatgggctgagggcatacgatggcttgtctctgcctgaggacatagagaccgtcacagcaagccaaatgcgctggacacattcgtacctttctgatgatgaggacatgctggctgacagcatctcaggagacgacctgggcagtggggacctgggcagcggggacttccagatggtttatttccgagccctggtgaatttcactcgctccatcgagtacagccctcagctggaggatgcaggctccagagagtttcgagaggtgtccgaggctgtggtagacacgctggagtcggagtacttgaaaattcccggagaccaggttgtcagtgtggtgttcatcaaggagctggatggctgggtttttgtggagctcgatgtgggctcggaagggaatgcggatggtgctcagattcaggagatgctgctcagggtcatctccagcggctctgtggcctcctacgtcacctctccccagggattccagttccgacgcctgggcacagtgccccagttcccaagagcctgcacggaggccgagtttgcctgccacagctacaatgagtgtgtggccctggagtatcgctgtgaccggcggcccgactgcagggacatgtctgatgagctcaattgtgaggagccagtcctgggtatcagccccacattctctctccttgtggagacgacatctttaccgccccggccagagacaaccatcatgcgacagccaccagtcacccacgctcctcagcccctgcttcccggttccgtcaggcccctgccctgtgggccccaggaggccgcatgccgcaatgggcactgcatccccagagactacctctgcgacggacaggaggactgcgaggacggcagcgatgagctagactgtggccccccgccaccctgtgagcccaacgagttcccctgcgggaatggacattgtgccctcaagctgtggcgctgcgatggtgactttgactgtgaggaccgaactgatgaagccaactgccccaccaagcgtcctgaggaagtgtgcgggcccacacagttccgatgcgtctctaccaacatgtgcatcccagccagcttccactgtgacgaggagagcgactgtcctgaccggagcgacgagtttggctgcatgcccccccaggtggtgacacctccccgggagtccatccaggcttcccggggccagacagtgaccttcacctgcgtggccattggcgtccccnccccctttntcatcaattggaggctcaactggggccacatcccctctcatcccagggtgacagtgaccagcgagggtggccgtggcacactgatcatccgtgatgtgaaggagtcagaccagggtgcctacacctgtgaggccatgaacgcccggggcatggtgtttggcattcctgacggtgtccttgagctcgtcccacaacgaggcccctgccctgacggccacttctacctggagcacagcgccgcctgcctgccctgcttctgctttggcatcaccagcgtgtgccagagcacccgccgcttccgggaccagatcaggctgcgctttgaccaacccgatgacttcaagggtgtgaatgtgacaatgcctgcgcagcccggcacgccacccctctcctccacgcagctgcagatcgacccatccctgcacgagttccagctagtcgacctgtcccgccgcttcctcgtccacgactccttctgggctctgcctgaacagttcctgggcaacaaggtggactcctatggcggctccctgcgttacaacgtgcgctacgagttggcccgtggcatgctggagccagtgcagcggccggacgtggtcctcgtgggtgccgggtaccgcctcctctcccgaggccacacacccacccaacctggtgctctgaaccagcgccaggtccagttctctgaggagcactgggtccatgagtctggccggccggtgcagcgcgcggagctgctgcaggtgctgcagagcctggaggccgtgctcatccagaccgtgtacaacaccaagatggctagcgtgggacttagcgacatcgccatggataccaccgtcacccatgccaccagccatggccgtgcccacagtgtggaggagtgcagatgccccattggctattctggcttgtcctgcgagagctgtgatgcccacttcactcgggtgcctggtgggccctacctgggcacctgctctggttgcagttgcaatggccatgccagctcctgtgaccctgtgtatggccactgcctgaattgccagcacaacacggaggggccacagtgcaacaagtgcaaggctggcttctttggggacgccatgaaggccacggccacttcctgccggccctgcccttgcccatacatcgatgcctcccgcagattctcagacacttgcttcctggacacggatggccaagccacatgtgacgcctgtgccccaggctacactggccgccgctgtgagagctgtgcccccggatacgagggcaaccccatccagcccggcgggaagtgcaggcccgtcagtgagtatggctgccaccatcccctgacacccacctcccaacccaacctgggctgcacaccaggcaccctccctccctgccccagctcatgaaccttggggagccactgttcctctatctgcccggaccacgtatatcccattcccacctgccctgccaacactcgttttgtgtcccagaccaggagattgtgcgctgtgacgagcgtggcagcatggggacctccggggaggcctgccgctgtaaggcaacaagactgaaactccgtctcaa

SEQ ID NO: 367569 - DNA, 257 bp, Homo sapiens
gctgggggtccagccctcctctctcacttttcaataagtcctcctggctagggatggtggaatgtggcccagccctgcagccctcagctcccggctcccaggtggaacagccactgatcacatcttcctttccagcacagacccccccacccccgccggccgctgtggcggtcgcagtgacaccaggtgagagtgtaagccaggccgaggcccagccaggttcctagagaagttaaggttggagaggaggccgggtg

SEQ ID NO: 367570 - DNA, 388 bp, Homo sapiens
gagctattgcggcttcggttccagaccaccacaatgaagcaaattccacatgaaagcaagtgacacacactttttggttttccaatgcatataaaagttacgtttgggctgggtgtggtagctcacacctataagcctacccctttgggaggctgaggcaggaggattgcttgagcccaggagtttgagatcagcctgggcatcatgccaagacctcatctttacaaaaaataaaataactagccaggtatggtggtagcatgtctgtggtcccagctacccgaggctgaggtgggaggattgcttgggcccaggaggtcaaggctgcagtgagccatgttcacatcactgtactccaacctgggcaaaggagcaagaccctgtctca

SEQ ID NO: 367571 - DNA, 704 bp, Homo sapiens
cacgctcccctcgactgcgctccagcctggggcgcgcccggccgccgccgccttcgctgccgccacgggcccgtcttcttcctccttcggctcccaggatgaagaaactgagtctcagagaggtgaagtgacttgcccaagatcacagcaattatcacttctccctgggctcccaggccctcctgcagcagcccccgcctgggccatgtcttcctcagatgaagagacgctcagtgagcggtcatgtcggagtgagcggtcttgtcggagtgagcgatcttacaggagcgagcggtcggggagcctgtctccctgtcccccaggggacaccttgccctggaacctgccactgcatgagcagaaaaagcggaaaagccaggattcggtgctggaccctgcagagcgtgctgtggtcagagtcgctgatgcccttccgagtacatccttctgcttcccccattgcagccttcttagaaatgcagcagcagtctcacccatcaggagcaaaagaaaatcaaagaccaaaaggagaaagcctcagagcttttgcgactgtgtggtctggctataaatttagactgttgcttgaaagaagcgaaaaacctccccttcatagacttccttcttcccatcccccctggcagccgctttgttcctctagccttgtaaaattttctctgtataaaacaggaacatcagccaaa

SEQ ID NO: 367572 - DNA, 455 bp, Homo sapiens
ctgactcccggaccttactaaaggcgttactaaacggctgtatagtctaagtctttaagatggctccaccaaccatccctacttaactgagagatgacattctctgagggagtggagtattcagttttctttgttgacttagtcaccctgagtagcagcattaatgtcattttgtttttcttatcattttgtaggatgaaaaggagcagcttatacagtccaagagttccgttgccagtctcgttgggagatcaaaaaccatcgttcagctaaaaccacgcagtccagaccatgtgttaaagaacaccatttctgtcaaggctgtctgtgactacaggcagatcgaggtgaggaggtagaaagggtacctctgggccacagggggaaggaagaaagaagggaagccttcagttagggttatgatgataaaagatcaaattacagcgtttttaaaa

SEQ ID NO: 367573 - DNA, 1069 bp, Homo sapiens
aaagagggggagagagggccaatttgggcacctgtttgtaagtgcaggtgactaaagcgccatcagaaggtagaaactggtggaaaatggttttagaaggatggtcaggagaacacatcatgctcaattgctcagtcaggtgcttcaatgtcatacaactgagataaaatctagagaaaggatcaggcacagaaacatattccctctctctccttgggcctggcctgttcctttgatattagtgtagacacctaaaggactgagccagttgctattcttgggcactttccttctcaaaatagccaaatctagcccttcatgcctggcgtgtaatcattttatttaatgagtctctggattgatgagacatttgatttataaagtcagctcaattattaagaagctcgattaacttatgaattatccaggtctttgatttttctttctactccaattcttctacttttgcatattatgtagcaaatctctggttctagtggagggattgatcagaaccactaaattattatcatcaccattatcatgtgtggatttcaagcatctgggctctttcttctccatttccaaagataataacagcagtctggtgaaggagctctcaaaccaaaacctgaactagaaacattctcataattatcctgattatccaatccatagacccagatcaatggactgtccaaatgaggggagctttccgaatatgatttctatgtcttttcctattctagtctcccaccaacttttccatccttgagatataaccttcctgttttacatttcagggagtttcttgtatttgcaaaatgtgaattacgaaatgtctcttgacccctttgcattttaattagaccctgcagaaacaacaaaatacctgtcaccagcaactggaggatctttgcagttgggtaggacaggcagaaagagcactggcaggccaccaaggcagaaccacccagcaggatctctctgctttgcagaagaaccaaagtgacttgaaggtcagtgtgaatctgtcaatattgacacaaagtctcgctctatcgcttag

SEQ ID NO: 367574 - DNA, 724 bp, Homo sapiens
gtttggggtagtcagcactaatattttgctgcatggctttttaagcccttcggtttatgtttcagtggtccttgtaataaactgtcactaatgcagtagggtgtaatcagctttgctaagctctgcacagtaaaattgttctttcttagttaatattccagtgttctaatgttttgagcagaaggcatccttactttgtattcccatagttcttcagtgatgcacgagagctggagtcattcttgaggaacctccaagattccattaaacgaaaatattcctgtgaccacaacaccagcttatcccgccttgaagacctgctccaggactccatggtgggtgttgcctcagtggggatgattacttctgagaaagagagtaaaccatatcagctgctgctgtttatatccttgaaagctccagggcaatgggccattgttgtaataaagtttggcttacattcaaatagagtttaatcgatgttgttctgtctctttcctttttttccttttcttttcttaaataagttgctaataagatttctttgggtatgttattgaagtaaaggcctagtcttctcctctgagccactttgagctcattgtactttctttgcatttttcttattttaatgtaatagttggagccaaggatgaggtgttgagcatgaagaaaaggttgaaggggattagttgatatcaaattcttttttactctcttatgc

SEQ ID NO: 367575 - DNA, 577 bp, Homo sapiens
tcgactctgctaagatcatgttgtcaacacttctttatggaaagaatgatctctttgaggataatgcattgcaaaatgaaaaatctctcatgttcatgtttatggacaacctccttttttggcttcactaaatatttgcttagaaaacaaaatcaaatttctttgcattgatttaagcctaaacctgaagcaaattgtagttagggactatatacaggactatatgtcatcctagccattccatctttataccattagaggacttagaagcactaaagtcgaaggctctgccattcctattttcttgtgttaaggatttacaggatgacattcagaatcgtgccacctcatttgccactgttgtcaaggacattgaggggttcatggaagagaatcagaccaagctgagcccacgtgagttgacagctcttcgggaaaagcttcatcaggctaaggagcaatatgaggcgctccaggaagagacacgtgtggcccagaaggaactggaggaagcagtgacctccgccttacagcaggagactgaaaaggtaatagactgctatgacgcttgatattt

SEQ ID NO: 367576 - DNA, 4161 bp, Homo sapiens
  misc_feature (378)..(378): n is a, c, g, or t
  misc_feature (1076)..(1076): n is a, c, g, or t
  misc_feature (1849)..(1849): n is a, c, g, or t
  misc_feature (2024)..(2024): n is a, c, g, or t
  misc_feature (2222)..(2222): n is a, c, g, or t
ttccagacatgtccttccaacccagagttcccctcctttttcagctacgcttcttgttccctgtctcatctccttttttcccatcactccccaagtccctgtggtctggctgacactgttctggtcacattctactggctaaatccaacagagttttttcagtctttattttgtttgacatgtaacctagctggctcttcatcccttcccaaaacttcccttttgacttctgtgtcctttaatctttgtgttttcctctgatctctctgaccgttcctttttagcctttttagctggttcctcttccctgcctattcatcagtgttgttccctgacgtctcattcttgatgctctcctcactctgctaagatttatcnggtctaacagctttagctattacctataaagcttctgcatctttttcatcttcagcactatcatctcctaaagtccagacatacagtaaactagaagcagttctaaaatttccactttatctttgcccccttgcctgacgtcatttgtccattctagatctgccccccctttcctcattcagaggcctgtgatgtctggagttcctccttttcctcacatctagtcactcaccagggcttgtcagtcccactttcaaaatacctcttggttccatctttccggccctggctctggccctcaccatgttttgcctcagttgctgcaatggtttcttaacctgtcttctcactgctagccactccccatcccacacttacccccacccccacatcactccatgttttacactgaagccagagtgatagctgtaaagcatgggtctgatcatgtctcttacctggatcgaaatccttcagctgccccctgttgctctcagaataaatggccaacccttagcctgacacagaagcctttcgtgatctgtctcctgcctgcctctccaaccctgcctcttgccattcctctgattgcatcctctgcccagccagtgagtggaggggtcctggtcacagcactgtcaggcatccctgtctctgtttgggttgcaccctcttccaggactgccttcccaccattngttgactgtttcttcattgctcagtgtgtcagtccgtttgcattgctataaaggaattcctgagactgggtaatttataaagaaaataggtttattttggcttacggttctgcaggctgtacgggaagcatggtgccaatatctgcttctggtgagggcttcaggaagcttagaatcatggtggaaggcaaaggggagccagcgtgttacatggcaagagagggagagagagaaagaggaggagatagcaggctccttttaaacagccagttctcatgtgaactaacagcaagaactcactcattaccatggggagggcaccaaggccattcatgaggaatttgcccccataactcaatcacatcccgttagaccccacctccagcattggaaatcacatttcaacatgagatttggaggggacaaatatccaaactacatccctcagtaactcaactcaggcaccagcctccacacagcctttcctgccaccacaggccgtaaagtacccatcctagctcttcctttgcccccataagagtaaaaatacaatatttaactctttttcctattttttgtgtttaacagacatttatggaggagatgactcgcaaacagcctgacgtggaccgggtcaccaagacatacaaaaggaaaaacatagagcctactcacgcgcctttcatagagaaatcccgcagcggaggcagtatgtttccagccccctgtgttaggatgcttcattcctgctaattgaggatgagcactttccnaatgcctatcaaaaaaaattatattccattttcaaaaaccgtgttggttttgaaccaaaatctctcatttttgaaactcacttttcttacattgacagacagtagctgtactccatattctttggtatgattggtatgaaattacgaggtggttaagcttattttttaacagtgncctttccattgttttggttatcagccctagctgtttacatttggcttgtactaatttaatcaacacaacagcttctacagaatatgttgcttttttagttgagttaacgtgtcatcagctcactaaggtaggacagaattgcttggagatatgtaggcagcaggtaagtatgtgctgggaggatcagtacttttgganttagtacacctccgtatctaaatattgccaagtcccgtatttcttttctcagttattgactggatattattataaagatcttctaggtttatacatacagctatttctctttgtatactaaccagctgttctaatcttgtgattatttttccttttagggaaatccctaagtcagccaacccctcctcccatgccaatcctttcacagtctgaagcaaaaaacccacggatcaaccagctttctgcccgctggcagcaggtgtggctgttagcactggagcggcaaaggaaactgaatgatgccttggatcggctggaggagttgaaagaatttgccaactttgactttgatgtctggaggaaaaagtatatgcgttggatgaatcacaaaaagtctcgagtgatggatttcttccggcgcattgataaggaccaggatgggaagataacacgtcaggagtttatcgatggcattttagcatccaagttccccaccaccaagttagagatgactgctgtggctgacattttcgaccgagatggggatggttacattgattattatgaatttgtggctgctcttcatcccaacaaggatgcgtatcgaccaacaaccgatgcagataaaatcgaagatgaggttacaagacaagtggctcagtgcaaatgtgcaaaaaggtttcaggtggagcagatcggagagaataaataccgggtaaggaagagaaaaagcagtcctttgttgtggtggtttctcatatgtggctgatcccaccttttcctcctgatgcttagaggcccagagcccatcggacttgagatgtggtcactctctgacctcatctctatagatgccaagtgtcaggtaccctgttacatctgaaaactagtcccatatctacctagatagtagtagtttgtatttaagttttaagataggagatatttcagagctgtcacttcacatctgacaaagttcctagggggatgaaggtacctttggaaacaattatatctattgactgaccacttgcccacaaagagatggtcattgtgagcctgagtggctcccaggctagagaggcctggggaaactgtgttgaagccccaacagacactgtgcctgctctgagctgggctacaaatggggcccaggagcactgaggagacatcaggctcagtggtcttccctggaaagccatgctaggtgtggccataactgacagtgaactatacttgtgttttagcttcttttgggaccagggtcagggacatagaaggatctgaaacaggtctcctaaaatatatcaacagctcgtcaagattctctaaagtcctaagaaaaatctatgattggcaaagaggatttagattgcactaagaaacacaggaaggtccatgtttcattagtatatccaaaatgtcctcaaagtacaccaaatctaccccatgctgcagtctcctgaggagtgctgggtgaatctgctttgaatataacctagggcatttagttaataaagctccatataatcttatgcctgcttgttggattttgttttcttgttttttgtttttaattatctatgagagaaatgaattaacaagaacaacatagcatggagagttagttcatagtttataaaaccacatccctggccgggcgtggtggctcacacctgtaattccagaattttggaaggtagagaggcgagcgagcggatcacttgaggtcaggaattcgagaccaacctggccaacatggtgaaacaccctctctactaataacacaaaaattagctgggcttggtagcgcatgcctgtaatcccaactactagggaggctgaggcaggagaattgcttgaacgccggggtcggaggttgcagtgagccatgatcgcgccactgcactccagcctgggcaacagagcgagactctca

SEQ ID NO: 367577 - DNA, 438 bp, Homo sapiens
ggtttggtaccaataattggtaaagctgatgtaattctaagtttttctcatccagcgcataggaaagcttgcctataggtatctgatttaattattttgaatagtcaatgggctaaccaaggagaagatgaggggatcaaatatctgatgtttaaattaaactagtattcatctctttactttaaatttggtctcttaaaggtctcgcattttgtttcatttgtagtgccacagtttcaggattaatgggtattctttcctttcagggctttaaatgaagaaattgttaatagaaagaagaatgtagatcaagctattaaaaatggtcaggctcttctaaaacaaaccacaggtactttggaaaagtgtgtcctcttaggcacccctatgggtctcaaagacaattatgtacccaaggaaaggagttccctgccttag

SEQ ID NO: 367578 - DNA, 438 bp, Homo sapiens
tgtgtaaactcatgtgtgatgtgtagatggtggcgtttcatgtgccttgctggacttttacagacccgatctagtagacatggagagggtgcaaatccaaagtaaccgagagaatctggaacaagcttttgaagtggcagaaagactgggggtcactcgcctgctggatgcagaagatgtggatgtgccatctccagatgaaaagtctgtaatcacttatgtgtcttcgatttatgatgccttccctaaagttcctgagggtggagaagggatcagtgctacggaagtggactccaggtggcaagaataccaaagccgagtggactccctcattccctggatcaaacagcatacaatactgatgtcagataaaacttttccccaaaaccctgttgaactaaaggtaaagtcaaggacttaaatttttttggtaaaatc

SEQ ID NO: 367579 - DNA, 18417 bp, Homo sapiens
  misc_feature (995)..(995): n is a, c, g, or t
  misc_feature (1066)..(1066): n is a, c, g, or t
  misc_feature (1076)..(1076): n is a, c, g, or t
tcaaaacaccatctattaaagctgacaattgtcacaagcagaattgaatactcaaagggaagttaacttcacacagaaaaacacttcatatttcattcaacttgcaacgtatttactgagcgtctaccgtgtgtaaggcagcctgctaggaaatggggtacgaccctcctcctcacagagcttacattctgacaggggaacccgaagtgaacaagcatgatctgcaacaggtatgagatgtcaagaaagcctattacagaggcacccaggcccagtctacggggtcactaaaggctatgggataaactgatctgaaggatgagcacaaatcaatcatcgagaggctgagagcagctcaagtcgggggaataagatgtgcgagaagcaggagagagcaggatgaaataaaatcaggcccgtgtgatgcgtggtgaacagtgagtacccagagaagcgaagctgggggctgaggggctggtcaggaacacgggcttaattcatcaacccaacagcaaacatcagtgcaacaatgtaagcacatttaccttctgggtcataatgtaatttcttccaaagccagtggtggcactcagatatttgatcagaggattgacagattcaggcttttggtggaaaagccatacctggaaaggaaggatgtgtcaatgatttgtttcttctgcccaaggtgagtgaggctggtggagagtcactatctgcactttatagagctccccagacaaattataaacatcctctcaaatatcatcagtgaatggtttggcaaatatattgagaaccaattaaaatatagtttaaaagcacttgcttctacaaccaatttgtattcccacaataaatgtatttatttctgtaacacttaccaaaacaagagcatcaaagccaattccttcacactgccctccctcccacctgctcttcatgaggagtcctttattcctgcatgtttcctgttctttgggccggaattccgnggcgcgatgtcggctcactacaacctctgcctcctggattcaagcaattctgtacctcagcctcccgagtngctgtgattncagatgaacgggaccgggttcagaagaaaacgttcaccaagtgggtcaacaagcacttaatgaaggtccgcaagcacatcaatgatctttatgaagatctgcgggatggccataacctgatctctctgttggaggtcctctcaggcatcaaactgccccgggagaagggcaggatgcgttttcataggctgcagaatgtgcagattgccctggacttcctaaagcagcgacaggtgaaactagtgaatattcgcaatgatgacatcacagatggcaaccccaagttgaccctgggtctgatctggaccattattttgcatttccagatctctgacatctacattagtggagaatcaggggatatgtcagccaaggagaaactactcctgtggacccagaaggtgacagctggttacacaggaatcaaatgcaccaacttttcctcctgctggagtgatgggaagatgttcaatgcactcattcaccgataccgacccgatctagtagacatggagagggtgcaaatccaaagtaaccgagagaatctggaacaagcttttgaagtggcagaaagactgggggtcactcgcctgctggatgcagaagatgtggatgtgccatctccagatgaaaagtctgtaatcacttatgtgtcttcgatttatgatgccttccctaaagttcctgagggtggagaagggatcagtgctacggaagtggactccaggtggcaagaataccaaagccgagtggactccctcattccctggatcaaacagcatacaatactgatgtcagataaaacttttccccaaaaccctgttgaactaaaggcactttataaccaatatatacacttcaaagaaacagaaattctggccaaggagagagaaaaaggaagaattgaggaattatataaattactagaggtgtggattgaatttggccgaattaaactgcctcaaggttatcaccctaatgatgtggaagaagagtggggaaagctcatcatagagatgctggaacgagagaaatcacttcggccggctgtggagaggctggaattgctgctacagattgcaaacaaaatccagaatggtgctttgaactgtgaagaaaaactgacactagctaagaatacactgcaggctgatgctgctcacctggaatcaggacaaccggtacaatgtgagtcagatgtcattatgtacattcaagagtgtgaaggtctcatcaggcagctgcaggtggatctccagatcctgcgggatgagaattactaccagctagaagagctggcttttagggtcatgcgtcttcaggatgagctggtcaccttgcgtctagagtgtacaaacctgtaccggaagggtcatttcacttcacttgaattggttccaccctctactttaaccaccactcatctgaaagcagaacccttaaccaaggcaacccattcttcttctacctcctggttccgaaagcctatgactcgggctgaacttgggccatcagctcctctgaagatgaaggcaatctccgatttgtgtatgaactactgtctttgggtagaagagatgcagatgaaactggagcgagcagagtggggcaatgacctgcctagtgtggagttgcagctagaaacacagcagcacatccatacgagtgtagaagagctgggctcaagtgtcaaggaggccaggttgtatgagggaaagatgtcccagaatttccataccagctatgctgaaactcttggaaagctggagacacagtattgtaaattgaaggaaacttctagcttccggatgaggcaccttcagagcctgcataaatttgtttccagagctacagctgagttgatctggttgaatgagaaggaggaggaggaactagcatatgactggagtgacaacaattccaatatctcagccaagagaaattacttctctgagttgacaatggaactggaggagaaacaggatgtgtttcgttctctacaagatacagcagaactactttcacttgagaaccacccagccaagcagacagtggaggcttacagtgctgctgtccagtcccagttgcagtggatgaagcagctgtgcctgtgtgttgagcagcatgtgaaagagaatactgcttattttcagttcttcagtgatgcacgagagctggagtcattcttgaggaacctccaagattccattaaacgaaaatattcctgtgaccacaacaccagcttatcccgccttgaagacctgctccaggactccatggatgaaaaggagcagcttatacagtccaagagttccgttgccagtctcgttgggagatcaaaaaccatcgttcagctaaaaccacgcagtccagaccatgtgttaaagaacaccatttctgtcaaggctgtctgtgactacaggcagatcgagattactatttgcaaaaatgatgaatgtgtgctagaagataattctcagcggaccaaatggaaagtgatcagccccacagggaacgaggcaatggtgccgtcagtctgcttcctcatccccccacccaataaggatgccattgagatggccagcagggtcgaacaatcttatcagaaggttatggccctttggcatcagctgcatgttaacaccaaaagccttatctcttggaactatctgcgtaaagaccttgaccttgtacagacctggaacctagaaaagcttcgatcctcagcaccaggggagtgccatcagattatgaagaaccttcaggcccactatgaagactttctgcaggatagtcgtgactctgtgctgttctcagtggctgatcgcttgcgcttggaagaggaggtggaagcttgtaaagcccgcttccagcacctgatgaagtccatggagaatgaggacaaagaggagactgtggccaagatgtacatttcagagttgaagaacatccggctacgcctggaggagtatgaacagagggtggtcaaacgaattcagtctctagccagctctaggactgacagagatgcctggcaggacaatgcattaaggattgcagagcaagagcacacccaggaggatttacagcaattgaggtcagacttggatgcagtttctatgaaatgtgacagctttctccatcagtctccatctagttcaagtgtcccaactctgcgctcagaactgaatctgctggtggagaagatggaccatgtctatggtctctctactgtatatctgaataagttaaagacagttgatgttatagtacgtagcatacaggatgctgaactcttggtcaaaggttatgagattaagctgagtcaagaagaagtagtactggcagatctctcagctctggaggcccattggtcgacattacggcactggcttagtgatgtgaaggacaagaattcagtgttttcagtcctggatgaggaaattgccaaggccaaggtagtggcagagcagatgagtcgtctgacaccagagcgaaatctggatttggagcgctatcaggaaaaaggctcccagctgcaggagcgttggcaccgagtcattgcccagctcgagattcgccaatctgagctagaaagtatccaggaagttctgggagattaccgagcctgccatggaactctcatcaagtggattgaggaaaccactgcccagcaggaaatgatgaagccaggccaggcagaggatagcagagtgctttcggagcagctcagccagcagacggccctatttgcagaaattgagagaaatcagacaaaactggatcaatgtcaaaaattttcccagcagtactctactattgtaaaggactatgaattgcaactgatgacatacaaggcctttgtggaatcgcagcagaaatcccctggcaagcgccgtcgcatgctttcctcttcagatgccatcactcaagagttcatggacttaaggactcgctacacggcattggtgactttaacaactcagcacgtgaaatacatcagtgatgcactccggcgtctggaggaggaggagaaagtggtagaagaggagaaacaagaacatgtggagaaggttaaagaacttttgggctgggtgtctaccctagcgaggaatacacaaggaaaagctacctcatccgagaccaaagaatcaacagacattgaaaaagctattttggaacagcaggttctgtcagaagagctgacaacaaagaaagaacaagtctctgaagctattaaaacatcacagatcttcttggccaagcatggtcataagctctcagaaaaagagaagaaacaaatatctgagcaattgaatgccctaaacaaggcttaccatgacctttgtgatggttctgcaaatcagcttcagcagcttcagagccagttggctcaccagacagaacaaaagaccctgcagaaacaacaaaatacctgtcaccagcaactggaggatctttgcagttgggtaggacaggcagaaagagcactggcaggccaccaaggcagaaccacccagcaggatctctctgctttgcagaagaaccaaagtgacttgaaggatttacaggatgacattcagaatcgtgccacctcatttgccactgttgtcaaggacattgaggggttcatggaagagaatcagaccaagctgagcccacgtgagttgacagctcttcgggaaaagcttcatcaggctaaggagcaatatgaggcgctccaggaagagacacgtgtggcccagaaggaactggaggaagcagtgacctccgccttacagcaggagactgaaaagagtaaagcagcaaaggaactggcagagaacaagaagaagatcgatgctctcctggattgggtaacttcagtaggatcatctggtggacagctgctgaccaaccttccaggaatggagcagctctcgggagctagcttggagaaaggagccttggacaccactgatggttacatgggggtgaatcaagccccagagaaactggacaagcaatgtgagatgatgaaggcccgtcaccaagaattgctgtcccagcagcaaaatttcattctggccacccagtcagctcaggccttcttggatcagcatggccacaatctcacacctgaggagcaacagatgctgcaacagaagctgggagagctaaaggaacaatactctacttccctggcccaatcagaggcagaactgaagcaggtgcagacacttcaggatgagttgcagaaatttctgcaggatcataaagagtttgaaagctggttggaacgatccgagaaagagctggagaacatgcataagggaggcagcagccccgagacccttccctccctgctaaagcggcaaggaagcttctcagaggatgtcatttcccacaaaggagacttgagatttgtgactatctcaggacagaaagtcttggacatggaaaacagttttaaggaaggcaaagaaccatcagaaattggaaacttagtaaaggacaagttgaaggatgcaacagaaagatacactgctctccactcaaagtgtacacgattaggatctcacctgaatatgctgttaggccagtatcatcaattccaaaacagtgctgacagcctgcaggcctggatgcaggcttgtgaggccaacgtggagaagctcctctcagatactgttgcctctgaccctggagttctccaggagcagcttgcaacaacaaagcagttgcaggaggaattggctgagcaccaagtacctgtggaaaaactccaaaaagtagctcgtgacataatggaaattgaaggggagccagccccagaccacaggcatgttcaagaaactacagattccatactcagccacttccaaagcctctcctatagcctggctgagcgatcttctctgctgcagaaagcaattgcccaatctcagagtgtccaggaaagcctggagagcctgttgcagtctattggggaagttgaacaaaacctggaagggaagcaggtgtcatcactctcatcaggagtcatccaggaagccttagccacaaatatgaaattgaagcaggacattgctcggcaaaagagcagcttggaggccacccgtgagatggtgacccgattcatggagacagcagacagtactacagcagcagtgctgcagggcaaactggcagaggtgagccagcggttcgaacagctctgtctacagcagcaagaaaaggagagctccctaaagaagcttctaccccaggcagagatgtttgaacacctctctggtaagctgcagcagttcatggaaaacaaaagtcggatgctggcctctggaaatcagccagatcaagatattacacatttcttccaacagatccaggagctcaatttggaaatggaagaccaacaggagaacctagatactcttgagcacctggtcactgaactgagctcttgtggctttgcgctggacttgtgccagcatcaggacagggtacagaatctaagaaaagacttcacagagctacagaagacagttaaagagagagagaaagatgcatcatcttgccaggaacagttggatgaattccggaagctggtcaggaccttccagaaatggttgaaagaaactgaagggagtattccacctacggaaacttctatgagtgctaaagagttagaaaagcagattgaacacctgaagagtctactagatgactgggcaagtaagggaactctggtggaagaaatcaattgcaaaggtacttctttagaaaatctcatcatggaaatcacagcacctgattcccaaggcaagacagatctgacggagatccagtgtgacatgtcagatgtaaacttgaagtatgagaaactagggggagtacttcatgaacgccaggaaagccttcaggctatcctcaacagaatggaggaggttcacaaggaggcaaactctgtgctgcagtggctggaatcaaaagaggaagtcctgaaatccatggatgccatgtcatctccaaccaagacagaaacagtgaaagcccaagctgaatctaacaaggccttcctggctgagttggaacagaattctccaaaaattcaaaaagtaaaggaagccctggctggattactggtgacatatcccaactcacaggaagcagaaaattggaagaaaattcaggaagaactcaattcccgatgggaaagggccactgaggttactgtggctcggcaaaggcagctagaggaatctgcaagtcatctggcctgcttccaggctgcagaatcccagctccggccgtggctgatggagaaagaactgatgatgggagtgctggggcccctgtctattgaccccaacatgttgaatgcacaaaagcaacaggtccagtttatgctaaaggaatttgaagcacgcaggcaacagcatgagcaactgaatgaggcagctcagggcatcctaacaggccctggagatgtctctctgtccaccagccaagtacagaaagaactccagagcatcaatcagaaatgggttgagctgactgacaaactcaactcccgttccagccaaattgaccaagctattgttaagagcacccagtaccaggaactgctccaggacttatcagagaaggtgagggcagttggacaacggctgagtgtccagtcagctatcagcacccaaccagaggctgtaaagcagcaattggaagagaccagtgaaattcgatctgacttggagcagttagaccacgaggttaaggaggctcagacactgtgcgatgaactctcagtgctcattggtgagcagtacctcaaggatgaactgaagaagcgtttggagacagttgccctgcctctccaaggtttagaagaccttgcagccgatcgcattaacagactccaggcagctcttgccagcacccagcagttccagcaaatgtttgatgagttgaggacctggttggatgataaacaaagccagcaagcaaaaaactgcccaatttctgcaaaattggagcggctacagtctcagctacaggagaatgaagagtttcagaaaagtcttaatcaacacagtggctcctatgaggtgattgtggctgaaggggaatctctacttctttctgtacctcctggagaagagaaaaggactctacaaaaccagttggttgagctcaaaaaccattgggaagagcttagtaaaaaaactgcagacagacaatccaggctcaaggattgtatgcagaaagctcagaaatatcagtggcatgtggaagaccttgtgccatggatagaagattgtaaagctaagatgtctgagttgcgagtcactctggatccagtgcagctagagtccagtctcctaagatcaaaggctatgctgaatgaggtggagaagcgccgctccctgctggaaatattgaatagtgctgctgacattctgatcaattcttcagaagcagatgaggatggaatccgggatgagaaggctgggatcaaccagaacatggatgctgttacagaagagctgcaggccaaaacagggtcactcgaagaaatgactcagaggctcagggagttccaggaaagctttaagaatattgaaaagaaggttgaaggagccaaacaccaacttgagatctttgatgctctgggttctcaagcctgtagcaacaagaacctggagaagctaagagctcaacaggaagtgctgcaggccctagagcctcaggtagactatctgaggaactttactcagggtctggtagaagatgccccagatggatctgatgcttctcaacttctccaccaagctgaggtcgcccagcaagagttcctcgaagttaagcaaagagtgaacagtggttgtgtgatgatggaaaacaagctggaggggattggccagtttcactgccgggtccgagagatgttctctcaattggcagacctggatgatgagctagatggcatgggtgctattggcagagacactgatagcctccagtcccaaatcgaggatgtccggctattccttaacaaaattcacgtcctcaaattagacatagaggcctctgaagcagagtgtcgacatatgctagaagaagaggggactctggatttgttaggtctcaaaagggagctagaagccctgaacaaacagtgtggcaaactgacagagagggggaaagctcgtcaggaacagctggaactgacactaggccgtgtagaggacttctacaggaaattgaaaggactcaatgacgcgaccacagcagcagaggaggcagaggccctccagtgggtagtggggaccgaagtggaaatcatcaaccaacaattagcagattttaaaatgtttcagaaagaacaagtggatcctcttcagatgaaattgcagcaggtgaatggacttggccagggattaattcagagtgcaggaaaagactgtgatgtacagggtttagaacatgacatggaagagatcaatgctcgatggaatacattgaataaaaaggtcgcacaaagaattgcacagctacaggaagctttgttgcattgtgggaagtttcaagatgccttggagccattgctcagctggttggcagataccgaggagctcatagccaatcagaaacctccatctgctgagtataaagtggtgaaagcacagatccaagaacagaagttgctccagcggctcctagatgatcgaaaggccacagtagacatgcttcaagcagaaggaggcagaatagcccagtcagcagagctggctgatagagagaaaatcactggacagctggagagtcttgaaagtagatggactgaactactcagtaaggcagcagccaggcaaaaacagctggaagacatcctggttctggccaaacagttccatgagacagctgagcctatttctgacttcttatctgtcacagagaaaaagcttgctaactcagaacctgttggcactcagactgccaaaatacagcagcagatcattcggcacaaggctctggaagaagacatagaaaaccatgcaacagatgtgcaccaggcagtcaaaattgggcagtccctctcctccctgacatctcctgcagaacagggtgtgctgtcagaaaagatagactcattgcaggcccgatacagtgaaattcaagaccgctgttgtcggaaggcagccctacttgaccaagctctgtctaatgctaggctgtttggggaggatgaggtggaggtgctcaactggctggctgaggttgaggacaagctcagttcagtgttcgtaaaggatttcaaacaggatgtcctgcacaggcagcatgctgaccacctggctttaaatgaagaaattgttaatagaaagaagaatgtagatcaagctattaaaaatggtcaggctcttctaaaacaaaccacaggtgaggaggtgttacttatccaggaaaaactagatggtataaagactcgttacgcagacatcacagttactagctccaaggccctcagaactttagagcaagcccggcagctggccaccaagttccagtctacttatgaggaactgaccgggtggctgagggaggtggaggaggagctggcaaccagtggaggacagtctcccacaggggaacagataccccagtttcagcagagacagaaggaattaaagaaggaggtcatggagcacaggctggtgttggacacagtgaatgaggtgagccgtgctctcttagagctggtgccctggagagccagagaagggctggataaacttgtgtccgatgctaacgagcagtacaaactagtcagtgacactattggacaaagggtggatgaaattgatgctgctattcagagatcacaacagtatgagcaagctgccgatgcagaactagcttgggttgctgaaacaaaacggaaactgatggctctgggtccaattcgcctggaacaggaccagaccacagctcagcttcaggtacagaaggctttctccattgacattattcgacacaaagattcaatggatgaactcttcagtcaccgtagtgaaatctttggcacatgtggggaggagcaaaaaactgtattacaggaaaagacagagtctctaatacagcaatatgaagccattagcctactcaattcagagcgttatgcccgcctagagcgggcccaggtcttagtaaaccagttttgggaaacttatgaagagctcagcccctggattgaggaaactcgggcactaatagcacagttaccctctccagccattgatcatgagcagctcaggcagcaacaagaggaaatgaggcaattaagggaatctattgctgaacacaaacctcatattgacaaactactaaagataggcccacaactaaaggaattaaaccctgaggaaggggaaatggtggaagaaaaataccagaaagcagaaaacatgtatgcccaaataaaggaggaggtgcgccagcgagccctggctctggatgaagccgtgtcccagtccacacagattacagagtttcatgataaaattgagcctatgttggagacactggagaatctttcctctcgcctgcgtatgccaccactgatccctgctgaagtagacaagatcagagagtgcatcagtgacaataagagtgccaccgtggagctagaaaaactgcagccatcctttgaggccttgaagcgccgtggagaggagcttattggacgatctcagggagcagacaaggatctggctgcaaaagaaatccaggataaattggatcaaatggtattcttctgggaggacatcaaagctcgggctgaagaacgagaaatcaaatttcttgatgtccttgaattagcagagaagttctggtatgacatggcagctctcctgaccaccatcaaagacacccaggatattgtccatgacttggaaagcccaggcattgatccttccatcatcaaacaacaggttgaagctgctgagactattaaggaagagacagatggtctgcatgaagagctggagtttattcggatccttggagcagatttgatttttgcctgtggagaaactgagaagcctgaagtgaggaagagcattgatgagatgaataatgcttgggagaacttaaacaaaacatggaaagagaggctagaaaaacttgaggatgctatgcaagctgctgtgcagtatcaggacactcttcaggctatgtttgactggctagataacactgtgattaaactctgcaccatgccccctgttggcactgacctcaatactgttaaagatcagttaaatgaaatgaaggagttcaaagtagaagtttaccaacagcaaattgagatggagaagcttaatcaccagggtgaactgatgttaaagaaagctactgatgagacggacagagacattatacgagaaccactgacagaactcaaacacctctgggagaacctgggtgagaaaattgcccaccgacagcacaaactagaaggggctctgttggcccttggtcagttccagcatgccttagaggaactaatgagttggctgactcataccgaagagttgttagatgctcagagaccaataagtggagacccaaaagtcattgaagttgagctcgcaaagcaccatgtcctaaaaaatgatgttttggctcatcaagccacagtggaaacagtcaacaaagctggcaatgagcttcttgaatccagtgctggagatgatgccagcagcttaaggagccgtttggaagccatgaaccaatgctgggagtcagtgttacagaaaacagaggagagggagcagcagcttcagtcaactctgcagcaggcccagggcttccacagtgaaattgaagatttcctcttggaacttactagaatggagagccagctttctgcatctaagcccacaggaggacttcctgaaactgctagggaacagcttgatacacatatggaactctattcccagctgaaagccaaggaagagacttataatcaactacttgacaagggcagactcatgcttctaagccgtgacgactctgggtctggctccaagacagaacagagtgtagcacttttggagcagaagtggcatgtggtcagcagtaagatggaagaaagaaagtcaaagctggaagaggccctcaacttggcaacagaattccagaattccctacaagaatttatcaactggctcactctagcagagcagagtttaaacatcgcttctccaccaagcctgattctaaatactgtcctttcccagatagaagagcacaaggtttttgctaatgaagtaaatgctcatcgagaccagatcattgagctggatcaaactgggaatcaattaaagttccttagccaaaagcaggatgttgttctgatcaagaatttgttggtgagcgtgcagtctcgatgggagaaggttgtccagcgatctattgaaagagggcgatcactagatgatgccaggaagcgggcaaaacaattccatgaagcttggaaaaaactgattgactggctagaagatgcagagagtcacctggactcagaactagagatatccaatgacccagacaaaattaaacttcagctttctaagcataaggagtttcagaagactcttggtggcaagcagcctgtgtatgataccacaattagaactggcagagcactgaaagaaaagactttgcttcccgaagatactcagaaacttgacaatttcctaggagaagtcagagacaaatgggatactgtttgtggcaagtctgtggagcggcagcacaagttggaggaagccctgctcttttcgggtcagttcatggatgctttgcaggcattggttgactggttatacaaggtggagccacagctggctgaggaccagcccgtgcacggggaccttgacctcgtcatgaacctcatggatgcacacaaggttttccagaaggaactgggaaagcgaacaggaaccgttcaggtcctgaagcggtcaggccgagagctgattgagaatagtcgagatgacaccacttgggtaaaaggacagctccaggaactgagcactcgctgggacactgtctgtaaactctctgtttccaaacaaagccggcttgagcaggccttaaaacaagcggaagtgtttcgagacacagtccacatgctgttggagtggctttctgaagcagagcaaacgcttcgctttcggggagcacttcctgatgacacagaggccctgcagtctctcattgacacccataaggaattcatgaagaaagtagaagaaaagcgagtggacgttaactcagcagtagccatgggagaagtcatcctggctgtctgccaccccgattgcatcacaaccatcaaacactggatcaccatcatccgagctcgcttcgaggaggtcctgacatgggctaagcagcaccagcagcgtcttgaaacggccttgtcagaactggtggctaatgctgagctcctggaagaacttctggcatggatccagtgggctgagaccaccctcattcagcgggatcaggagccaatcccgcagaacattgaccgagttaaagcccttatcgctgagcatcagacatttatggaggagatgactcgcaaacagcctgacgtggaccgggtcaccaagacatacaaaaggaaaaacatagagcctactcacgcgcctttcatagagaaatcccgcagcggaggcaggaaatccctaagtcagccaacccctcctcccatgccaatcctttcacagtctgaagcaaaaaacccacggatcaaccagctttctgcccgctggcagcaggtgtggctgttagcactggagcggcaaaggaaactgaatgatgccttggatcggctggaggagttgaaagaatttgccaactttgactttgatgtctggaggaaaaagtatatgcgttggatgaatcacaaaaagtctcgagtgatggatttcttccggcgcattgataaggaccaggatgggaagataacacgtcaggagtttatcgatggcattttagcatccaagttccccaccaccaagttagagatgactgctgtggctgacattttcgaccgagatggggatggttacattgattattatgaatttgtggctgctcttcatcccaacaaggatgcgtatcgaccaacaaccgatgcagataaaatcgaagatgaggttacaagacaagtggctcagtgcaaatgtgcaaaaaggtttcaggtggagcagatcggagagaataaataccggtttggggattctcagcagttgcggctggtccgtattctgcgcagcaccgtgatggttcgcgttggtggaggatggatggccttggatgaatttttagtgaaaaatgatccctgccgagcacgaggtagaactaacattgaacttagagagaaattcatcctaccagagggagcatcccagggaatgacccccttccgctcacggggtcgaaggtccaaaccatcttcccgggcagcttcccctactcgttccagctccagtgctagtcagagtaaccacagctgtacatccatgccatcttctccagccaccccagccagtggaaccaaggttatcccatcatcaggtagcaagttgaaacgaccaacaccaacttttcattctagtcggacatcccttgctggtgataccagcaatagttcttccccggcctccacaggtgccaaaactaatcgggcagaccctaaaaagtctgccagtcgccctgggagtcgggctgggagtcgagccgggagtcgagccagcagccggcgaggaagtgacgcttctgactttgacctcttagagacgcagtctgcttgttccgacacttcagaaagcagcgctgcagggggccaaggcaactccaggagagggctaaacaaaccttccaaaatcccaaccatgtctaagaagaccaccactgcctcccccaggactccaggtcccaagcgataacactgtctaagcacccccaagccactatccactttgaatcctgctccatacattgggtgtatatttattctgaacgggagaagttatattgttaaaagtgtaaaagaataattgtgttatgaagctgccttattttttttctttttgtaagttactattttcatgtgaatatttatgtagataaaatttgcctcctggtaaccctgtaatggatggggcccagaaatgaaatatttgagaaaaacaagtgaaaaggtcaagatacaaatgtgtattaaaaaaaaaaaagcctattaatagggtttctgcgcggtgcagggttgtaaacctgctttatcttttaggattattcctaaatgcatcttctttataaacttgacttgctatctcagcaagataaattatattaaaaaaataagaatcctgcagtgtttaaggaactctttttttgtaaatcacggacacctcaattagcaagaactgaggggagggctttttccattgtttaatgttttgtgatttttagctaaagagagggaacctcatctaagtaacatttgcacatgatacagcaaaaggagttcattgcaatactgtctttggatattgtttcagtactgggtgtttaaaggacaaatagctgctagaattcaggggtaaatgtaagtgttcagaaaacgtcagaacatttggggttttaaactgatttgttgctccctatccagcctagacaccagtaactcttgtgttcaccaggacccagacccttggcaagggataggctcgttggtgacattgtgaatttcagatttgttttatccactttttttgctatttatttaaatggtcgatcaacttcccacaaactgaggaatgaattccacgagcctgttctgaaaatgtggacgtaagacaaacacgtgctcgtcctttaatggagttcaccagcacacttgttaaccagtcctgtttgctttcgtctttttttgtgcgtaataaagtcaactgaccaagtgaccatgaaaaggggctgtctggggctcctgttttttagctgctgttcttcagctccgaccatgttgctgtgtgattatctcaattggttttaattgaggcagaaactgaagctctaccaatgaactgtttagaaacaagacacacttttgtattaaaattgcttgcagtaacaaatattttgtatttcctgattttcttttcaactattaccttatctataaatgttaccctggggtataatcatgttgtaggtacttaaatgcattccgcaaatcaaaatatcttgatggataaattatagagcttaatag

SEQ ID NO: 367580 - DNA, 18112 bp, Homo sapiens
  misc_feature (995)..(995): n is a, c, g, or t
  misc_feature (1066)..(1066): n is a, c, g, or t
  misc_feature (1076)..(1076): n is a, c, g, or t
tcaaaacaccatctattaaagctgacaattgtcacaagcagaattgaatactcaaagggaagttaacttcacacagaaaaacacttcatatttcattcaacttgcaacgtatttactgagcgtctaccgtgtgtaaggcagcctgctaggaaatggggtacgaccctcctcctcacagagcttacattctgacaggggaacccgaagtgaacaagcatgatctgcaacaggtatgagatgtcaagaaagcctattacagaggcacccaggcccagtctacggggtcactaaaggctatgggataaactgatctgaaggatgagcacaaatcaatcatcgagaggctgagagcagctcaagtcgggggaataagatgtgcgagaagcaggagagagcaggatgaaataaaatcaggcccgtgtgatgcgtggtgaacagtgagtacccagagaagcgaagctgggggctgaggggctggtcaggaacacgggcttaattcatcaacccaacagcaaacatcagtgcaacaatgtaagcacatttaccttctgggtcataatgtaatttcttccaaagccagtggtggcactcagatatttgatcagaggattgacagattcaggcttttggtggaaaagccatacctggaaaggaaggatgtgtcaatgatttgtttcttctgcccaaggtgagtgaggctggtggagagtcactatctgcactttatagagctccccagacaaattataaacatcctctcaaatatcatcagtgaatggtttggcaaatatattgagaaccaattaaaatatagtttaaaagcacttgcttctacaaccaatttgtattcccacaataaatgtatttatttctgtaacacttaccaaaacaagagcatcaaagccaattccttcacactgccctccctcccacctgctcttcatgaggagtcctttattcctgcatgtttcctgttctttgggccggaattccgnggcgcgatgtcggctcactacaacctctgcctcctggattcaagcaattctgtacctcagcctcccgagtngctgtgattncagatgaacgggaccgggttcagaagaaaacgttcaccaagtgggtcaacaagcacttaatgaaggtccgcaagcacatcaatgatctttatgaagatctgcgggatggccataacctgatctctctgttggaggtcctctcaggcatcaaactgccccgggagaagggcaggatgcgttttcataggctgcagaatgtgcagattgccctggacttcctaaagcagcgacaggtgaaactagtgaatattcgcaatgatgacatcacagatggcaaccccaagttgaccctgggtctgatctggaccattattttgcatttccagatctctgacatctacattagtggagaatcaggggatatgtcagccaaggagaaactactcctgtggacccagaaggtgacagctggttacacaggaatcaaatgcaccaacttttcctcctgctggagtgatgggaagatgttcaatgcactcattcaccgataccgacccgatctagtagacatggagagggtgcaaatccaaagtaaccgagagaatctggaacaagcttttgaagtggcagaaagactgggggtcactcgcctgctggatgcagaagatgtggatgtgccatctccagatgaaaagtctgtaatcacttatgtgtcttcgatttatgatgccttccctaaagttcctgagggtggagaagggatcagtgctacggaagtggactccaggtggcaagaataccaaagccgagtggactccctcattccctggatcaaacagcatacaatactgatgtcagataaaacttttccccaaaaccctgttgaactaaaggcactttataaccaatatatacacttcaaagaaacagaaattctggccaaggagagagaaaaaggaagaattgaggaattatataaattactagaggtgtggattgaatttggccgaattaaactgcctcaaggttatcaccctaatgatgtggaagaagagtggggaaagctcatcatagagatgctggaacgagagaaatcacttcggccggctgtggagaggctggaattgctgctacagattgcaaacaaaatccagaatggtgctttgaactgtgaagaaaaactgacactagctaagaatacactgcaggctgatgctgctcacctggaatcaggacaaccggtacaatgtgagtcagatgtcattatgtacattcaagagtgtgaaggtctcatcaggcagctgcaggtggatctccagatcctgcgggatgagaattactaccagctagaagagctggcttttagggtcatgcgtcttcaggatgagctggtcaccttgcgtctagagtgtacaaacctgtaccggaagggtcatttcacttcacttgaattggttccaccctctactttaaccaccactcatctgaaagcagaacccttaaccaaggcaacccattcttcttctacctcctggttccgaaagcctatgactcgggctgaacttgggccatcagctcctctgaagatgaaggcaatctccgatttgtgtatgaactactgtctttgggtagaagagatgcagatgaaactggagcgagcagagtggggcaatgacctgcctagtgtggagttgcagctagaaacacagcagcacatccatacgagtgtagaagagctgggctcaagtgtcaaggaggccaggttgtatgagggaaagatgtcccagaatttccataccagctatgctgaaactcttggaaagctggagacacagtattgtaaattgaaggaaacttctagcttccggatgaggcaccttcagagcctgcataaatttgtttccagagctacagctgagttgatctggttgaatgagaaggaggaggaggaactagcatatgactggagtgacaacaattccaatatctcagccaagagaaattacttctctgagttgacaatggaactggaggagaaacaggatgtgtttcgttctctacaagatacagcagaactactttcacttgagaaccacccagccaagcagacagtggaggcttacagtgctgctgtccagtcccagttgcagtggatgaagcagctgtgcctgtgtgttgagcagcatgtgaaagagaatactgcttattttcagttcttcagtgatgcacgagagctggagtcattcttgaggaacctccaagattccattaaacgaaaatattcctgtgaccacaacaccagcttatcccgccttgaagacctgctccaggactccatggatgaaaaggagcagcttatacagtccaagagttccgttgccagtctcgttgggagatcaaaaaccatcgttcagctaaaaccacgcagtccagaccatgtgttaaagaacaccatttctgtcaaggctgtctgtgactacaggcagatcgagattactatttgcaaaaatgatgaatgtgtgctagaagataattctcagcggaccaaatggaaagtgatcagccccacagggaacgaggcaatggtgccgtcagtctgcttcctcatccccccacccaataaggatgccattgagatggccagcagggtcgaacaatcttatcagaaggttatggccctttggcatcagctgcatgttaacaccaaaagccttatctcttggaactatctgcgtaaagaccttgaccttgtacagacctggaacctagaaaagcttcgatcctcagcaccaggggagtgccatcagattatgaagaaccttcaggcccactatgaagactttctgcaggatagtcgtgactctgtgctgttctcagtggctgatcgcttgcgcttggaagaggaggtggaagcttgtaaagcccgcttccagcacctgatgaagtccatggagaatgaggacaaagaggagactgtggccaagatgtacatttcagagttgaagaacatccggctacgcctggaggagtatgaacagagggtggtcaaacgaattcagtctctagccagctctaggactgacagagatgcctggcaggacaatgcattaaggattgcagagcaagagcacacccaggaggatttacagcaattgaggtcagacttggatgcagtttctatgaaatgtgacagctttctccatcagtctccatctagttcaagtgtcccaactctgcgctcagaactgaatctgctggtggagaagatggaccatgtctatggtctctctactgtatatctgaataagttaaagacagttgatgttatagtacgtagcatacaggatgctgaactcttggtcaaaggttatgagattaagctgagtcaagaagaagtagtactggcagatctctcagctctggaggcccattggtcgacattacggcactggcttagtgatgtgaaggacaagaattcagtgttttcagtcctggatgaggaaattgccaaggccaaggtagtggcagagcagatgagtcgtctgacaccagagcgaaatctggatttggagcgctatcaggaaaaaggctcccagctgcaggagcgttggcaccgagtcattgcccagctcgagattcgccaatctgagctagaaagtatccaggaagttctgggagattaccgagcctgccatggaactctcatcaagtggattgaggaaaccactgcccagcaggaaatgatgaagccaggccaggcagaggatagcagagtgctttcggagcagctcagccagcagacggccctatttgcagaaattgagagaaatcagacaaaactggatcaatgtcaaaaattttcccagcagtactctactattgtaaaggactatgaattgcaactgatgacatacaaggcctttgtggaatcgcagcagaaatcccctggcaagcgccgtcgcatgctttcctcttcagatgccatcactcaagagttcatggacttaaggactcgctacacggcattggtgactttaacaactcagcacgtgaaatacatcagtgatgcactccggcgtctggaggaggaggagaaagtggtagaagaggagaaacaagaacatgtggagaaggttaaagaacttttgggctgggtgtctaccctagcgaggaatacacaaggaaaagctacctcatccgagaccaaagaatcaacagacattgaaaaagctattttggaacagcaggttctgtcagaagagctgacaacaaagaaagaacaagtctctgaagctattaaaacatcacagatcttcttggccaagcatggtcataagctctcagaaaaagagaagaaacaaatatctgagcaattgaatgccctaaacaaggcttaccatgacctttgtgatggttctgcaaatcagcttcagcagcttcagagccagttggctcaccagacagaacaaaagaccctgcagaaacaacaaaatacctgtcaccagcaactggaggatctttgcagttgggtaggacaggcagaaagagcactggcaggccaccaaggcagaaccacccagcaggatctctctgctttgcagaagaaccaaagtgacttgaaggatttacaggatgacattcagaatcgtgccacctcatttgccactgttgtcaaggacattgaggggttcatggaagagaatcagaccaagctgagcccacgtgagttgacagctcttcgggaaaagcttcatcaggctaaggagcaatatgaggcgctccaggaagagacacgtgtggcccagaaggaactggaggaagcagtgacctccgccttacagcaggagactgaaaagagtaaagcagcaaaggaactggcagagaacaagaagaagatcgatgctctcctggattgggtaacttcagtaggatcatctggtggacagctgctgaccaaccttccaggaatggagcagctctcgggagctagcttggagaaaggagccttggacaccactgatggttacatgggggtgaatcaagccccagagaaactggacaagcaatgtgagatgatgaaggcccgtcaccaagaattgctgtcccagcagcaaaatttcattctggccacccagtcagctcaggccttcttggatcagcatggccacaatctcacacctgaggagcaacagatgctgcaacagaagctgggagagctaaaggaacaatactctacttccctggcccaatcagaggcagaactgaagcaggtgcagacacttcaggatgagttgcagaaatttctgcaggatcataaagagtttgaaagctggttggaacgatccgagaaagagctggagaacatgcataagggaggcagcagccccgagacccttccctccctgctaaagcggcaaggaagcttctcagaggatgtcatttcccacaaaggagacttgagatttgtgactatctcaggacagaaagtcttggacatggaaaacagttttaaggaaggcaaagaaccatcagaaattggaaacttagtaaaggacaagttgaaggatgcaacagaaagatacactgctctccactcaaagtgtacacgattaggatctcacctgaatatgctgttaggccagtatcatcaattccaaaacagtgctgacagcctgcaggcctggatgcaggcttgtgaggccaacgtggagaagctcctctcagatactgttgcctctgaccctggagttctccaggagcagcttgcaacaacaaagcagttgcaggaggaattggctgagcaccaagtacctgtggaaaaactccaaaaagtagctcgtgacataatggaaattgaaggggagccagccccagaccacaggcatgttcaagaaactacagattccatactcagccacttccaaagcctctcctatagcctggctgagcgatcttctctgctgcagaaagcaattgcccaatctcagagtgtccaggaaagcctggagagcctgttgcagtctattggggaagttgaacaaaacctggaagggaagcaggtgtcatcactctcatcaggagtcatccaggaagccttagccacaaatatgaaattgaagcaggacattgctcggcaaaagagcagcttggaggccacccgtgagatggtgacccgattcatggagacagcagacagtactacagcagcagtgctgcagggcaaactggcagaggtgagccagcggttcgaacagctctgtctacagcagcaagaaaaggagagctccctaaagaagcttctaccccaggcagagatgtttgaacacctctctggtaagctgcagcagttcatggaaaacaaaagtcggatgctggcctctggaaatcagccagatcaagatattacacatttcttccaacagatccaggagctcaatttggaaatggaagaccaacaggagaacctagatactcttgagcacctggtcactgaactgagctcttgtggctttgcgctggacttgtgccagcatcaggacagggtacagaatctaagaaaagacttcacagagctacagaagacagttaaagagagagagaaagatgcatcatcttgccaggaacagttggatgaattccggaagctggtcaggaccttccagaaatggttgaaagaaactgaagggagtattccacctacggaaacttctatgagtgctaaagagttagaaaagcagattgaacacctgaagagtctactagatgactgggcaagtaagggaactctggtggaagaaatcaattgcaaaggtacttctttagaaaatctcatcatggaaatcacagcacctgattcccaaggcaagacagatctgacggagatccagtgtgacatgtcagatgtaaacttgaagtatgagaaactagggggagtacttcatgaacgccaggaaagccttcaggctatcctcaacagaatggaggaggttcacaaggaggcaaactctgtgctgcagtggctggaatcaaaagaggaagtcctgaaatccatggatgccatgtcatctccaaccaagacagaaacagtgaaagcccaagctgaatctaacaaggccttcctggctgagttggaacagaattctccaaaaattcaaaaagtaaaggaagccctggctggattactggtgacatatcccaactcacaggaagcagaaaattggaagaaaattcaggaagaactcaattcccgatgggaaagggccactgaggttactgtggctcggcaaaggcagctagaggaatctgcaagtcatctggcctgcttccaggctgcagaatcccagctccggccgtggctgatggagaaagaactgatgatgggagtgctggggcccctgtctattgaccccaacatgttgaatgcacaaaagcaacaggtccagtttatgctaaaggaatttgaagcacgcaggcaacagcatgagcaactgaatgaggcagctcagggcatcctaacaggccctggagatgtctctctgtccaccagccaagtacagaaagaactccagagcatcaatcagaaatgggttgagctgactgacaaactcaactcccgttccagccaaattgaccaagctattgttaagagcacccagtaccaggaactgctccaggacttatcagagaaggtgagggcagttggacaacggctgagtgtccagtcagctatcagcacccaaccagaggctgtaaagcagcaattggaagagaccagtgaaattcgatctgacttggagcagttagaccacgaggttaaggaggctcagacactgtgcgatgaactctcagtgctcattggtgagcagtacctcaaggatgaactgaagaagcgtttggagacagttgccctgcctctccaaggtttagaagaccttgcagccgatcgcattaacagactccaggcagctcttgccagcacccagcagttccagcaaatgtttgatgagttgaggacctggttggatgataaacaaagccagcaagcaaaaaactgcccaatttctgcaaaattggagcggctacagtctcagctacaggagaatgaagagtttcagaaaagtcttaatcaacacagtggctcctatgaggtgattgtggctgaaggggaatctctacttctttctgtacctcctggagaagagaaaaggactctacaaaaccagttggttgagctcaaaaaccattgggaagagcttagtaaaaaaactgcagacagacaatccaggctcaaggattgtatgcagaaagctcagaaatatcagtggcatgtggaagaccttgtgccatggatagaagattgtaaagctaagatgtctgagttgcgagtcactctggatccagtgcagctagagtccagtctcctaagatcaaaggctatgctgaatgaggtggagaagcgccgctccctgctggaaatattgaatagtgctgctgacattctgatcaattcttcagaagcagatgaggatggaatccgggatgagaaggctgggatcaaccagaacatggatgctgttacagaagagctgcaggccaaaacagggtcactcgaagaaatgactcagaggctcagggagttccaggaaagctttaagaatattgaaaagaaggttgaaggagccaaacaccaacttgagatctttgatgctctgggttctcaagcctgtagcaacaagaacctggagaagctaagagctcaacaggaagtgctgcaggccctagagcctcaggtagactatctgaggaactttactcagggtctggtagaagatgccccagatggatctgatgcttctcaacttctccaccaagctgaggtcgcccagcaagagttcctcgaagttaagcaaagagtgaacagtggttgtgtgatgatggaaaacaagctggaggggattggccagtttcactgccgggtccgagagatgttctctcaattggcagacctggatgatgagctagatggcatgggtgctattggcagagacactgatagcctccagtcccaaatcgaggatgtccggctattccttaacaaaattcacgtcctcaaattagacatagaggcctctgaagcagagtgtcgacatatgctagaagaagaggggactctggatttgttaggtctcaaaagggagctagaagccctgaacaaacagtgtggcaaactgacagagagggggaaagctcgtcaggaacagctggaactgacactaggccgtgtagaggacttctacaggaaattgaaaggactcaatgacgcgaccacagcagcagaggaggcagaggccctccagtgggtagtggggaccgaagtggaaatcatcaaccaacaattagcagattttaaaatgtttcagaaagaacaagtggatcctcttcagatgaaattgcagcaggtgaatggacttggccagggattaattcagagtgcaggaaaagactgtgatgtacagggtttagaacatgacatggaagagatcaatgctcgatggaatacattgaataaaaaggtcgcacaaagaattgcacagctacaggaagctttgttgcattgtgggaagtttcaagatgccttggagccattgctcagctggttggcagataccgaggagctcatagccaatcagaaacctccatctgctgagtataaagtggtgaaagcacagatccaagaacagaagttgctccagcggctcctagatgatcgaaaggccacagtagacatgcttcaagcagaaggaggcagaatagcccagtcagcagagctggctgatagagagaaaatcactggacagctggagagtcttgaaagtagatggactgaactactcagtaaggcagcagccaggcaaaaacagctggaagacatcctggttctggccaaacagttccatgagacagctgagcctatttctgacttcttatctgtcacagagaaaaagcttgctaactcagaacctgttggcactcagactgccaaaatacagcagcagatcattcggcacaaggctctggaagaagacatagaaaaccatgcaacagatgtgcaccaggcagtcaaaattgggcagtccctctcctccctgacatctcctgcagaacagggtgtgctgtcagaaaagatagactcattgcaggcccgatacagtgaaattcaagaccgctgttgtcggaaggcagccctacttgaccaagctctgtctaatgctaggctgtttggggaggatgaggtggaggtgctcaactggctggctgaggttgaggacaagctcagttcagtgttcgtaaaggatttcaaacaggatgtcctgcacaggcagcatgctgaccacctggctttaaatgaagaaattgttaatagaaagaagaatgtagatcaagctattaaaaatggtcaggctcttctaaaacaaaccacaggtgaggaggtgttacttatccaggaaaaactagatggtataaagactcgttacgcagacatcacagttactagctccaaggccctcagaactttagagcaagcccggcagctggccaccaagttccagtctacttatgaggaactgaccgggtggctgagggaggtggaggaggagctggcaaccagtggaggacagtctcccacaggggaacagataccccagtttcagcagagacagaaggaattaaagaaggaggtcatggagcacaggctggtgttggacacagtgaatgaggtgagccgtgctctcttagagctggtgccctggagagccagagaagggctggataaacttgtgtccgatgctaacgagcagtacaaactagtcagtgacactattggacaaagggtggatgaaattgatgctgctattcagagatcacaacagtatgagcaagctgccgatgcagaactagcttgggttgctgaaacaaaacggaaactgatggctctgggtccaattcgcctggaacaggaccagaccacagctcagcttcaggtacagaaggctttctccattgacattattcgacacaaagattcaatggatgaactcttcagtcaccgtagtgaaatctttggcacatgtggggaggagcaaaaaactgtattacaggaaaagacagagtctctaatacagcaatatgaagccattagcctactcaattcagagcgttatgcccgcctagagcgggcccaggtcttagtaaaccagttttgggaaacttatgaagagctcagcccctggattgaggaaactcgggcactaatagcacagttaccctctccagccattgatcatgagcagctcaggcagcaacaagaggaaatgaggcaattaagggaatctattgctgaacacaaacctcatattgacaaactactaaagataggcccacaactaaaggaattaaaccctgaggaaggggaaatggtggaagaaaaataccagaaagcagaaaacatgtatgcccaaataaaggaggaggtgcgccagcgagccctggctctggatgaagccgtgtcccagtccacacagattacagagtttcatgataaaattgagcctatgttggagacactggagaatctttcctctcgcctgcgtatgccaccactgatccctgctgaagtagacaagatcagagagtgcatcagtgacaataagagtgccaccgtggagctagaaaaactgcagccatcctttgaggccttgaagcgccgtggagaggagcttattggacgatctcagggagcagacaaggatctggctgcaaaagaaatccaggataaattggatcaaatggtattcttctgggaggacatcaaagctcgggctgaagaacgagaaatcaaatttcttgatgtccttgaattagcagagaagttctggtatgacatggcagctctcctgaccaccatcaaagacacccaggatattgtccatgacttggaaagcccaggcattgatccttccatcatcaaacaacaggttgaagctgctgagactattaaggaagagacagatggtctgcatgaagagctggagtttattcggatccttggagcagatttgatttttgcctgtggagaaactgagaagcctgaagtgaggaagagcattgatgagatgaataatgcttgggagaacttaaacaaaacatggaaagagaggctagaaaaacttgaggatgctatgcaagctgctgtgcagtatcaggacactcttcaggctatgtttgactggctagataacactgtgattaaactctgcaccatgccccctgttggcactgacctcaatactgttaaagatcagttaaatgaaatgaaggagttcaaagtagaagtttaccaacagcaaattgagatggagaagcttaatcaccagggtgaactgatgttaaagaaagctactgatgagacggacagagacattatacgagaaccactgacagaactcaaacacctctgggagaacctgggtgagaaaattgcccaccgacagcacaaactagaaggggctctgttggcccttggtcagttccagcatgccttagaggaactaatgagttggctgactcataccgaagagttgttagatgctcagagaccaataagtggagacccaaaagtcattgaagttgagctcgcaaagcaccatgtcctaaaaaatgatgttttggctcatcaagccacagtggaaacagtcaacaaagctggcaatgagcttcttgaatccagtgctggagatgatgccagcagcttaaggagccgtttggaagccatgaaccaatgctgggagtcagtgttacagaaaacagaggagagggagcagcagcttcagtcaactctgcagcaggcccagggcttccacagtgaaattgaagatttcctcttggaacttactagaatggagagccagctttctgcatctaagcccacaggaggacttcctgaaactgctagggaacagcttgatacacatatggaactctattcccagctgaaagccaaggaagagacttataatcaactacttgacaagggcagactcatgcttctaagccgtgacgactctgggtctggctccaagacagaacagagtgtagcacttttggagcagaagtggcatgtggtcagcagtaagatggaagaaagaaagtcaaagctggaagaggccctcaacttggcaacagaattccagaattccctacaagaatttatcaactggctcactctagcagagcagagtttaaacatcgcttctccaccaagcctgattctaaatactgtcctttcccagatagaagagcacaaggtttttgctaatgaagtaaatgctcatcgagaccagatcattgagctggatcaaactgggaatcaattaaagttccttagccaaaagcaggatgttgttctgatcaagaatttgttggtgagcgtgcagtctcgatgggagaaggttgtccagcgatctattgaaagagggcgatcactagatgatgccaggaagcgggcaaaacaattccatgaagcttggaaaaaactgattgactggctagaagatgcagagagtcacctggactcagaactagagatatccaatgacccagacaaaattaaacttcagctttctaagcataaggagtttcagaagactcttggtggcaagcagcctgtgtatgataccacaattagaactggcagagcactgaaagaaaagactttgcttcccgaagatactcagaaacttgacaatttcctaggagaagtcagagacaaatgggatactgtttgtggcaagtctgtggagcggcagcacaagttggaggaagccctgctcttttcgggtcagttcatggatgctttgcaggcattggttgactggttatacaaggtggagccacagctggctgaggaccagcccgtgcacggggaccttgacctcgtcatgaacctcatggatgcacacaaggttttccagaaggaactgggaaagcgaacaggaaccgttcaggtcctgaagcggtcaggccgagagctgattgagaatagtcgagatgacaccacttgggtaaaaggacagctccaggaactgagcactcgctgggacactgtctgtaaactctctgtttccaaacaaagccggcttgagcaggccttaaaacaagcggaagtgtttcgagacacagtccacatgctgttggagtggctttctgaagcagagcaaacgcttcgctttcggggagcacttcctgatgacacagaggccctgcagtctctcattgacacccataaggaattcatgaagaaagtagaagaaaagcgagtggacgttaactcagcagtagccatgggagaagtcatcctggctgtctgccaccccgattgcatcacaaccatcaaacactggatcaccatcatccgagctcgcttcgaggaggtcctgacatgggctaagcagcaccagcagcgtcttgaaacggccttgtcagaactggtggctaatgctgagctcctggaagaacttctggcatggatccagtgggctgagaccaccctcattcagcgggatcaggagccaatcccgcagaacattgaccgagttaaagcccttatcgctgagcatcagacatttatggaggagatgactcgcaaacagcctgacgtggaccgggtcaccaagacatacaaaaggaaaaacatagagcctactcacgcgcctttcatagagaaatcccgcagcggaggcaggaaatccctaagtcagccaacccctcctcccatgccaatcctttcacagtctgaagcaaaaaacccacggatcaaccagctttctgcccgctggcagcaggtgtggctgttagcactggagcggcaaaggaaactgaatgatgccttggatcggctggaggagttgaaagaatttgccaactttgactttgatgtctggaggaaaaagtatatgcgttggatgaatcacaaaaagtctcgagtgatggatttcttccggcgcattgataaggaccaggatgggaagataacacgtcaggagtttatcgatggcattttagcatccaagttccccaccaccaagttagagatgactgctgtggctgacattttcgaccgagatggggatggttacattgattattatgaatttgtggctgctcttcatcccaacaaggatgcgtatcgaccaacaaccgatgcagataaaatcgaagatgaggttacaagacaagtggctcagtgcaaatgtgcaaaaaggtttcaggtggagcagatcggagagaataaataccggtttggggattctcagcagttgcggctggtccgtattctgcgcagcaccgtgatggttcgcgttggtggaggatggatggccttggatgaatttttagtgaaaaatgatccctgccgagcacgaggtagaactaacattgaacttagagagaaattcatcctaccagagggagcatcccagggaatgacccccttccgctcacggggtcgaaggtccaaaccatcttcccgggcagcttcccctactcgttccagctccagtgctagtcagagtaaccacagctgtacatccatgccatcttctccagccaccccagccagtggaaccaaggttatcccatcatcaggtagcaagttgaaacgaccaacaccaacttttcattctagtcggacatcccttgctggtgataccagcaatagttcttccccggcctccacaggtgccaaaactaatcgggcagaccctaaaaagtctgccagtcgccctgggagtcgggctgggagtcgagccgggagtcgagccagcagccggcgaggaagtgacgcttctgactttgacctcttagagacgcagtctgcttgttccgacacttcagaaagcagcgctgcagggggccaaggcaactccaggagagggctaaacaaaccttccaaaatcccaaccatgtctaagaagaccaccactgcctcccccaggactccaggtcccaagcgataacactgtctaagcacccccaagccactatccactttgaatcctgctccatacattgggtgtatatttattctgaacgggagaagttatattgttaaaagtgtaaaagaataattgtgttatgaagctgccttattttttttctttttgtaagttactattttcatgtgaatatttatgtagataaaatttgcctcctggtaaccctgtaatggatggggcccagaaatgaaatatttgagaaaaacaagtgaaaaggtcaagatacaaatgtgtattaaaaaaaaaaaagcctattaatagggtttctgcgcggtgcagggttgtaaacctgctttatcttttaggattattcctaaatgcatcttctttataaacttgacttgctatctcagcaagataaattatattaaaaaaataagaatcctgcagtgtttaaggaactctttttttgtaaatcacggacacctcaattagcaagaactgaggggagggctttttccattgtttaatgttttgtgatttttagctaaagagagggaacctcatctaagtaacatttgcacatgatacagcaaaaggagttcattgcaatactgtctttggatattgtttcagtactgggtgtttaaaggacaaatagctgctagaattcaggggtaaatgtaagtgttcagaaaacgtcagaacatttggggttttaaactgatttgttgctccctatccagcctagacaccagtaactcttgtgttcaccaggacccagacccttggcaagggataggctcgttggtgacattgtgaatttcagatttgttttatccactttttttgctatttatttaaatggtcgatcaacttcccacaaactgaggaatgaattccacgagcctgttctgaaaatgtggacgtaagacaaacacgtgctcgtcctttaatggagttcaccagcacacttgttaaccagtcctgtttgctttcgtctttttttgtgcgtaataaagtcaactgaccaagtgaccatga

SEQ ID NO: 367581 - DNA, 15239 bp, Homo sapiens
  misc_feature (71)..(71): n is a, c, g, or t
  misc_feature (99)..(99): n is a, c, g, or t
  misc_feature (102)..(102): n is a, c, g, or t
  misc_feature (130)..(130): n is a, c, g, or t
  misc_feature (2198)..(2198): n is a, c, g, or t
ggggggggggggatgggagaaggaagaggggggggggaaagggagggagaggaaggggggggggggggggntttaaaagggggagggggggtaaagaanaanaaaggggggggggggggggggggggggnaaaccaagcaaaaaagagcagggaaatttccttaaaggaatttgggtgcaaggatcaacgtaagccaagaatgtcttcagatgctaaagaatttatcagtatcataaatcctcataatcttaaaggtaaatccttgggccaagtgtcattgacacacccttactctgaatgtgattttaaacttaaagaagtggctagaaataacatgggaaatgatacaaatgaagagcaggaaaaagcagtgacaaaaatagaaattatttctcatatgaagcagtctacctcatgtctagattctgaagaaataagagaaaatcaaggggaagtgattttggaagtacaagaaacatattgtgaaacgtcaggcaaattgccgagtgagcaggttttgcagcaaccaatgaatgctcgggtgaaaagtaagagagagaagagggaggtgattgtagaagaaagtatcagaacatgcaaaccagcatttctttctgaagaaaagttgtatcaggaaactgccattagagatgagcatgactcccatataaagagccaacctagggaaatgacctcaagtgaaaaagggaaagaagctgatacagaaatgggattttctattacttttaaaattgaagagtcctcttcccaagtggtacctcaaggaatttctgtaaaacatttagatgctttaacactcttcagctctaaacaggccaatgaaggaaaagtaaacaatttaagtctctgcttgactttaaaaccagaagaaaacttatctcgagaaattgcctgtggggcccagagtgaaccattcccttgtatgaccccaagacctgaaggattgcactaccaggaatcagatggaaaagcccaagtgacaggcccatcccaaatttccaaaacagacaagtctttccaaggaaccaccagacaggagaccaactatcaagattcctgggttacttcgaaaactaaggaaaccaaacatcaaatttcctcatctaatgaatgtaaagaaaagtcataccaagaagtatcttttgacccagcaagaggtcttaaattggaagaaatcacagtttctagaccagattcaaaagaagtcaggtatctagaattctcagacagaaaagaccttcatcatcagggcagcaaaagtgatgataaactttgtggaactctcaaatctgaaatagcaacacaggaactaactggagagaaatttctagaaatggcaaaccctaatgttgcaggtctagaagcaggatccattgaggacatagtgactcagagaggttccagagtcttgggatcctttcttccagagaaactgttcaaaggagtgtctcaaaaagagaatacagggcaacagaatgccatcattagtcctactgttctagagaccagtgaagaaaagacagtgtccctaacagtatgctctgcagtgaagacagagaagacaccacaggaaaagctcagagaaagccctggcagtgaacaaactcccttcatgactgcacctgaaggaaagggaaatggaggtgtaaacccagagcccttcagagcaactcagaatgtatttacccggcaactctgtttagaacatgatgaaaagctagtatcctatctgtctctgttacggaacattgaaatgaggaccaaacagattcaacctttggagctaaacctggcagaactacaggatctgctgtgtcaggccaaggtattagaaagggagttaaaggatctgaccaccttggtcagtcaggagctggagtgtgtgaatcagattatcatcagccagcctcaagaagttcctgctcaactgttgaaggctctagagaaagatgccaagaatcttcagaagtctctcagctctgtgagtgacacttggaattccaggctactccacttccagaatgctgtggaaatagaaaagactaaagtgttaaatcagcacacacagctagaaggccgacttcaagatctgagagcctgggttggcaataaaaatcttattctgaacagcaagggatctaacagtgaaatagatgttgacagcctgaacctctgnctccaacagtatgaggatttgaaacagcccatggctgaaaggaaagctcagctggatgctcttgcttttgatattcagttctttatctcagaacatgcccaggacttgtcccctcagcagaatcgacagatgctgaggcttctgaatgaactgcagaggtccttccaggacattttggaacagactgcagctcaggtggatgccttgcagggccatcttcaacaaatggagcaggaagccctggtgaagaccctgcagaaacaacaaaatacctgtcaccagcaactggaggatctttgcagttgggtaggacaggcagaaagagcactggcaggccaccaaggcagaaccacccagcaggatctctctgctttgcagaagaaccaaagtgacttgaaggatttacaggatgacattcagaatcgtgccacctcatttgccactgttgtcaaggacattgaggggttcatggaagagaatcagaccaagctgagcccacgtgagttgacagctcttcgggaaaagcttcatcaggctaaggagcaatatgaggcgctccaggaagagacacgtgtggcccagaaggaactggaggaagcagtgacctccgccttacagcaggagactgaaaagagtaaagcagcaaaggaactggcagagaacaagaagaagatcgatgctctcctggattgggtaacttcagtaggatcatctggtggacagctgctgaccaaccttccaggaatggagcagctctcgggagctagcttggagaaaggagccttggacaccactgatggttacatgggggtgaatcaagccccagagaaactggacaagcaatgtgagatgatgaaggcccgtcaccaagaattgctgtcccagcagcaaaatttcattctggccacccagtcagctcaggccttcttggatcagcatggccacaatctcacacctgaggagcaacagatgctgcaacagaagctgggagagctaaaggaacaatactctacttccctggcccaatcagaggcagaactgaagcaggtgcagacacttcaggatgagttgcagaaatttctgcaggatcataaagagtttgaaagctggttggaacgatccgagaaagagctggagaacatgcataagggaggcagcagccccgagacccttccctccctgctaaagcggcaaggaagcttctcagaggatgtcatttcccacaaaggagacttgagatttgtgactatctcaggacagaaagtcttggacatggaaaacagttttaaggaaggcaaagaaccatcagaaattggaaacttagtaaaggacaagttgaaggatgcaacagaaagatacactgctctccactcaaagtgtacacgattaggatctcacctgaatatgctgttaggccagtatcatcaattccaaaacagtgctgacagcctgcaggcctggatgcaggcttgtgaggccaacgtggagaagctcctctcagatactgttgcctctgaccctggagttctccaggagcagcttgcaacaacaaagcagttgcaggaggaattggctgagcaccaagtacctgtggaaaaactccaaaaagtagctcgtgacataatggaaattgaaggggagccagccccagaccacaggcatgttcaagaaactacagattccatactcagccacttccaaagcctctcctatagcctggctgagcgatcttctctgctgcagaaagcaattgcccaatctcagagtgtccaggaaagcctggagagcctgttgcagtctattggggaagttgaacaaaacctggaagggaagcaggtgtcatcactctcatcaggagtcatccaggaagccttagccacaaatatgaaattgaagcaggacattgctcggcaaaagagcagcttggaggccacccgtgagatggtgacccgattcatggagacagcagacagtactacagcagcagtgctgcagggcaaactggcagaggtgagccagcggttcgaacagctctgtctacagcagcaagaaaaggagagctccctaaagaagcttctaccccaggcagagatgtttgaacacctctctggtaagctgcagcagttcatggaaaacaaaagtcggatgctggcctctggaaatcagccagatcaagatattacacatttcttccaacagatccaggagctcaatttggaaatggaagaccaacaggagaacctagatactcttgagcacctggtcactgaactgagctcttgtggctttgcgctggacttgtgccagcatcaggacagggtacagaatctaagaaaagacttcacagagctacagaagacagttaaagagagagagaaagatgcatcatcttgccaggaacagttggatgaattccggaagctggtcaggaccttccagaaatggttgaaagaaactgaagggagtattccacctacggaaacttctatgagtgctaaagagttagaaaagcagattgaacacctgaagagtctactagatgactgggcaagtaagggaactctggtggaagaaatcaattgcaaaggtacttctttagaaaatctcatcatggaaatcacagcacctgattcccaaggcaagacagatctgacggagatccagtgtgacatgtcagatgtaaacttgaagtatgagaaactagggggagtacttcatgaacgccaggaaagccttcaggctatcctcaacagaatggaggaggttcacaaggaggcaaactctgtgctgcagtggctggaatcaaaagaggaagtcctgaaatccatggatgccatgtcatctccaaccaagacagaaacagtgaaagcccaagctgaatctaacaaggccttcctggctgagttggaacagaattctccaaaaattcaaaaagtaaaggaagccctggctggattactggtgacatatcccaactcacaggaagcagaaaattggaagaaaattcaggaagaactcaattcccgatgggaaagggccactgaggttactgtggctcggcaaaggcagctagaggaatctgcaagtcatctggcctgcttccaggctgcagaatcccagctccggccgtggctgatggagaaagaactgatgatgggagtgctggggcccctgtctattgaccccaacatgttgaatgcacaaaagcaacaggtccagtttatgctaaaggaatttgaagcacgcaggcaacagcatgagcaactgaatgaggcagctcagggcatcctaacaggccctggagatgtctctctgtccaccagccaagtacagaaagaactccagagcatcaatcagaaatgggttgagctgactgacaaactcaactcccgttccagccaaattgaccaagctattgttaagagcacccagtaccaggaactgctccaggacttatcagagaaggtgagggcagttggacaacggctgagtgtccagtcagctatcagcacccaaccagaggctgtaaagcagcaattggaagagaccagtgaaattcgatctgacttggagcagttagaccacgaggttaaggaggctcagacactgtgcgatgaactctcagtgctcattggtgagcagtacctcaaggatgaactgaagaagcgtttggagacagttgccctgcctctccaaggtttagaagaccttgcagccgatcgcattaacagactccaggcagctcttgccagcacccagcagttccagcaaatgtttgatgagttgaggacctggttggatgataaacaaagccagcaagcaaaaaactgcccaatttctgcaaaattggagcggctacagtctcagctacaggagaatgaagagtttcagaaaagtcttaatcaacacagtggctcctatgaggtgattgtggctgaaggggaatctctacttctttctgtacctcctggagaagagaaaaggactctacaaaaccagttggttgagctcaaaaaccattgggaagagcttagtaaaaaaactgcagacagacaatccaggctcaaggattgtatgcagaaagctcagaaatatcagtggcatgtggaagaccttgtgccatggatagaagattgtaaagctaagatgtctgagttgcgagtcactctggatccagtgcagctagagtccagtctcctaagatcaaaggctatgctgaatgaggtggagaagcgccgctccctgctggaaatattgaatagtgctgctgacattctgatcaattcttcagaagcagatgaggatggaatccgggatgagaaggctgggatcaaccagaacatggatgctgttacagaagagctgcaggccaaaacagggtcactcgaagaaatgactcagaggctcagggagttccaggaaagctttaagaatattgaaaagaaggttgaaggagccaaacaccaacttgagatctttgatgctctgggttctcaagcctgtagcaacaagaacctggagaagctaagagctcaacaggaagtgctgcaggccctagagcctcaggtagactatctgaggaactttactcagggtctggtagaagatgccccagatggatctgatgcttctcaacttctccaccaagctgaggtcgcccagcaagagttcctcgaagttaagcaaagagtgaacagtggttgtgtgatgatggaaaacaagctggaggggattggccagtttcactgccgggtccgagagatgttctctcaattggcagacctggatgatgagctagatggcatgggtgctattggcagagacactgatagcctccagtcccaaatcgaggatgtccggctattccttaacaaaattcacgtcctcaaattagacatagaggcctctgaagcagagtgtcgacatatgctagaagaagaggggactctggatttgttaggtctcaaaagggagctagaagccctgaacaaacagtgtggcaaactgacagagagggggaaagctcgtcaggaacagctggaactgacactaggccgtgtagaggacttctacaggaaattgaaaggactcaatgacgcgaccacagcagcagaggaggcagaggccctccagtgggtagtggggaccgaagtggaaatcatcaaccaacaattagcagattttaaaatgtttcagaaagaacaagtggatcctcttcagatgaaattgcagcaggtgaatggacttggccagggattaattcagagtgcaggaaaagactgtgatgtacagggtttagaacatgacatggaagagatcaatgctcgatggaatacattgaataaaaaggtcgcacaaagaattgcacagctacaggaagctttgttgcattgtgggaagtttcaagatgccttggagccattgctcagctggttggcagataccgaggagctcatagccaatcagaaacctccatctgctgagtataaagtggtgaaagcacagatccaagaacagaagttgctccagcggctcctagatgatcgaaaggccacagtagacatgcttcaagcagaaggaggcagaatagcccagtcagcagagctggctgatagagagaaaatcactggacagctggagagtcttgaaagtagatggactgaactactcagtaaggcagcagccaggcaaaaacagctggaagacatcctggttctggccaaacagttccatgagacagctgagcctatttctgacttcttatctgtcacagagaaaaagcttgctaactcagaacctgttggcactcagactgccaaaatacagcagcagatcattcggcacaaggctctggaagaagacatagaaaaccatgcaacagatgtgcaccaggcagtcaaaattgggcagtccctctcctccctgacatctcctgcagaacagggtgtgctgtcagaaaagatagactcattgcaggcccgatacagtgaaattcaagaccgctgttgtcggaaggcagccctacttgaccaagctctgtctaatgctaggctgtttggggaggatgaggtggaggtgctcaactggctggctgaggttgaggacaagctcagttcagtgttcgtaaaggatttcaaacaggatgtcctgcacaggcagcatgctgaccacctggctttaaatgaagaaattgttaatagaaagaagaatgtagatcaagctattaaaaatggtcaggctcttctaaaacaaaccacaggtgaggaggtgttacttatccaggaaaaactagatggtataaagactcgttacgcagacatcacagttactagctccaaggccctcagaactttagagcaagcccggcagctggccaccaagttccagtctacttatgaggaactgaccgggtggctgagggaggtggaggaggagctggcaaccagtggaggacagtctcccacaggggaacagataccccagtttcagcagagacagaaggaattaaagaaggaggtcatggagcacaggctggtgttggacacagtgaatgaggtgagccgtgctctcttagagctggtgccctggagagccagagaagggctggataaacttgtgtccgatgctaacgagcagtacaaactagtcagtgacactattggacaaagggtggatgaaattgatgctgctattcagagatcacaacagtatgagcaagctgccgatgcagaactagcttgggttgctgaaacaaaacggaaactgatggctctgggtccaattcgcctggaacaggaccagaccacagctcagcttcaggtacagaaggctttctccattgacattattcgacacaaagattcaatggatgaactcttcagtcaccgtagtgaaatctttggcacatgtggggaggagcaaaaaactgtattacaggaaaagacagagtctctaatacagcaatatgaagccattagcctactcaattcagagcgttatgcccgcctagagcgggcccaggtcttagtaaaccagttttgggaaacttatgaagagctcagcccctggattgaggaaactcgggcactaatagcacagttaccctctccagccattgatcatgagcagctcaggcagcaacaagaggaaatgaggcaattaagggaatctattgctgaacacaaacctcatattgacaaactactaaagataggcccacaactaaaggaattaaaccctgaggaaggggaaatggtggaagaaaaataccagaaagcagaaaacatgtatgcccaaataaaggaggaggtgcgccagcgagccctggctctggatgaagccgtgtcccagtccacacagattacagagtttcatgataaaattgagcctatgttggagacactggagaatctttcctctcgcctgcgtatgccaccactgatccctgctgaagtagacaagatcagagagtgcatcagtgacaataagagtgccaccgtggagctagaaaaactgcagccatcctttgaggccttgaagcgccgtggagaggagcttattggacgatctcagggagcagacaaggatctggctgcaaaagaaatccaggataaattggatcaaatggtattcttctgggaggacatcaaagctcgggctgaagaacgagaaatcaaatttcttgatgtccttgaattagcagagaagttctggtatgacatggcagctctcctgaccaccatcaaagacacccaggatattgtccatgacttggaaagcccaggcattgatccttccatcatcaaacaacaggttgaagctgctgagactattaaggaagagacagatggtctgcatgaagagctggagtttattcggatccttggagcagatttgatttttgcctgtggagaaactgagaagcctgaagtgaggaagagcattgatgagatgaataatgcttgggagaacttaaacaaaacatggaaagagaggctagaaaaacttgaggatgctatgcaagctgctgtgcagtatcaggacactcttcaggctatgtttgactggctagataacactgtgattaaactctgcaccatgccccctgttggcactgacctcaatactgttaaagatcagttaaatgaaatgaaggagttcaaagtagaagtttaccaacagcaaattgagatggagaagcttaatcaccagggtgaactgatgttaaagaaagctactgatgagacggacagagacattatacgagaaccactgacagaactcaaacacctctgggagaacctgggtgagaaaattgcccaccgacagcacaaactagaaggggctctgttggcccttggtcagttccagcatgccttagaggaactaatgagttggctgactcataccgaagagttgttagatgctcagagaccaataagtggagacccaaaagtcattgaagttgagctcgcaaagcaccatgtcctaaaaaatgatgttttggctcatcaagccacagtggaaacagtcaacaaagctggcaatgagcttcttgaatccagtgctggagatgatgccagcagcttaaggagccgtttggaagccatgaaccaatgctgggagtcagtgttacagaaaacagaggagagggagcagcagcttcagtcaactctgcagcaggcccagggcttccacagtgaaattgaagatttcctcttggaacttactagaatggagagccagctttctgcatctaagcccacaggaggacttcctgaaactgctagggaacagcttgatacacatatggaactctattcccagctgaaagccaaggaagagacttataatcaactacttgacaagggcagactcatgcttctaagccgtgacgactctgggtctggctccaagacagaacagagtgtagcacttttggagcagaagtggcatgtggtcagcagtaagatggaagaaagaaagtcaaagctggaagaggccctcaacttggcaacagaattccagaattccctacaagaatttatcaactggctcactctagcagagcagagtttaaacatcgcttctccaccaagcctgattctaaatactgtcctttcccagatagaagagcacaaggtttttgctaatgaagtaaatgctcatcgagaccagatcattgagctggatcaaactgggaatcaattaaagttccttagccaaaagcaggatgttgttctgatcaagaatttgttggtgagcgtgcagtctcgatgggagaaggttgtccagcgatctattgaaagagggcgatcactagatgatgccaggaagcgggcaaaacaattccatgaagcttggaaaaaactgattgactggctagaagatgcagagagtcacctggactcagaactagagatatccaatgacccagacaaaattaaacttcagctttctaagcataaggagtttcagaagactcttggtggcaagcagcctgtgtatgataccacaattagaactggcagagcactgaaagaaaagactttgcttcccgaagatactcagaaacttgacaatttcctaggagaagtcagagacaaatgggatactgtttgtggcaagtctgtggagcggcagcacaagttggaggaagccctgctcttttcgggtcagttcatggatgctttgcaggcattggttgactggttatacaaggtggagccacagctggctgaggaccagcccgtgcacggggaccttgacctcgtcatgaacctcatggatgcacacaaggttttccagaaggaactgggaaagcgaacaggaaccgttcaggtcctgaagcggtcaggccgagagctgattgagaatagtcgagatgacaccacttgggtaaaaggacagctccaggaactgagcactcgctgggacactgtctgtaaactctctgtttccaaacaaagccggcttgagcaggccttaaaacaagcggaagtgtttcgagacacagtccacatgctgttggagtggctttctgaagcagagcaaacgcttcgctttcggggagcacttcctgatgacacagaggccctgcagtctctcattgacacccataaggaattcatgaagaaagtagaagaaaagcgagtggacgttaactcagcagtagccatgggagaagtcatcctggctgtctgccaccccgattgcatcacaaccatcaaacactggatcaccatcatccgagctcgcttcgaggaggtcctgacatgggctaagcagcaccagcagcgtcttgaaacggccttgtcagaactggtggctaatgctgagctcctggaagaacttctggcatggatccagtgggctgagaccaccctcattcagcgggatcaggagccaatcccgcagaacattgaccgagttaaagcccttatcgctgagcatcagacatttatggaggagatgactcgcaaacagcctgacgtggaccgggtcaccaagacatacaaaaggaaaaacatagagcctactcacgcgcctttcatagagaaatcccgcagcggaggcaggaaatccctaagtcagccaacccctcctcccatgccaatcctttcacagtctgaagcaaaaaacccacggatcaaccagctttctgcccgctggcagcaggtgtggctgttagcactggagcggcaaaggaaactgaatgatgccttggatcggctggaggagttgaaagaatttgccaactttgactttgatgtctggaggaaaaagtatatgcgttggatgaatcacaaaaagtctcgagtgatggatttcttccggcgcattgataaggaccaggatgggaagataacacgtcaggagtttatcgatggcattttagcatccaagttccccaccaccaagttagagatgactgctgtggctgacattttcgaccgagatggggatggttacattgattattatgaatttgtggctgctcttcatcccaacaaggatgcgtatcgaccaacaaccgatgcagataaaatcgaagatgaggttacaagacaagtggctcagtgcaaatgtgcaaaaaggtttcaggtggagcagatcggagagaataaataccggtttggggattctcagcagttgcggctggtccgtattctgcgcagcaccgtgatggttcgcgttggtggaggatggatggccttggatgaatttttagtgaaaaatgatccctgccgagcacgaggtagaactaacattgaacttagagagaaattcatcctaccagagggagcatcccagggaatgacccccttccgctcacggggtcgaaggtccaaaccatcttcccgggcagcttcccctactcgttccagctccagtgctagtcagagtaaccacagctgtacatccatgccatcttctccagccaccccagccagtggaaccaaggttatcccatcatcaggtagcaagttgaaacgaccaacaccaacttttcattctagtcggacatcccttgctggtgataccagcaatagttcttccccggcctccacaggtgccaaaactaatcgggcagaccctaaaaagtctgccagtcgccctgggagtcgggctgggagtcgagccgggagtcgagccagcagccggcgaggaagtgacgcttctgactttgacctcttagagacgcagtctgcttgttccgacacttcagaaagcagcgctgcagggggccaaggcaactccaggagagggctaaacaaaccttccaaaatcccaaccatgtctaagaagaccaccactgcctcccccaggactccaggtcccaagcgataacactgtctaagcacccccaagccactatccactttgaatcctgctccatacattgggtgtatatttattctgaacgggagaagttatattgttaaaagtgtaaaagaataattgtgttatgaagctgccttattttttttctttttgtaagttactattttcatgtgaatatttatgtagataaaatttgcctcctggtaaccctgtaatggatggggcccagaaatgaaatatttgagaaaaacaagtgaaaaggtcaagatacaaatgtgtattaaaaaaaaaaaagcctattaatagggtttctgcgcggtgcagggttgtaaacctgctttatcttttaggattattcctaaatgcatcttctttataaacttgacttgctatctcagcaagataaattatattaaaaaaataagaatcctgcagtgtttaaggaactctttttttgtaaatcacggacacctcaattagcaagaactgaggggagggctttttccattgtttaatgttttgtgatttttagctaaagagagggaacctcatctaagtaacatttgcacatgatacagcaaaaggagttcattgcaatactgtctttggatattgtttcagtactgggtgtttaaaggacaaatagctgctagaattcaggggtaaatgtaagtgttcagaaaacgtcagaacatttggggttttaaactgatttgttgctccctatccagcctagacaccagtaactcttgtgttcaccaggacccagacccttggcaagggataggctcgttggtgacattgtgaatttcagatttgttttatccactttttttgctatttatttaaatggtcgatcaacttcccacaaactgaggaatgaattccacgagcctgttctgaaaatgtggacgtaagacaaacacgtgctcgtcctttaatggagttcaccagcacacttgttaaccagtcctgtttgctttcgtctttttttgtgcgtaataaagtcaactgaccaagtgaccatgaaaaggggctgtctggggctcctgttttttagctgctgttcttcagctccgaccatgttgctgtgtgattatctcaattggttttaattgaggcagaaactgaagctctaccaatgaactgtttagaaacaagacacacttttgtattaaaattgcttgcagtaacaaa

SEQ ID NO: 367582 - DNA, 6533 bp, Homo sapiens
  misc_feature (29)..(29): n is a, c, g, or t
cgttatagaggatcccggatacccatttnttggacacagtgaatgaggtgagccgtgctctcttagagctggtgccctggagagccagagaagggctggataaacttgtgtccgatgctaacgagcagtacaaactagtcagtgacactattggacaaagggtggatgaaattgatgctgctattcagagatcacaacagtatgagcaagctgccgatgcagaactagcttgggttgctgaaacaaaacggaaactgatggctctgggtccaattcgcctggaacaggaccagaccacagctcagcttcaggtacagaaggctttctccattgacattattcgacacaaagattcaatggatgaactcttcagtcaccgtagtgaaatctttggcacatgtggggaggagcaaaaaactgtattacaggaaaagacagagtctctaatacagcaatatgaagccattagcctactcaattcagagcgttatgcccgcctagagcgggcccaggtcttagtaaaccagttttgggaaacttatgaagagctcagcccctggattgaggaaactcgggcactaatagcacagttaccctctccagccattgatcatgagcagctcaggcagcaacaagaggaaatgaggcaattaagggaatctattgctgaacacaaacctcatattgacaaactactaaagataggcccacaactaaaggaattaaaccctgaggaaggggaaatggtggaagaaaaataccagaaagcagaaaacatgtatgcccaaataaaggaggaggtgcgccagcgagccctggctctggatgaagccgtgtcccagtccacacagattacagagtttcatgataaaattgagcctatgttggagacactggagaatctttcctctcgcctgcgtatgccaccactgatccctgctgaagtagacaagatcagagagtgcatcagtgacaataagagtgccaccgtggagctagaaaaactgcagccatcctttgaggccttgaagcgccgtggagaggagcttattggacgatctcagggagcagacaaggatctggctgcaaaagaaatccaggataaattggatcaaatggtattcttctgggaggacatcaaagctcgggctgaagaacgagaaatcaaatttcttgatgtccttgaattagcagagaagttctggtatgacatggcagctctcctgaccaccatcaaagacacccaggatattgtccatgacttggaaagcccaggcattgatccttccatcatcaaacaacaggttgaagctgctgagactattaaggaagagacagatggtctgcatgaagagctggagtttattcggatccttggagcagatttgatttttgcctgtggagaaactgagaagcctgaagtgaggaagagcattgatgagatgaataatgcttgggagaacttaaacaaaacatggaaagagaggctagaaaaacttgaggatgctatgcaagctgctgtgcagtatcaggacactcttcaggctatgtttgactggctagataacactgtgattaaactctgcaccatgccccctgttggcactgacctcaatactgttaaagatcagttaaatgaaatgaaggagttcaaagtagaagtttaccaacagcaaattgagatggagaagcttaatcaccagggtgaactgatgttaaagaaagctactgatgagacggacagagacattatacgagaaccactgacagaactcaaacacctctgggagaacctgggtgagaaaattgcccaccgacagcacaaactagaaggggctctgttggcccttggtcagttccagcatgccttagaggaactaatgagttggctgactcataccgaagagttgttagatgctcagagaccaataagtggagacccaaaagtcattgaagttgagctcgcaaagcaccatgtcctaaaaaatgatgttttggctcatcaagccacagtggaaacagtcaacaaagctggcaatgagcttcttgaatccagtgctggagatgatgccagcagcttaaggagccgtttggaagccatgaaccaatgctgggagtcagtgttacagaaaacagaggagagggagcagcagcttcagtcaactctgcagcaggcccagggcttccacagtgaaattgaagatttcctcttggaacttactagaatggagagccagctttctgcatctaagcccacaggaggacttcctgaaactgctagggaacagcttgatacacatatggaactctattcccagctgaaagccaaggaagagacttataatcaactacttgacaagggcagactcatgcttctaagccgtgacgactctgggtctggctccaagacagaacagagtgtagcacttttggagcagaagtggcatgtggtcagcagtaagatggaagaaagaaagtcaaagctggaagaggccctcaacttggcaacagaattccagaattccctacaagaatttatcaactggctcactctagcagagcagagtttaaacatcgcttctccaccaagcctgattctaaatactgtcctttcccagatagaagagcacaaggtttttgctaatgaagtaaatgctcatcgagaccagatcattgagctggatcaaactgggaatcaattaaagttccttagccaaaagcaggatgttgttctgatcaagaatttgttggtgagcgtgcagtctcgatgggagaaggttgtccagcgatctattgaaagagggcgatcactagatgatgccaggaagcgggcaaaacaattccatgaagcttggaaaaaactgattgactggctagaagatgcagagagtcacctggactcagaactagagatatccaatgacccagacaaaattaaacttcagctttctaagcataaggagtttcagaagactcttggtggcaagcagcctgtgtatgataccacaattagaactggcagagcactgaaagaaaagactttgcttcccgaagatactcagaaacttgacaatttcctaggagaagtcagagacaaatgggatactgtttgtggcaagtctgtggagcggcagcacaagttggaggaagccctgctcttttcgggtcagttcatggatgctttgcaggcattggttgactggttatacaaggtggagccacagctggctgaggaccagcccgtgcacggggaccttgacctcgtcatgaacctcatggatgcacacaaggttttccagaaggaactgggaaagcgaacaggaaccgttcaggtcctgaagcggtcaggccgagagctgattgagaatagtcgagatgacaccacttgggtaaaaggacagctccaggaactgagcactcgctgggacactgtctgtaaactctctgtttccaaacaaagccggcttgagcaggccttaaaacaagcggaagtgtttcgagacacagtccacatgctgttggagtggctttctgaagcagagcaaacgcttcgctttcggggagcacttcctgatgacacagaggccctgcagtctctcattgacacccataaggaattcatgaagaaagtagaagaaaagcgagtggacgttaactcagcagtagccatgggagaagtcatcctggctgtctgccaccccgattgcatcacaaccatcaaacactggatcaccatcatccgagctcgcttcgaggaggtcctgacatgggctaagcagcaccagcagcgtcttgaaacggccttgtcagaactggtggctaatgctgagctcctggaagaacttctggcatggatccagtgggctgagaccaccctcattcagcgggatcaggagccaatcccgcagaacattgaccgagttaaagcccttatcgctgagcatcagacatttatggaggagatgactcgcaaacagcctgacgtggaccgggtcaccaagacatacaaaaggaaaaacatagagcctactcacgcgcctttcatagagaaatcccgcagcggaggcaggaaatccctaagtcagccaacccctcctcccatgccaatcctttcacagtctgaagcaaaaaacccacggatcaaccagctttctgcccgctggcagcaggtgtggctgttagcactggagcggcaaaggaaactgaatgatgccttggatcggctggaggagttgaaagaatttgccaactttgactttgatgtctggaggaaaaagtatatgcgttggatgaatcacaaaaagtctcgagtgatggatttcttccggcgcattgataaggaccaggatgggaagataacacgtcaggagtttatcgatggcattttagcatccaagttccccaccaccaagttagagatgactgctgtggctgacattttcgaccgagatggggatggttacattgattattatgaatttgtggctgctcttcatcccaacaaggatgcgtatcgaccaacaaccgatgcagataaaatcgaagatgaggttacaagacaagtggctcagtgcaaatgtgcaaaaaggtttcaggtggagcagatcggagagaataaataccggtttggggattctcagcagttgcggctggtccgtattctgcgcagcaccgtgatggttcgcgttggtggaggatggatggccttggatgaatttttagtgaaaaatgatccctgccgagcacgaggtagaactaacattgaacttagagagaaattcatcctaccagagggagcatcccagggaatgacccccttccgctcacggggtcgaaggtccaaaccatcttcccgggcagcttcccctactcgttccagctccagtgctagtcagagtaaccacagctgtacatccatgccatcttctccagccaccccagccagtggaaccaaggttatcccatcatcaggtagcaagttgaaacgaccaacaccaacttttcattctagtcggacatcccttgctggtgataccagcaatagttcttccccggcctccacaggtgccaaaactaatcgggcagaccctaaaaagtctgccagtcgccctgggagtcgggctgggagtcgagccgggagtcgagccagcagccggcgaggaagtgacgcttctgactttgacctcttagagacgcagtctgcttgttccgacacttcagaaagcagcgctgcagggggccaaggcaactccaggagagggctaaacaaaccttccaaaatcccaaccatgtctaagaagaccaccactgcctcccccaggactccaggtcccaagcgataacactgtctaagcacccccaagccactatccactttgaatcctgctccatacattgggtgtatatttattctgaacgggagaagttatattgttaaaagtgtaaaagaataattgtgttatgaagctgccttattttttttctttttgtaagttactattttcatgtgaatatttatgtagataaaatttgcctcctggtaaccctgtaatggatggggcccagaaatgaaatatttgagaaaaacaagtgaaaaggtcaagatacaaatgtgtattaaaaaaaaaaaagcctattaatagggtttctgcgcggtgcagggttgtaaacctgctttatcttttaggattattcctaaatgcatcttctttataaacttgacttgctatctcagcaagataaattatattaaaaaaataagaatcctgcagtgtttaaggaactctttttttgtaaatcacggacacctcaattagcaagaactgaggggagggctttttccattgtttaatgttttgtgatttttagctaaagagagggaacctcatctaagtaacatttgcacatgatacagcaaaaggagttcattgcaatactgtctttggatattgtttcagtactgggtgtttaaaggacaaatagctgctagaattcaggggtaaatgtaagtgttcagaaaacgtcagaacatttggggttttaaactgatttgttgctccctatccagcctagacaccagtaactcttgtgttcaccaggacccagacccttggcaagggataggctcgttggtgacattgtgaatttcagatttgttttatccactttttttgctatttatttaaatggtcgatcaacttcccacaaactgaggaatgaattccacgagcctgttctgaaaatgtggacgtaagacaaacacgtgctcgtcctttaatggagttcaccagcacacttgttaaccagtcctgtttgctttcgtctttttttgtgcgtaataaagtcaactgaccaagtgaccatgaaaaggggctgtctggggctcctgttttttagctgctgttcttcagctccgaccatgttgctgtgtgattatctcaattggttttaattgaggcagaaactgaagctctaccaatgaactgtttagaaacaagacacacttttgtattaaaattgcttgcagtaacaaa

SEQ ID NO: 367583 - DNA, 18300 bp, Homo sapiens
  misc_feature (995)..(995): n is a, c, g, or t
  misc_feature (1066)..(1066): n is a, c, g, or t
  misc_feature (1076)..(1076): n is a, c, g, or t
tcaaaacaccatctattaaagctgacaattgtcacaagcagaattgaatactcaaagggaagttaacttcacacagaaaaacacttcatatttcattcaacttgcaacgtatttactgagcgtctaccgtgtgtaaggcagcctgctaggaaatggggtacgaccctcctcctcacagagcttacattctgacaggggaacccgaagtgaacaagcatgatctgcaacaggtatgagatgtcaagaaagcctattacagaggcacccaggcccagtctacggggtcactaaaggctatgggataaactgatctgaaggatgagcacaaatcaatcatcgagaggctgagagcagctcaagtcgggggaataagatgtgcgagaagcaggagagagcaggatgaaataaaatcaggcccgtgtgatgcgtggtgaacagtgagtacccagagaagcgaagctgggggctgaggggctggtcaggaacacgggcttaattcatcaacccaacagcaaacatcagtgcaacaatgtaagcacatttaccttctgggtcataatgtaatttcttccaaagccagtggtggcactcagatatttgatcagaggattgacagattcaggcttttggtggaaaagccatacctggaaaggaaggatgtgtcaatgatttgtttcttctgcccaaggtgagtgaggctggtggagagtcactatctgcactttatagagctccccagacaaattataaacatcctctcaaatatcatcagtgaatggtttggcaaatatattgagaaccaattaaaatatagtttaaaagcacttgcttctacaaccaatttgtattcccacaataaatgtatttatttctgtaacacttaccaaaacaagagcatcaaagccaattccttcacactgccctccctcccacctgctcttcatgaggagtcctttattcctgcatgtttcctgttctttgggccggaattccgnggcgcgatgtcggctcactacaacctctgcctcctggattcaagcaattctgtacctcagcctcccgagtngctgtgattncagatgaacgggaccgggttcagaagaaaacgttcaccaagtgggtcaacaagcacttaatgaaggtccgcaagcacatcaatgatctttatgaagatctgcgggatggccataacctgatctctctgttggaggtcctctcaggcatcaaactgccccgggagaagggcaggatgcgttttcataggctgcagaatgtgcagattgccctggacttcctaaagcagcgacaggtgaaactagtgaatattcgcaatgatgacatcacagatggcaaccccaagttgaccctgggtctgatctggaccattattttgcatttccagatctctgacatctacattagtggagaatcaggggatatgtcagccaaggagaaactactcctgtggacccagaaggtgacagctggttacacaggaatcaaatgcaccaacttttcctcctgctggagtgatgggaagatgttcaatgcactcattcaccgataccgacccgatctagtagacatggagagggtgcaaatccaaagtaaccgagagaatctggaacaagcttttgaagtggcagaaagactgggggtcactcgcctgctggatgcagaagatgtggatgtgccatctccagatgaaaagtctgtaatcacttatgtgtcttcgatttatgatgccttccctaaagttcctgagggtggagaagggatcagtgctacggaagtggactccaggtggcaagaataccaaagccgagtggactccctcattccctggatcaaacagcatacaatactgatgtcagataaaacttttccccaaaaccctgttgaactaaaggcactttataaccaatatatacacttcaaagaaacagaaattctggccaaggagagagaaaaaggaagaattgaggaattatataaattactagaggtgtggattgaatttggccgaattaaactgcctcaaggttatcaccctaatgatgtggaagaagagtggggaaagctcatcatagagatgctggaacgagagaaatcacttcggccggctgtggagaggctggaattgctgctacagattgcaaacaaaatccagaatggtgctttgaactgtgaagaaaaactgacactagctaagaatacactgcaggctgatgctgctcacctggaatcaggacaaccggtacaatgtgagtcagatgtcattatgtacattcaagagtgtgaaggtctcatcaggcagctgcaggtggatctccagatcctgcgggatgagaattactaccagctagaagagctggcttttagggtcatgcgtcttcaggatgagctggtcaccttgcgtctagagtgtacaaacctgtaccggaagggtcatttcacttcacttgaattggttccaccctctactttaaccaccactcatctgaaagcagaacccttaaccaaggcaacccattcttcttctacctcctggttccgaaagcctatgactcgggctgaacttgggccatcagctcctctgaagatgaaggcaatctccgatttgtgtatgaactactgtctttgggtagaagagatgcagatgaaactggagcgagcagagtggggcaatgacctgcctagtgtggagttgcagctagaaacacagcagcacatccatacgagtgtagaagagctgggctcaagtgtcaaggaggccaggttgtatgagggaaagatgtcccagaatttccataccagctatgctgaaactcttggaaagctggagacacagtattgtaaattgaaggaaacttctagcttccggatgaggcaccttcagagcctgcataaatttgtttccagagctacagctgagttgatctggttgaatgagaaggaggaggaggaactagcatatgactggagtgacaacaattccaatatctcagccaagagaaattacttctctgagttgacaatggaactggaggagaaacaggatgtgtttcgttctctacaagatacagcagaactactttcacttgagaaccacccagccaagcagacagtggaggcttacagtgctgctgtccagtcccagttgcagtggatgaagcagctgtgcctgtgtgttgagcagcatgtgaaagagaatactgcttattttcagttcttcagtgatgcacgagagctggagtcattcttgaggaacctccaagattccattaaacgaaaatattcctgtgaccacaacaccagcttatcccgccttgaagacctgctccaggactccatggatgaaaaggagcagcttatacagtccaagagttccgttgccagtctcgttgggagatcaaaaaccatcgttcagctaaaaccacgcagtccagaccatgtgttaaagaacaccatttctgtcaaggctgtctgtgactacaggcagatcgagattactatttgcaaaaatgatgaatgtgtgctagaagataattctcagcggaccaaatggaaagtgatcagccccacagggaacgaggcaatggtgccgtcagtctgcttcctcatccccccacccaataaggatgccattgagatggccagcagggtcgaacaatcttatcagaaggttatggccctttggcatcagctgcatgttaacaccaaaagccttatctcttggaactatctgcgtaaagaccttgaccttgtacagacctggaacctagaaaagcttcgatcctcagcaccaggggagtgccatcagattatgaagaaccttcaggcccactatgaagactttctgcaggatagtcgtgactctgtgctgttctcagtggctgatcgcttgcgcttggaagaggaggtggaagcttgtaaagcccgcttccagcacctgatgaagtccatggagaatgaggacaaagaggagactgtggccaagatgtacatttcagagttgaagaacatccggctacgcctggaggagtatgaacagagggtggtcaaacgaattcagtctctagccagctctaggactgacagagatgcctggcaggacaatgcattaaggattgcagagcaagagcacacccaggaggatttacagcaattgaggtcagacttggatgcagtttctatgaaatgtgacagctttctccatcagtctccatctagttcaagtgtcccaactctgcgctcagaactgaatctgctggtggagaagatggaccatgtctatggtctctctactgtatatctgaataagttaaagacagttgatgttatagtacgtagcatacaggatgctgaactcttggtcaaaggttatgagattaagctgagtcaagaagaagtagtactggcagatctctcagctctggaggcccattggtcgacattacggcactggcttagtgatgtgaaggacaagaattcagtgttttcagtcctggatgaggaaattgccaaggccaaggtagtggcagagcagatgagtcgtctgacaccagagcgaaatctggatttggagcgctatcaggaaaaaggctcccagctgcaggagcgttggcaccgagtcattgcccagctcgagattcgccaatctgagctagaaagtatccaggaagttctgggagattaccgagcctgccatggaactctcatcaagtggattgaggaaaccactgcccagcaggaaatgatgaagccaggccaggcagaggatagcagagtgctttcggagcagctcagccagcagacggccctatttgcagaaattgagagaaatcagacaaaactggatcaatgtcaaaaattttcccagcagtactctactattgtaaaggactatgaattgcaactgatgacatacaaggcctttgtggaatcgcagcagaaatcccctggcaagcgccgtcgcatgctttcctcttcagatgccatcactcaagagttcatggacttaaggactcgctacacggcattggtgactttaacaactcagcacgtgaaatacatcagtgatgcactccggcgtctggaggaggaggagaaagtggtagaagaggagaaacaagaacatgtggagaaggttaaagaacttttgggctgggtgtctaccctagcgaggaatacacaaggaaaagctacctcatccgagaccaaagaatcaacagacattgaaaaagctattttggaacagcaggttctgtcagaagagctgacaacaaagaaagaacaagtctctgaagctattaaaacatcacagatcttcttggccaagcatggtcataagctctcagaaaaagagaagaaacaaatatctgagcaattgaatgccctaaacaaggcttaccatgacctttgtgatggttctgcaaatcagcttcagcagcttcagagccagttggctcaccagacagaacaaaagaccctgcagaaacaacaaaatacctgtcaccagcaactggaggatctttgcagttgggtaggacaggcagaaagagcactggcaggccaccaaggcagaaccacccagcaggatctctctgctttgcagaagaaccaaagtgacttgaaggatttacaggatgacattcagaatcgtgccacctcatttgccactgttgtcaaggacattgaggggttcatggaagagaatcagaccaagctgagcccacgtgagttgacagctcttcgggaaaagcttcatcaggctaaggagcaatatgaggcgctccaggaagagacacgtgtggcccagaaggaactggaggaagcagtgacctccgccttacagcaggagactgaaaagagtaaagcagcaaaggaactggcagagaacaagaagaagatcgatgctctcctggattgggtaacttcagtaggatcatctggtggacagctgctgaccaaccttccaggaatggagcagctctcgggagctagcttggagaaaggagccttggacaccactgatggttacatgggggtgaatcaagccccagagaaactggacaagcaatgtgagatgatgaaggcccgtcaccaagaattgctgtcccagcagcaaaatttcattctggccacccagtcagctcaggccttcttggatcagcatggccacaatctcacacctgaggagcaacagatgctgcaacagaagctgggagagctaaaggaacaatactctacttccctggcccaatcagaggcagaactgaagcaggtgcagacacttcaggatgagttgcagaaatttctgcaggatcataaagagtttgaaagctggttggaacgatccgagaaagagctggagaacatgcataagggaggcagcagccccgagacccttccctccctgctaaagcggcaaggaagcttctcagaggatgtcatttcccacaaaggagacttgagatttgtgactatctcaggacagaaagtcttggacatggaaaacagttttaaggaaggcaaagaaccatcagaaattggaaacttagtaaaggacaagttgaaggatgcaacagaaagatacactgctctccactcaaagtgtacacgattaggatctcacctgaatatgctgttaggccagtatcatcaattccaaaacagtgctgacagcctgcaggcctggatgcaggcttgtgaggccaacgtggagaagctcctctcagatactgttgcctctgaccctggagttctccaggagcagcttgcaacaacaaagcagttgcaggaggaattggctgagcaccaagtacctgtggaaaaactccaaaaagtagctcgtgacataatggaaattgaaggggagccagccccagaccacaggcatgttcaagaaactacagattccatactcagccacttccaaagcctctcctatagcctggctgagcgatcttctctgctgcagaaagcaattgcccaatctcagagtgtccaggaaagcctggagagcctgttgcagtctattggggaagttgaacaaaacctggaagggaagcaggtgtcatcactctcatcaggagtcatccaggaagccttagccacaaatatgaaattgaagcaggacattgctcggcaaaagagcagcttggaggccacccgtgagatggtgacccgattcatggagacagcagacagtactacagcagcagtgctgcagggcaaactggcagaggtgagccagcggttcgaacagctctgtctacagcagcaagaaaaggagagctccctaaagaagcttctaccccaggcagagatgtttgaacacctctctggtaagctgcagcagttcatggaaaacaaaagtcggatgctggcctctggaaatcagccagatcaagatattacacatttcttccaacagatccaggagctcaatttggaaatggaagaccaacaggagaacctagatactcttgagcacctggtcactgaactgagctcttgtggctttgcgctggacttgtgccagcatcaggacagggtacagaatctaagaaaagacttcacagagctacagaagacagttaaagagagagagaaagatgcatcatcttgccaggaacagttggatgaattccggaagctggtcaggaccttccagaaatggttgaaagaaactgaagggagtattccacctacggaaacttctatgagtgctaaagagttagaaaagcagattgaacacctgaagagtctactagatgactgggcaagtaagggaactctggtggaagaaatcaattgcaaaggtacttctttagaaaatctcatcatggaaatcacagcacctgattcccaaggcaagacagatctgacggagatccagtgtgacatgtcagatgtaaacttgaagtatgagaaactagggggagtacttcatgaacgccaggaaagccttcaggctatcctcaacagaatggaggaggttcacaaggaggcaaactctgtgctgcagtggctggaatcaaaagaggaagtcctgaaatccatggatgccatgtcatctccaaccaagacagaaacagtgaaagcccaagctgaatctaacaaggccttcctggctgagttggaacagaattctccaaaaattcaaaaagtaaaggaagccctggctggattactggtgacatatcccaactcacaggaagcagaaaattggaagaaaattcaggaagaactcaattcccgatgggaaagggccactgaggttactgtggctcggcaaaggcagctagaggaatctgcaagtcatctggcctgcttccaggctgcagaatcccagctccggccgtggctgatggagaaagaactgatgatgggagtgctggggcccctgtctattgaccccaacatgttgaatgcacaaaagcaacaggtccagtttatgctaaaggaatttgaagcacgcaggcaacagcatgagcaactgaatgaggcagctcagggcatcctaacaggccctggagatgtctctctgtccaccagccaagtacagaaagaactccagagcatcaatcagaaatgggttgagctgactgacaaactcaactcccgttccagccaaattgaccaagctattgttaagagcacccagtaccaggaactgctccaggacttatcagagaaggtgagggcagttggacaacggctgagtgtccagtcagctatcagcacccaaccagaggctgtaaagcagcaattggaagagaccagtgaaattcgatctgacttggagcagttagaccacgaggttaaggaggctcagacactgtgcgatgaactctcagtgctcattggtgagcagtacctcaaggatgaactgaagaagcgtttggagacagttgccctgcctctccaaggtttagaagaccttgcagccgatcgcattaacagactccaggcagctcttgccagcacccagcagttccagcaaatgtttgatgagttgaggacctggttggatgataaacaaagccagcaagcaaaaaactgcccaatttctgcaaaattggagcggctacagtctcagctacaggagaatgaagagtttcagaaaagtcttaatcaacacagtggctcctatgaggtgattgtggctgaaggggaatctctacttctttctgtacctcctggagaagagaaaaggactctacaaaaccagttggttgagctcaaaaaccattgggaagagcttagtaaaaaaactgcagacagacaatccaggctcaaggattgtatgcagaaagctcagaaatatcagtggcatgtggaagaccttgtgccatggatagaagattgtaaagctaagatgtctgagttgcgagtcactctggatccagtgcagctagagtccagtctcctaagatcaaaggctatgctgaatgaggtggagaagcgccgctccctgctggaaatattgaatagtgctgctgacattctgatcaattcttcagaagcagatgaggatggaatccgggatgagaaggctgggatcaaccagaacatggatgctgttacagaagagctgcaggccaaaacagggtcactcgaagaaatgactcagaggctcagggagttccaggaaagctttaagaatattgaaaagaaggttgaaggagccaaacaccaacttgagatctttgatgctctgggttctcaagcctgtagcaacaagaacctggagaagctaagagctcaacaggaagtgctgcaggccctagagcctcaggtagactatctgaggaactttactcagggtctggtagaagatgccccagatggatctgatgcttctcaacttctccaccaagctgaggtcgcccagcaagagttcctcgaagttaagcaaagagtgaacagtggttgtgtgatgatggaaaacaagctggaggggattggccagtttcactgccgggtccgagagatgttctctcaattggcagacctggatgatgagctagatggcatgggtgctattggcagagacactgatagcctccagtcccaaatcgaggatgtccggctattccttaacaaaattcacgtcctcaaattagacatagaggcctctgaagcagagtgtcgacatatgctagaagaagaggggactctggatttgttaggtctcaaaagggagctagaagccctgaacaaacagtgtggcaaactgacagagagggggaaagctcgtcaggaacagctggaactgacactaggccgtgtagaggacttctacaggaaattgaaaggactcaatgacgcgaccacagcagcagaggaggcagaggccctccagtgggtagtggggaccgaagtggaaatcatcaaccaacaattagcagattttaaaatgtttcagaaagaacaagtggatcctcttcagatgaaattgcagcaggtgaatggacttggccagggattaattcagagtgcaggaaaagactgtgatgtacagggtttagaacatgacatggaagagatcaatgctcgatggaatacattgaataaaaaggtcgcacaaagaattgcacagctacaggaagctttgttgcattgtgggaagtttcaagatgccttggagccattgctcagctggttggcagataccgaggagctcatagccaatcagaaacctccatctgctgagtataaagtggtgaaagcacagatccaagaacagaagttgctccagcggctcctagatgatcgaaaggccacagtagacatgcttcaagcagaaggaggcagaatagcccagtcagcagagctggctgatagagagaaaatcactggacagctggagagtcttgaaagtagatggactgaactactcagtaaggcagcagccaggcaaaaacagctggaagacatcctggttctggccaaacagttccatgagacagctgagcctatttctgacttcttatctgtcacagagaaaaagcttgctaactcagaacctgttggcactcagactgccaaaatacagcagcagatcattcggcacaaggctctggaagaagacatagaaaaccatgcaacagatgtgcaccaggcagtcaaaattgggcagtccctctcctccctgacatctcctgcagaacagggtgtgctgtcagaaaagatagactcattgcaggcccgatacagtgaaattcaagaccgctgttgtcggaaggcagccctacttgaccaagctctgtctaatgctaggctgtttggggaggatgaggtggaggtgctcaactggctggctgaggttgaggacaagctcagttcagtgttcgtaaaggatttcaaacaggatgtcctgcacaggcagcatgctgaccacctggctttaaatgaagaaattgttaatagaaagaagaatgtagatcaagctattaaaaatggtcaggctcttctaaaacaaaccacaggtgaggaggtgttacttatccaggaaaaactagatggtataaagactcgttacgcagacatcacagttactagctccaaggccctcagaactttagagcaagcccggcagctggccaccaagttccagtctacttatgaggaactgaccgggtggctgagggaggtggaggaggagctggcaaccagtggaggacagtctcccacaggggaacagataccccagtttcagcagagacagaaggaattaaagaaggaggtcatggagcacaggctggtgttggacacagtgaatgaggtgagccgtgctctcttagagctggtgccctggagagccagagaagggctggataaacttgtgtccgatgctaacgagcagtacaaactagtcagtgacactattggacaaagggtggatgaaattgatgctgctattcagagatcacaacagtatgagcaagctgccgatgcagaactagcttgggttgctgaaacaaaacggaaactgatggctctgggtccaattcgcctggaacaggaccagaccacagctcagcttcaggtacagaaggctttctccattgacattattcgacacaaagattcaatggatgaactcttcagtcaccgtagtgaaatctttggcacatgtggggaggagcaaaaaactgtattacaggaaaagacagagtctctaatacagcaatatgaagccattagcctactcaattcagagcgttatgcccgcctagagcgggcccaggtcttagtaaaccagttttgggaaacttatgaagagctcagcccctggattgaggaaactcgggcactaatagcacagttaccctctccagccattgatcatgagcagctcaggcagcaacaagaggaaatgaggcaattaagggaatctattgctgaacacaaacctcatattgacaaactactaaagataggcccacaactaaaggaattaaaccctgaggaaggggaaatggtggaagaaaaataccagaaagcagaaaacatgtatgcccaaataaaggaggaggtgcgccagcgagccctggctctggatgaagccgtgtcccagtccacacagattacagagtttcatgataaaattgagcctatgttggagacactggagaatctttcctctcgcctgcgtatgccaccactgatccctgctgaagtagacaagatcagagagtgcatcagtgacaataagagtgccaccgtggagctagaaaaactgcagccatcctttgaggccttgaagcgccgtggagaggagcttattggacgatctcagggagcagacaaggatctggctgcaaaagaaatccaggataaattggatcaaatggtattcttctgggaggacatcaaagctcgggctgaagaacgagaaatcaaatttcttgatgtccttgaattagcagagaagttctggtatgacatggcagctctcctgaccaccatcaaagacacccaggatattgtccatgacttggaaagcccaggcattgatccttccatcatcaaacaacaggttgaagctgctgagactattaaggaagagacagatggtctgcatgaagagctggagtttattcggatccttggagcagatttgatttttgcctgtggagaaactgagaagcctgaagtgaggaagagcattgatgagatgaataatgcttgggagaacttaaacaaaacatggaaagagaggctagaaaaacttgaggatgctatgcaagctgctgtgcagtatcaggacactcttcaggctatgtttgactggctagataacactgtgattaaactctgcaccatgccccctgttggcactgacctcaatactgttaaagatcagttaaatgaaatgaaggagttcaaagtagaagtttaccaacagcaaattgagatggagaagcttaatcaccagggtgaactgatgttaaagaaagctactgatgagacggacagagacattatacgagaaccactgacagaactcaaacacctctgggagaacctgggtgagaaaattgcccaccgacagcacaaactagaaggggctctgttggcccttggtcagttccagcatgccttagaggaactaatgagttggctgactcataccgaagagttgttagatgctcagagaccaataagtggagacccaaaagtcattgaagttgagctcgcaaagcaccatgtcctaaaaaatgatgttttggctcatcaagccacagtggaaacagtcaacaaagctggcaatgagcttcttgaatccagtgctggagatgatgccagcagcttaaggagccgtttggaagccatgaaccaagactgtacgtcacatttagaggcagcgagagagtagcagaatccaggtctgagctccatatgccacagtgcccagcatcatatgctatgctggtatatagtctagtggctgtcagttcaatggagagccagctttctgcatctaagcccacaggaggacttcctgaaactgctagggaacagcttgatacacatatggaactctattcccagctgaaagccaaggaagagacttataatcaactacttgacaagggcagactcatgcttctaagccgtgacgactctgggtctggctccaagacagaacagagtgtagcacttttggagcagaagtggcatgtggtcagcagtaagatggaagaaagaaagtcaaagctggaagaggccctcaacttggcaacagaattccagaattccctacaagaatttatcaactggctcactctagcagagcagagtttaaacatcgcttctccaccaagcctgattctaaatactgtcctttcccagatagaagagcacaaggtttttgctaatgaagtaaatgctcatcgagaccagatcattgagctggatcaaactgggaatcaattaaagttccttagccaaaagcaggatgttgttctgatcaagaatttgttggtgagcgtgcagtctcgatgggagaaggttgtccagcgatctattgaaagagggcgatcactagatgatgccaggaagcgggcaaaacaattccatgaagcttggaaaaaactgattgactggctagaagatgcagagagtcacctggactcagaactagagatatccaatgacccagacaaaattaaacttcagctttctaagcataaggagtttcagaagactcttggtggcaagcagcctgtgtatgataccacaattagaactggcagagcactgaaagaaaagactttgcttcccgaagatactcagaaacttgacaatttcctaggagaagtcagagacaaatgggatactgtttgtggcaagtctgtggagcggcagcacaagttggaggaagccctgctcttttcgggtcagttcatggatgctttgcaggcattggttgactggttatacaaggtggagccacagctggctgaggaccagcccgtgcacggggaccttgacctcgtcatgaacctcatggatgcacacaaggttttccagaaggaactgggaaagcgaacaggaaccgttcaggtcctgaagcggtcaggccgagagctgattgagaatagtcgagatgacaccacttgggtaaaaggacagctccaggaactgagcactcgctgggacactgtctgtaaactctctgtttccaaacaaagccggcttgagcaggccttaaaacaagcggaagtgtttcgagacacagtccacatgctgttggagtggctttctgaagcagagcaaacgcttcgctttcggggagcacttcctgatgacacagaggccctgcagtctctcattgacacccataaggaattcatgaagaaagtagaagaaaagcgagtggacgttaactcagcagtagccatgggagaagtcatcctggctgtctgccaccccgattgcatcacaaccatcaaacactggatcaccatcatccgagctcgcttcgaggaggtcctgacatgggctaagcagcaccagcagcgtcttgaaacggccttgtcagaactggtggctaatgctgagctcctggaagaacttctggcatggatccagtgggctgagaccaccctcattcagcgggatcaggagccaatcccgcagaacattgaccgagttaaagcccttatcgctgagcatcagacatttatggaggagatgactcgcaaacagcctgacgtggaccgggtcaccaagacatacaaaaggaaaaacatagagcctactcacgcgcctttcatagagaaatcccgcagcggaggcaggaaatccctaagtcagccaacccctcctcccatgccaatcctttcacagtctgaagcaaaaaacccacggatcaaccagctttctgcccgctggcagcaggtgtggctgttagcactggagcggcaaaggaaactgaatgatgccttggatcggctggaggagttgaaagaatttgccaactttgactttgatgtctggaggaaaaagtatatgcgttggatgaatcacaaaaagtctcgagtgatggatttcttccggcgcattgataaggaccaggatgggaagataacacgtcaggagtttatcgatggcattttagcatccaagttccccaccaccaagttagagatgactgctgtggctgacattttcgaccgagatggggatggttacattgattattatgaatttgtggctgctcttcatcccaacaaggatgcgtatcgaccaacaaccgatgcagataaaatcgaagatgaggttacaagacaagtggctcagtgcaaatgtgcaaaaaggtttcaggtggagcagatcggagagaataaataccggttcttcctcggcaatcagtttggggattctcagcagttgcggctggtccgtattctgcgcagcaccgtgatggttcgcgttggtggaggatggatggccttggatgaatttttagtgaaaaatgatccctgccgagcacgaggtagaactaacattgaacttagagagaaattcatcctaccagagggagcatcccagggaatgacccccttccgctcacggggtcgaaggtccaaaccatcttcccgggcagcttcccctactcgttccagctccagtgctagtcagagtaaccacagctgtacatccatgccatcttctccagccaccccagccagtggaaccaaggttatcccatcatcaggtagcaagttgaaacgaccaacaccaacttttcattctagtcggacatcccttgctggtgataccagcaatagttcttccccggcctccacaggtgccaaaactaatcgggcagaccctaaaaagtctgccagtcgccctgggagtcgggctgggagtcgagccgggagtcgagccagcagccggcgaggaagtgacgcttctgactttgacctcttagagacgcagtctgcttgttccgacacttcagaaagcagcgctgcagggggccaaggcaactccaggagagggctaaacaaaccttccaaaatcccaaccatgtctaagaagaccaccactgcctcccccaggactccaggtcccaagcgataacactgtctaagcacccccaagccactatccactttgaatcctgctccatacattgggtgtatatttattctgaacgggagaagttatattgttaaaagtgtaaaagaataattgtgttatgaagctgccttattttttttctttttgtaagttactattttcatgtgaatatttatgtagataaaatttgcctcctggtaaccctgtaatggatggggcccagaaatgaaatatttgagaaaaacaagtgaaaaggtcaagatacaaatgtgtattaaaaaaaaaaaagcctattaatagggtttctgcgcggtgcagggttgtaaacctgctttatcttttaggattattcctaaatgcatcttctttataaacttgacttgctatctcagcaagataaattatattaaaaaaataagaatcctgcagtgtttaaggaactctttttttgtaaatcacggacacctcaattagcaagaactgaggggagggctttttccattgtttaatgttttgtgatttttagctaaagagagggaacctcatctaagtaacatttgcacatgatacagcaaaaggagttcattgcaatactgtctttggatattgtttcagtactgggtgtttaaaggacaaatagctgctagaattcaggggtaaatgtaagtgttcagaaaacgtcagaacatttggggttttaaactgatttgttgctccctatccagcctagacaccagtaactcttgtgttcaccaggacccagacccttggcaagggataggctcgttggtgacattgtgaatttcagatttgttttatccactttttttgctatttatttaaatggtcgatcaacttcccacaaactgaggaatgaattccacgagcctgttctgaaaatgtggacgtaagacaaacacgtgctcgtcctttaatggagttcaccagcacacttgttaaccagtcctgtttgctttcgtctttttttgtgcgtaataaagtcaactgaccaagtgaccatgaaaaggggctgtctggggctcctgttttttagctgctgttcttcagctccgaccatgttgctgtgtgattatctcaattggttttaattgaggcagaaactgaagctctaccaatgaactgtttagaaacaagacacacttttgtattaaaattgcttgcagtaacaaa

SEQ ID NO: 367584 - DNA, 18339 bp, Homo sapiens
  misc_feature (995)..(995): n is a, c, g, or t
  misc_feature (1066)..(1066): n is a, c, g, or t
  misc_feature (1076)..(1076): n is a, c, g, or t
tcaaaacaccatctattaaagctgacaattgtcacaagcagaattgaatactcaaagggaagttaacttcacacagaaaaacacttcatatttcattcaacttgcaacgtatttactgagcgtctaccgtgtgtaaggcagcctgctaggaaatggggtacgaccctcctcctcacagagcttacattctgacaggggaacccgaagtgaacaagcatgatctgcaacaggtatgagatgtcaagaaagcctattacagaggcacccaggcccagtctacggggtcactaaaggctatgggataaactgatctgaaggatgagcacaaatcaatcatcgagaggctgagagcagctcaagtcgggggaataagatgtgcgagaagcaggagagagcaggatgaaataaaatcaggcccgtgtgatgcgtggtgaacagtgagtacccagagaagcgaagctgggggctgaggggctggtcaggaacacgggcttaattcatcaacccaacagcaaacatcagtgcaacaatgtaagcacatttaccttctgggtcataatgtaatttcttccaaagccagtggtggcactcagatatttgatcagaggattgacagattcaggcttttggtggaaaagccatacctggaaaggaaggatgtgtcaatgatttgtttcttctgcccaaggtgagtgaggctggtggagagtcactatctgcactttatagagctccccagacaaattataaacatcctctcaaatatcatcagtgaatggtttggcaaatatattgagaaccaattaaaatatagtttaaaagcacttgcttctacaaccaatttgtattcccacaataaatgtatttatttctgtaacacttaccaaaacaagagcatcaaagccaattccttcacactgccctccctcccacctgctcttcatgaggagtcctttattcctgcatgtttcctgttctttgggccggaattccgnggcgcgatgtcggctcactacaacctctgcctcctggattcaagcaattctgtacctcagcctcccgagtngctgtgattncagatgaacgggaccgggttcagaagaaaacgttcaccaagtgggtcaacaagcacttaatgaaggtccgcaagcacatcaatgatctttatgaagatctgcgggatggccataacctgatctctctgttggaggtcctctcaggcatcaaactgccccgggagaagggcaggatgcgttttcataggctgcagaatgtgcagattgccctggacttcctaaagcagcgacaggtgaaactagtgaatattcgcaatgatgacatcacagatggcaaccccaagttgaccctgggtctgatctggaccattattttgcatttccagatctctgacatctacattagtggagaatcaggggatatgtcagccaaggagaaactactcctgtggacccagaaggtgacagctggttacacaggaatcaaatgcaccaacttttcctcctgctggagtgatgggaagatgttcaatgcactcattcaccgataccgacccgatctagtagacatggagagggtgcaaatccaaagtaaccgagagaatctggaacaagcttttgaagtggcagaaagactgggggtcactcgcctgctggatgcagaagatgtggatgtgccatctccagatgaaaagtctgtaatcacttatgtgtcttcgatttatgatgccttccctaaagttcctgagggtggagaagggatcagtgctacggaagtggactccaggtggcaagaataccaaagccgagtggactccctcattccctggatcaaacagcatacaatactgatgtcagataaaacttttccccaaaaccctgttgaactaaaggcactttataaccaatatatacacttcaaagaaacagaaattctggccaaggagagagaaaaaggaagaattgaggaattatataaattactagaggtgtggattgaatttggccgaattaaactgcctcaaggttatcaccctaatgatgtggaagaagagtggggaaagctcatcatagagatgctggaacgagagaaatcacttcggccggctgtggagaggctggaattgctgctacagattgcaaacaaaatccagaatggtgctttgaactgtgaagaaaaactgacactagctaagaatacactgcaggctgatgctgctcacctggaatcaggacaaccggtacaatgtgagtcagatgtcattatgtacattcaagagtgtgaaggtctcatcaggcagctgcaggtggatctccagatcctgcgggatgagaattactaccagctagaagagctggcttttagggtcatgcgtcttcaggatgagctggtcaccttgcgtctagagtgtacaaacctgtaccggaagggtcatttcacttcacttgaattggttccaccctctactttaaccaccactcatctgaaagcagaacccttaaccaaggcaacccattcttcttctacctcctggttccgaaagcctatgactcgggctgaacttgggccatcagctcctctgaagatgaaggcaatctccgatttgtgtatgaactactgtctttgggtagaagagatgcagatgaaactggagcgagcagagtggggcaatgacctgcctagtgtggagttgcagctagaaacacagcagcacatccatacgagtgtagaagagctgggctcaagtgtcaaggaggccaggttgtatgagggaaagatgtcccagaatttccataccagctatgctgaaactcttggaaagctggagacacagtattgtaaattgaaggaaacttctagcttccggatgaggcaccttcagagcctgcataaatttgtttccagagctacagctgagttgatctggttgaatgagaaggaggaggaggaactagcatatgactggagtgacaacaattccaatatctcagccaagagaaattacttctctgagttgacaatggaactggaggagaaacaggatgtgtttcgttctctacaagatacagcagaactactttcacttgagaaccacccagccaagcagacagtggaggcttacagtgctgctgtccagtcccagttgcagtggatgaagcagctgtgcctgtgtgttgagcagcatgtgaaagagaatactgcttattttcagttcttcagtgatgcacgagagctggagtcattcttgaggaacctccaagattccattaaacgaaaatattcctgtgaccacaacaccagcttatcccgccttgaagacctgctccaggactccatggatgaaaaggagcagcttatacagtccaagagttccgttgccagtctcgttgggagatcaaaaaccatcgttcagctaaaaccacgcagtccagaccatgtgttaaagaacaccatttctgtcaaggctgtctgtgactacaggcagatcgagattactatttgcaaaaatgatgaatgtgtgctagaagataattctcagcggaccaaatggaaagtgatcagccccacagggaacgaggcaatggtgccgtcagtctgcttcctcatccccccacccaataaggatgccattgagatggccagcagggtcgaacaatcttatcagaaggttatggccctttggcatcagctgcatgttaacaccaaaagccttatctcttggaactatctgcgtaaagaccttgaccttgtacagacctggaacctagaaaagcttcgatcctcagcaccaggggagtgccatcagattatgaagaaccttcaggcccactatgaagactttctgcaggatagtcgtgactctgtgctgttctcagtggctgatcgcttgcgcttggaagaggaggtggaagcttgtaaagcccgcttccagcacctgatgaagtccatggagaatgaggacaaagaggagactgtggccaagatgtacatttcagagttgaagaacatccggctacgcctggaggagtatgaacagagggtggtcaaacgaattcagtctctagccagctctaggactgacagagatgcctggcaggacaatgcattaaggattgcagagcaagagcacacccaggaggatttacagcaattgaggtcagacttggatgcagtttctatgaaatgtgacagctttctccatcagtctccatctagttcaagtgtcccaactctgcgctcagaactgaatctgctggtggagaagatggaccatgtctatggtctctctactgtatatctgaataagttaaagacagttgatgttatagtacgtagcatacaggatgctgaactcttggtcaaaggttatgagattaagctgagtcaagaagaagtagtactggcagatctctcagctctggaggcccattggtcgacattacggcactggcttagtgatgtgaaggacaagaattcagtgttttcagtcctggatgaggaaattgccaaggccaaggtagtggcagagcagatgagtcgtctgacaccagagcgaaatctggatttggagcgctatcaggaaaaaggctcccagctgcaggagcgttggcaccgagtcattgcccagctcgagattcgccaatctgagctagaaagtatccaggaagttctgggagattaccgagcctgccatggaactctcatcaagtggattgaggaaaccactgcccagcaggaaatgatgaagccaggccaggcagaggatagcagagtgctttcggagcagctcagccagcagacggccctatttgcagaaattgagagaaatcagacaaaactggatcaatgtcaaaaattttcccagcagtactctactattgtaaaggactatgaattgcaactgatgacatacaaggcctttgtggaatcgcagcagaaatcccctggcaagcgccgtcgcatgctttcctcttcagatgccatcactcaagagttcatggacttaaggactcgctacacggcattggtgactttaacaactcagcacgtgaaatacatcagtgatgcactccggcgtctggaggaggaggagaaagtggtagaagaggagaaacaagaacatgtggagaaggttaaagaacttttgggctgggtgtctaccctagcgaggaatacacaaggaaaagctacctcatccgagaccaaagaatcaacagacattgaaaaagctattttggaacagcaggttctgtcagaagagctgacaacaaagaaagaacaagtctctgaagctattaaaacatcacagatcttcttggccaagcatggtcataagctctcagaaaaagagaagaaacaaatatctgagcaattgaatgccctaaacaaggcttaccatgacctttgtgatggttctgcaaatcagcttcagcagcttcagagccagttggctcaccagacagaacaaaagaccctgcagaaacaacaaaatacctgtcaccagcaactggaggatctttgcagttgggtaggacaggcagaaagagcactggcaggccaccaaggcagaaccacccagcaggatctctctgctttgcagaagaaccaaagtgacttgaaggatttacaggatgacattcagaatcgtgccacctcatttgccactgttgtcaaggacattgaggggttcatggaagagaatcagaccaagctgagcccacgtgagttgacagctcttcgggaaaagcttcatcaggctaaggagcaatatgaggcgctccaggaagagacacgtgtggcccagaaggaactggaggaagcagtgacctccgccttacagcaggagactgaaaagagtaaagcagcaaaggaactggcagagaacaagaagaagatcgatgctctcctggattgggtaacttcagtaggatcatctggtggacagctgctgaccaaccttccaggaatggagcagctctcgggagctagcttggagaaaggagccttggacaccactgatggttacatgggggtgaatcaagccccagagaaactggacaagcaatgtgagatgatgaaggcccgtcaccaagaattgctgtcccagcagcaaaatttcattctggccacccagtcagctcaggccttcttggatcagcatggccacaatctcacacctgaggagcaacagatgctgcaacagaagctgggagagctaaaggaacaatactctacttccctggcccaatcagaggcagaactgaagcaggtgcagacacttcaggatgagttgcagaaatttctgcaggatcataaagagtttgaaagctggttggaacgatccgagaaagagctggagaacatgcataagggaggcagcagccccgagacccttccctccctgctaaagcggcaaggaagcttctcagaggatgtcatttcccacaaaggagacttgagatttgtgactatctcaggacagaaagtcttggacatggaaaacagttttaaggaaggcaaagaaccatcagaaattggaaacttagtaaaggacaagttgaaggatgcaacagaaagatacactgctctccactcaaagtgtacacgattaggatctcacctgaatatgctgttaggccagtatcatcaattccaaaacagtgctgacagcctgcaggcctggatgcaggcttgtgaggccaacgtggagaagctcctctcagatactgttgcctctgaccctggagttctccaggagcagcttgcaacaacaaagcagttgcaggaggaattggctgagcaccaagtacctgtggaaaaactccaaaaagtagctcgtgacataatggaaattgaaggggagccagccccagaccacaggcatgttcaagaaactacagattccatactcagccacttccaaagcctctcctatagcctggctgagcgatcttctctgctgcagaaagcaattgcccaatctcagagtgtccaggaaagcctggagagcctgttgcagtctattggggaagttgaacaaaacctggaagggaagcaggtgtcatcactctcatcaggagtcatccaggaagccttagccacaaatatgaaattgaagcaggacattgctcggcaaaagagcagcttggaggccacccgtgagatggtgacccgattcatggagacagcagacagtactacagcagcagtgctgcagggcaaactggcagaggtgagccagcggttcgaacagctctgtctacagcagcaagaaaaggagagctccctaaagaagcttctaccccaggcagagatgtttgaacacctctctggtaagctgcagcagttcatggaaaacaaaagtcggatgctggcctctggaaatcagccagatcaagatattacacatttcttccaacagatccaggagctcaatttggaaatggaagaccaacaggagaacctagatactcttgagcacctggtcactgaactgagctcttgtggctttgcgctggacttgtgccagcatcaggacagggtacagaatctaagaaaagacttcacagagctacagaagacagttaaagagagagagaaagatgcatcatcttgccaggaacagttggatgaattccggaagctggtcaggaccttccagaaatggttgaaagaaactgaagggagtattccacctacggaaacttctatgagtgctaaagagttagaaaagcagattgaacacctgaagagtctactagatgactgggcaagtaagggaactctggtggaagaaatcaattgcaaaggtacttctttagaaaatctcatcatggaaatcacagcacctgattcccaaggcaagacagatctgacggagatccagtgtgacatgtcagatgtaaacttgaagtatgagaaactagggggagtacttcatgaacgccaggaaagccttcaggctatcctcaacagaatggaggaggttcacaaggaggcaaactctgtgctgcagtggctggaatcaaaagaggaagtcctgaaatccatggatgccatgtcatctccaaccaagacagaaacagtgaaagcccaagctgaatctaacaaggccttcctggctgagttggaacagaattctccaaaaattcaaaaagtaaaggaagccctggctggattactggtgacatatcccaactcacaggaagcagaaaattggaagaaaattcaggaagaactcaattcccgatgggaaagggccactgaggttactgtggctcggcaaaggcagctagaggaatctgcaagtcatctggcctgcttccaggctgcagaatcccagctccggccgtggctgatggagaaagaactgatgatgggagtgctggggcccctgtctattgaccccaacatgttgaatgcacaaaagcaacaggtccagtttatgctaaaggaatttgaagcacgcaggcaacagcatgagcaactgaatgaggcagctcagggcatcctaacaggccctggagatgtctctctgtccaccagccaagtacagaaagaactccagagcatcaatcagaaatgggttgagctgactgacaaactcaactcccgttccagccaaattgaccaagctattgttaagagcacccagtaccaggaactgctccaggacttatcagagaaggtgagggcagttggacaacggctgagtgtccagtcagctatcagcacccaaccagaggctgtaaagcagcaattggaagagaccagtgaaattcgatctgacttggagcagttagaccacgaggttaaggaggctcagacactgtgcgatgaactctcagtgctcattggtgagcagtacctcaaggatgaactgaagaagcgtttggagacagttgccctgcctctccaaggtttagaagaccttgcagccgatcgcattaacagactccaggcagctcttgccagcacccagcagttccagcaaatgtttgatgagttgaggacctggttggatgataaacaaagccagcaagcaaaaaactgcccaatttctgcaaaattggagcggctacagtctcagctacaggagaatgaagagtttcagaaaagtcttaatcaacacagtggctcctatgaggtgattgtggctgaaggggaatctctacttctttctgtacctcctggagaagagaaaaggactctacaaaaccagttggttgagctcaaaaaccattgggaagagcttagtaaaaaaactgcagacagacaatccaggctcaaggattgtatgcagaaagctcagaaatatcagtggcatgtggaagaccttgtgccatggatagaagattgtaaagctaagatgtctgagttgcgagtcactctggatccagtgcagctagagtccagtctcctaagatcaaaggctatgctgaatgaggtggagaagcgccgctccctgctggaaatattgaatagtgctgctgacattctgatcaattcttcagaagcagatgaggatggaatccgggatgagaaggctgggatcaaccagaacatggatgctgttacagaagagctgcaggccaaaacagggtcactcgaagaaatgactcagaggctcagggagttccaggaaagctttaagaatattgaaaagaaggttgaaggagccaaacaccaacttgagatctttgatgctctgggttctcaagcctgtagcaacaagaacctggagaagctaagagctcaacaggaagtgctgcaggccctagagcctcaggtagactatctgaggaactttactcagggtctggtagaagatgccccagatggatctgatgcttctcaacttctccaccaagctgaggtcgcccagcaagagttcctcgaagttaagcaaagagtgaacagtggttgtgtgatgatggaaaacaagctggaggggattggccagtttcactgccgggtccgagagatgttctctcaattggcagacctggatgatgagctagatggcatgggtgctattggcagagacactgatagcctccagtcccaaatcgaggatgtccggctattccttaacaaaattcacgtcctcaaattagacatagaggcctctgaagcagagtgtcgacatatgctagaagaagaggggactctggatttgttaggtctcaaaagggagctagaagccctgaacaaacagtgtggcaaactgacagagagggggaaagctcgtcaggaacagctggaactgacactaggccgtgtagaggacttctacaggaaattgaaaggactcaatgacgcgaccacagcagcagaggaggcagaggccctccagtgggtagtggggaccgaagtggaaatcatcaaccaacaattagcagattttaaaatgtttcagaaagaacaagtggatcctcttcagatgaaattgcagcaggtgaatggacttggccagggattaattcagagtgcaggaaaagactgtgatgtacagggtttagaacatgacatggaagagatcaatgctcgatggaatacattgaataaaaaggtcgcacaaagaattgcacagctacaggaagctttgttgcattgtgggaagtttcaagatgccttggagccattgctcagctggttggcagataccgaggagctcatagccaatcagaaacctccatctgctgagtataaagtggtgaaagcacagatccaagaacagaagttgctccagcggctcctagatgatcgaaaggccacagtagacatgcttcaagcagaaggaggcagaatagcccagtcagcagagctggctgatagagagaaaatcactggacagctggagagtcttgaaagtagatggactgaactactcagtaaggcagcagccaggcaaaaacagctggaagacatcctggttctggccaaacagttccatgagacagctgagcctatttctgacttcttatctgtcacagagaaaaagcttgctaactcagaacctgttggcactcagactgccaaaatacagcagcagatcattcggcacaaggctctggaagaagacatagaaaaccatgcaacagatgtgcaccaggcagtcaaaattgggcagtccctctcctccctgacatctcctgcagaacagggtgtgctgtcagaaaagatagactcattgcaggcccgatacagtgaaattcaagaccgctgttgtcggaaggcagccctacttgaccaagctctgtctaatgctaggctgtttggggaggatgaggtggaggtgctcaactggctggctgaggttgaggacaagctcagttcagtgttcgtaaaggatttcaaacaggatgtcctgcacaggcagcatgctgaccacctggctttaaatgaagaaattgttaatagaaagaagaatgtagatcaagctattaaaaatggtcaggctcttctaaaacaaaccacaggtgaggaggtgttacttatccaggaaaaactagatggtataaagactcgttacgcagacatcacagttactagctccaaggccctcagaactttagagcaagcccggcagctggccaccaagttccagtctacttatgaggaactgaccgggtggctgagggaggtggaggaggagctggcaaccagtggaggacagtctcccacaggggaacagataccccagtttcagcagagacagaaggaattaaagaaggaggtcatggagcacaggctggtgttggacacagtgaatgaggtgagccgtgctctcttagagctggtgccctggagagccagagaagggctggataaacttgtgtccgatgctaacgagcagtacaaactagtcagtgacactattggacaaagggtggatgaaattgatgctgctattcagagatcacaacagtatgagcaagctgccgatgcagaactagcttgggttgctgaaacaaaacggaaactgatggctctgggtccaattcgcctggaacaggaccagaccacagctcagcttcaggtacagaaggctttctccattgacattattcgacacaaagattcaatggatgaactcttcagtcaccgtagtgaaatctttggcacatgtggggaggagcaaaaaactgtattacaggaaaagacagagtctctaatacagcaatatgaagccattagcctactcaattcagagcgttatgcccgcctagagcgggcccaggtcttagtaaaccagttttgggaaacttatgaagagctcagcccctggattgaggaaactcgggcactaatagcacagttaccctctccagccattgatcatgagcagctcaggcagcaacaagaggaaatgaggcaattaagggaatctattgctgaacacaaacctcatattgacaaactactaaagataggcccacaactaaaggaattaaaccctgaggaaggggaaatggtggaagaaaaataccagaaagcagaaaacatgtatgcccaaataaaggaggaggtgcgccagcgagccctggctctggatgaagccgtgtcccagtccacacagattacagagtttcatgataaaattgagcctatgttggagacactggagaatctttcctctcgcctgcgtatgccaccactgatccctgctgaagtagacaagatcagagagtgcatcagtgacaataagagtgccaccgtggagctagaaaaactgcagccatcctttgaggccttgaagcgccgtggagaggagcttattggacgatctcagggagcagacaaggatctggctgcaaaagaaatccaggataaattggatcaaatggtattcttctgggaggacatcaaagctcgggctgaagaacgagaaatcaaatttcttgatgtccttgaattagcagagaagttctggtatgacatggcagctctcctgaccaccatcaaagacacccaggatattgtccatgacttggaaagcccaggcattgatccttccatcatcaaacaacaggttgaagctgctgagactattaaggaagagacagatggtctgcatgaagagctggagtttattcggatccttggagcagatttgatttttgcctgtggagaaactgagaagcctgaagtgaggaagagcattgatgagatgaataatgcttgggagaacttaaacaaaacatggaaagagaggctagaaaaacttgaggatgctatgcaagctgctgtgcagtatcaggacactcttcaggctatgtttgactggctagataacactgtgattaaactctgcaccatgccccctgttggcactgacctcaatactgttaaagatcagttaaatgaaatgaaggagttcaaagtagaagtttaccaacagcaaattgagatggagaagcttaatcaccagggtgaactgatgttaaagaaagctactgatgagacggacagagacattatacgagaaccactgacagaactcaaacacctctgggagaacctgggtgagaaaattgcccaccgacagcacaaactagaaggggctctgttggcccttggtcagttccagcatgccttagaggaactaatgagttggctgactcataccgaagagttgttagatgctcagagaccaataagtggagacccaaaagtcattgaagttgagctcgcaaagcaccatgtcctaaaaaatgatgttttggctcatcaagccacagtggaaacagtcaacaaagctggcaatgagcttcttgaatccagtgctggagatgatgccagcagcttaaggagccgtttggaagccatgaaccaagactgtacgtcacatttagaggcagcgagagagtagcagaatccaggtctgagctccatatgccacagtgcccagcatcatatgctatgctggtatatagtctagtggctgtcagttcaatggagagccagctttctgcatctaagcccacaggaggacttcctgaaactgctagggaacagcttgatacacatatggaactctattcccagctgaaagccaaggaagagacttataatcaactacttgacaagggcagactcatgcttctaagccgtgacgactctgggtctggctccaagacagaacagagtgtagcacttttggagcagaagtggcatgtggtcagcagtaagatggaagaaagaaagtcaaagctggaagaggccctcaacttggcaacagaattccagaattccctacaagaatttatcaactggctcactctagcagagcagagtttaaacatcgcttctccaccaagcctgattctaaatactgtcctttcccagatagaagagcacaaggtttttgctaatgaagtaaatgctcatcgagaccagatcattgagctggatcaaactgggaatcaattaaagttccttagccaaaagcaggatgttgttctgatcaagaatttgttggtgagcgtgcagtctcgatgggagaaggttgtccagcgatctattgaaagagggcgatcactagatgatgccaggaagcgggcaaaacaattccatgaagcttggaaaaaactgattgactggctagaagatgcagagagtcacctggactcagaactagagatatccaatgacccagacaaaattaaacttcagctttctaagcataaggagtttcagaagactcttggtggcaagcagcctgtgtatgataccacaattagaactggcagagcactgaaagaaaagactttgcttcccgaagatactcagaaacttgacaatttcctaggagaagtcagagacaaatgggatactgtttgtggcaagtctgtggagcggcagcacaagttggaggaagccctgctcttttcgggtcagttcatggatgctttgcaggcattggttgactggttatacaaggtggagccacagctggctgaggaccagcccgtgcacggggaccttgacctcgtcatgaacctcatggatgcacacaaggttttccagaaggaactgggaaagcgaacaggaaccgttcaggtcctgaagcggtcaggccgagagctgattgagaatagtcgagatgacaccacttgggtaaaaggacagctccaggaactgagcactcgctgggacactgtctgtaaactctctgtttccaaacaaagccggcttgagcaggccttaaaacaagcggaagtgtttcgagacacagtccacatgctgttggagtggctttctgaagcagagcaaacgcttcgctttcggggagcacttcctgatgacacagaggccctgcagtctctcattgacacccataaggaattcatgaagaaagtagaagaaaagcgagtggacgttaactcagcagtagccatgggagaagtcatcctggctgtctgccaccccgattgcatcacaaccatcaaacactggatcaccatcatccgagctcgcttcgaggaggtcctgacatgggctaagcagcaccagcagcgtcttgaaacggccttgtcagaactggtggctaatgctgagctcctggaagaacttctggcatggatccagtgggctgagaccaccctcattcagcgggatcaggagccaatcccgcagaacattgaccgagttaaagcccttatcgctgagcatcagacatttatggaggagatgactcgcaaacagcctgacgtggaccgggtcaccaagacatacaaaaggaaaaacatagagcctactcacgcgcctttcatagagaaatcccgcagcggaggcaggaaatccctaagtcagccaacccctcctcccatgccaatcctttcacagtctgaagcaaaaaacccacggatcaaccagctttctgcccgctggcagcaggtgtggctgttagcactggagcggcaaaggaaactgaatgatgccttggatcggctggaggagttgaaagaatttgccaactttgactttgatgtctggaggaggcgcattgataaggaccaggatgggaagataacacgtcaggagtttatcgatggcattttagcatccaagttccccaccaccaagttagagatgactgctgtggctgacattttcgaccgagatggggatggttacattgattattatgaatttgtggctgctcttcatcccaacaaggatgcgtatcgaccaacaaccgatgcagataaaatcgaagatgaggttacaagacaagtggctcagtgcaaatgtgcaaaaaggtttcaggtggagcagatcggagagaataaataccggtttggggattctcagcagttgcggctggtccgtattctgcgcagcaccgtgatggttcgcgttggtggaggatggatggccttggatgaatttttagtgaaaaatgatccctgccgagcacgaggtagaactaacattgaacttagagagaaattcatcctaccagagggagcatcccagggaatgacccccttccgctcacggggtcgaaggtccaaaccatcttcccgggcagcttcccctactcgttccagctccagtgctagtcagagtaaccacagctgtacatccatgccatcttctccagccaccccagccagtggaaccaagacttcacttcagttctctcgctgttatgacaaaccctggttggtaaacagtaaagctggcacccctatcagggacagccattctcctgacctccagctgcccacccccgaggttatcccatcatcaggtagcaagttgaaacgaccaacaccaacttttcattctagtcggacatcccttgctggtgataccagcaatagttcttccccggcctccacaggtgccaaaactaatcgggcagaccctaaaaagtctgccagtcgccctgggagtcgggctgggagtcgagccgggagtcgagccagcagccggcgaggaagtgacgcttctgactttgacctcttagagacgcagtctgcttgttccgacacttcagaaagcagcgctgcagggggccaaggcaactccaggagagggctaaacaaaccttccaaaatcccaaccatgtctaagaagaccaccactgcctcccccaggactccaggtcccaagcgataacactgtctaagcacccccaagccactatccactttgaatcctgctccatacattgggtgtatatttattctgaacgggagaagttatattgttaaaagtgtaaaagaataattgtgttatgaagctgccttattttttttctttttgtaagttactattttcatgtgaatatttatgtagataaaatttgcctcctggtaaccctgtaatggatggggcccagaaatgaaatatttgagaaaaacaagtgaaaaggtcaagatacaaatgtgtattaaaaaaaaaaaagcctattaatagggtttctgcgcggtgcagggttgtaaacctgctttatcttttaggattattcctaaatgcatcttctttataaacttgacttgctatctcagcaagataaattatattaaaaaaataagaatcctgcagtgtttaaggaactctttttttgtaaatcacggacacctcaattagcaagaactgaggggagggctttttccattgtttaatgttttgtgatttttagctaaagagagggaacctcatctaagtaacatttgcacatgatacagcaaaaggagttcattgcaatactgtctttggatattgtttcagtactgggtgtttaaaggacaaatagctgctagaattcaggggtaaatgtaagtgttcagaaaacgtcagaacatttggggttttaaactgatttgttgctccctatccagcctagacaccagtaactcttgtgttcaccaggacccagacccttggcaagggataggctcgttggtgacattgtgaatttcagatttgttttatccactttttttgctatttatttaaatggtcgatcaacttcccacaaactgaggaatgaattccacgagcctgttctgaaaatgtggacgtaagacaaacacgtgctcgtcctttaatggagttcaccagcacacttgttaaccagtcctgtttgctttcgtctttttttgtgcgtaataaagtcaactgaccaagtgaccatgaaaaggggctgtctggggctcctgttttttagctgctgttcttcagctccgaccatgttgctgtgtgattatctcaattggttttaattgaggcagaaactgaagctctaccaatgaactgtttagaaacaagacacacttttgtattaaaattgcttgcagtaacaaa

SEQ ID NO: 367585 - DNA, 18411 bp, Homo sapiens
  misc_feature (995)..(995): n is a, c, g, or t
  misc_feature (1066)..(1066): n is a, c, g, or t
  misc_feature (1076)..(1076): n is a, c, g, or t
tcaaaacaccatctattaaagctgacaattgtcacaagcagaattgaatactcaaagggaagttaacttcacacagaaaaacacttcatatttcattcaacttgcaacgtatttactgagcgtctaccgtgtgtaaggcagcctgctaggaaatggggtacgaccctcctcctcacagagcttacattctgacaggggaacccgaagtgaacaagcatgatctgcaacaggtatgagatgtcaagaaagcctattacagaggcacccaggcccagtctacggggtcactaaaggctatgggataaactgatctgaaggatgagcacaaatcaatcatcgagaggctgagagcagctcaagtcgggggaataagatgtgcgagaagcaggagagagcaggatgaaataaaatcaggcccgtgtgatgcgtggtgaacagtgagtacccagagaagcgaagctgggggctgaggggctggtcaggaacacgggcttaattcatcaacccaacagcaaacatcagtgcaacaatgtaagcacatttaccttctgggtcataatgtaatttcttccaaagccagtggtggcactcagatatttgatcagaggattgacagattcaggcttttggtggaaaagccatacctggaaaggaaggatgtgtcaatgatttgtttcttctgcccaaggtgagtgaggctggtggagagtcactatctgcactttatagagctccccagacaaattataaacatcctctcaaatatcatcagtgaatggtttggcaaatatattgagaaccaattaaaatatagtttaaaagcacttgcttctacaaccaatttgtattcccacaataaatgtatttatttctgtaacacttaccaaaacaagagcatcaaagccaattccttcacactgccctccctcccacctgctcttcatgaggagtcctttattcctgcatgtttcctgttctttgggccggaattccgnggcgcgatgtcggctcactacaacctctgcctcctggattcaagcaattctgtacctcagcctcccgagtngctgtgattncagatgaacgggaccgggttcagaagaaaacgttcaccaagtgggtcaacaagcacttaatgaaggtccgcaagcacatcaatgatctttatgaagatctgcgggatggccataacctgatctctctgttggaggtcctctcaggcatcaaactgccccgggagaagggcaggatgcgttttcataggctgcagaatgtgcagattgccctggacttcctaaagcagcgacaggtgaaactagtgaatattcgcaatgatgacatcacagatggcaaccccaagttgaccctgggtctgatctggaccattattttgcatttccagatctctgacatctacattagtggagaatcaggggatatgtcagccaaggagaaactactcctgtggacccagaaggtgacagctggttacacaggaatcaaatgcaccaacttttcctcctgctggagtgatgggaagatgttcaatgcactcattcaccgataccgacccgatctagtagacatggagagggtgcaaatccaaagtaaccgagagaatctggaacaagcttttgaagtggcagaaagactgggggtcactcgcctgctggatgcagaagatgtggatgtgccatctccagatgaaaagtctgtaatcacttatgtgtcttcgatttatgatgccttccctaaagttcctgagggtggagaagggatcagtgctacggaagtggactccaggtggcaagaataccaaagccgagtggactccctcattccctggatcaaacagcatacaatactgatgtcagataaaacttttccccaaaaccctgttgaactaaaggcactttataaccaatatatacacttcaaagaaacagaaattctggccaaggagagagaaaaaggaagaattgaggaattatataaattactagaggtgtggattgaatttggccgaattaaactgcctcaaggttatcaccctaatgatgtggaagaagagtggggaaagctcatcatagagatgctggaacgagagaaatcacttcggccggctgtggagaggctggaattgctgctacagattgcaaacaaaatccagaatggtgctttgaactgtgaagaaaaactgacactagctaagaatacactgcaggctgatgctgctcacctggaatcaggacaaccggtacaatgtgagtcagatgtcattatgtacattcaagagtgtgaaggtctcatcaggcagctgcaggtggatctccagatcctgcgggatgagaattactaccagctagaagagctggcttttagggtcatgcgtcttcaggatgagctggtcaccttgcgtctagagtgtacaaacctgtaccggaagggtcatttcacttcacttgaattggttccaccctctactttaaccaccactcatctgaaagcagaacccttaaccaaggcaacccattcttcttctacctcctggttccgaaagcctatgactcgggctgaacttgggccatcagctcctctgaagatgaaggcaatctccgatttgtgtatgaactactgtctttgggtagaagagatgcagatgaaactggagcgagcagagtggggcaatgacctgcctagtgtggagttgcagctagaaacacagcagcacatccatacgagtgtagaagagctgggctcaagtgtcaaggaggccaggttgtatgagggaaagatgtcccagaatttccataccagctatgctgaaactcttggaaagctggagacacagtattgtaaattgaaggaaacttctagcttccggatgaggcaccttcagagcctgcataaatttgtttccagagctacagctgagttgatctggttgaatgagaaggaggaggaggaactagcatatgactggagtgacaacaattccaatatctcagccaagagaaattacttctctgagttgacaatggaactggaggagaaacaggatgtgtttcgttctctacaagatacagcagaactactttcacttgagaaccacccagccaagcagacagtggaggcttacagtgctgctgtccagtcccagttgcagtggatgaagcagctgtgcctgtgtgttgagcagcatgtgaaagagaatactgcttattttcagttcttcagtgatgcacgagagctggagtcattcttgaggaacctccaagattccattaaacgaaaatattcctgtgaccacaacaccagcttatcccgccttgaagacctgctccaggactccatggatgaaaaggagcagcttatacagtccaagagttccgttgccagtctcgttgggagatcaaaaaccatcgttcagctaaaaccacgcagtccagaccatgtgttaaagaacaccatttctgtcaaggctgtctgtgactacaggcagatcgagattactatttgcaaaaatgatgaatgtgtgctagaagataattctcagcggaccaaatggaaagtgatcagccccacagggaacgaggcaatggtgccgtcagtctgcttcctcatccccccacccaataaggatgccattgagatggccagcagggtcgaacaatcttatcagaaggttatggccctttggcatcagctgcatgttaacaccaaaagccttatctcttggaactatctgcgtaaagaccttgaccttgtacagacctggaacctagaaaagcttcgatcctcagcaccaggggagtgccatcagattatgaagaaccttcaggcccactatgaagactttctgcaggatagtcgtgactctgtgctgttctcagtggctgatcgcttgcgcttggaagaggaggtggaagcttgtaaagcccgcttccagcacctgatgaagtccatggagaatgaggacaaagaggagactgtggccaagatgtacatttcagagttgaagaacatccggctacgcctggaggagtatgaacagagggtggtcaaacgaattcagtctctagccagctctaggactgacagagatgcctggcaggacaatgcattaaggattgcagagcaagagcacacccaggaggatttacagcaattgaggtcagacttggatgcagtttctatgaaatgtgacagctttctccatcagtctccatctagttcaagtgtcccaactctgcgctcagaactgaatctgctggtggagaagatggaccatgtctatggtctctctactgtatatctgaataagttaaagacagttgatgttatagtacgtagcatacaggatgctgaactcttggtcaaaggttatgagattaagctgagtcaagaagaagtagtactggcagatctctcagctctggaggcccattggtcgacattacggcactggcttagtgatgtgaaggacaagaattcagtgttttcagtcctggatgaggaaattgccaaggccaaggtagtggcagagcagatgagtcgtctgacaccagagcgaaatctggatttggagcgctatcaggaaaaaggctcccagctgcaggagcgttggcaccgagtcattgcccagctcgagattcgccaatctgagctagaaagtatccaggaagttctgggagattaccgagcctgccatggaactctcatcaagtggattgaggaaaccactgcccagcaggaaatgatgaagccaggccaggcagaggatagcagagtgctttcggagcagctcagccagcagacggccctatttgcagaaattgagagaaatcagacaaaactggatcaatgtcaaaaattttcccagcagtactctactattgtaaaggactatgaattgcaactgatgacatacaaggcctttgtggaatcgcagcagaaatcccctggcaagcgccgtcgcatgctttcctcttcagatgccatcactcaagagttcatggacttaaggactcgctacacggcattggtgactttaacaactcagcacgtgaaatacatcagtgatgcactccggcgtctggaggaggaggagaaagtggtagaagaggagaaacaagaacatgtggagaaggttaaagaacttttgggctgggtgtctaccctagcgaggaatacacaaggaaaagctacctcatccgagaccaaagaatcaacagacattgaaaaagctattttggaacagcaggttctgtcagaagagctgacaacaaagaaagaacaagtctctgaagctattaaaacatcacagatcttcttggccaagcatggtcataagctctcagaaaaagagaagaaacaaatatctgagcaattgaatgccctaaacaaggcttaccatgacctttgtgatggttctgcaaatcagcttcagcagcttcagagccagttggctcaccagacagaacaaaagaccctgcagaaacaacaaaatacctgtcaccagcaactggaggatctttgcagttgggtaggacaggcagaaagagcactggcaggccaccaaggcagaaccacccagcaggatctctctgctttgcagaagaaccaaagtgacttgaaggatttacaggatgacattcagaatcgtgccacctcatttgccactgttgtcaaggacattgaggggttcatggaagagaatcagaccaagctgagcccacgtgagttgacagctcttcgggaaaagcttcatcaggctaaggagcaatatgaggcgctccaggaagagacacgtgtggcccagaaggaactggaggaagcagtgacctccgccttacagcaggagactgaaaagagtaaagcagcaaaggaactggcagagaacaagaagaagatcgatgctctcctggattgggtaacttcagtaggatcatctggtggacagctgctgaccaaccttccaggaatggagcagctctcgggagctagcttggagaaaggagccttggacaccactgatggttacatgggggtgaatcaagccccagagaaactggacaagcaatgtgagatgatgaaggcccgtcaccaagaattgctgtcccagcagcaaaatttcattctggccacccagtcagctcaggccttcttggatcagcatggccacaatctcacacctgaggagcaacagatgctgcaacagaagctgggagagctaaaggaacaatactctacttccctggcccaatcagaggcagaactgaagcaggtgcagacacttcaggatgagttgcagaaatttctgcaggatcataaagagtttgaaagctggttggaacgatccgagaaagagctggagaacatgcataagggaggcagcagccccgagacccttccctccctgctaaagcggcaaggaagcttctcagaggatgtcatttcccacaaaggagacttgagatttgtgactatctcaggacagaaagtcttggacatggaaaacagttttaaggaaggcaaagaaccatcagaaattggaaacttagtaaaggacaagttgaaggatgcaacagaaagatacactgctctccactcaaagtgtacacgattaggatctcacctgaatatgctgttaggccagtatcatcaattccaaaacagtgctgacagcctgcaggcctggatgcaggcttgtgaggccaacgtggagaagctcctctcagatactgttgcctctgaccctggagttctccaggagcagcttgcaacaacaaagcagttgcaggaggaattggctgagcaccaagtacctgtggaaaaactccaaaaagtagctcgtgacataatggaaattgaaggggagccagccccagaccacaggcatgttcaagaaactacagattccatactcagccacttccaaagcctctcctatagcctggctgagcgatcttctctgctgcagaaagcaattgcccaatctcagagtgtccaggaaagcctggagagcctgttgcagtctattggggaagttgaacaaaacctggaagggaagcaggtgtcatcactctcatcaggagtcatccaggaagccttagccacaaatatgaaattgaagcaggacattgctcggcaaaagagcagcttggaggccacccgtgagatggtgacccgattcatggagacagcagacagtactacagcagcagtgctgcagggcaaactggcagaggtgagccagcggttcgaacagctctgtctacagcagcaagaaaaggagagctccctaaagaagcttctaccccaggcagagatgtttgaacacctctctggtaagctgcagcagttcatggaaaacaaaagtcggatgctggcctctggaaatcagccagatcaagatattacacatttcttccaacagatccaggagctcaatttggaaatggaagaccaacaggagaacctagatactcttgagcacctggtcactgaactgagctcttgtggctttgcgctggacttgtgccagcatcaggacagggtacagaatctaagaaaagacttcacagagctacagaagacagttaaagagagagagaaagatgcatcatcttgccaggaacagttggatgaattccggaagctggtcaggaccttccagaaatggttgaaagaaactgaagggagtattccacctacggaaacttctatgagtgctaaagagttagaaaagcagattgaacacctgaagagtctactagatgactgggcaagtaagggaactctggtggaagaaatcaattgcaaaggtacttctttagaaaatctcatcatggaaatcacagcacctgattcccaaggcaagacagatctgacggagatccagtgtgacatgtcagatgtaaacttgaagtatgagaaactagggggagtacttcatgaacgccaggaaagccttcaggctatcctcaacagaatggaggaggttcacaaggaggcaaactctgtgctgcagtggctggaatcaaaagaggaagtcctgaaatccatggatgccatgtcatctccaaccaagacagaaacagtgaaagcccaagctgaatctaacaaggccttcctggctgagttggaacagaattctccaaaaattcaaaaagtaaaggaagccctggctggattactggtgacatatcccaactcacaggaagcagaaaattggaagaaaattcaggaagaactcaattcccgatgggaaagggccactgaggttactgtggctcggcaaaggcagctagaggaatctgcaagtcatctggcctgcttccaggctgcagaatcccagctccggccgtggctgatggagaaagaactgatgatgggagtgctggggcccctgtctattgaccccaacatgttgaatgcacaaaagcaacaggtccagtttatgctaaaggaatttgaagcacgcaggcaacagcatgagcaactgaatgaggcagctcagggcatcctaacaggccctggagatgtctctctgtccaccagccaagtacagaaagaactccagagcatcaatcagaaatgggttgagctgactgacaaactcaactcccgttccagccaaattgaccaagctattgttaagagcacccagtaccaggaactgctccaggacttatcagagaaggtgagggcagttggacaacggctgagtgtccagtcagctatcagcacccaaccagaggctgtaaagcagcaattggaagagaccagtgaaattcgatctgacttggagcagttagaccacgaggttaaggaggctcagacactgtgcgatgaactctcagtgctcattggtgagcagtacctcaaggatgaactgaagaagcgtttggagacagttgccctgcctctccaaggtttagaagaccttgcagccgatcgcattaacagactccaggcagctcttgccagcacccagcagttccagcaaatgtttgatgagttgaggacctggttggatgataaacaaagccagcaagcaaaaaactgcccaatttctgcaaaattggagcggctacagtctcagctacaggagaatgaagagtttcagaaaagtcttaatcaacacagtggctcctatgaggtgattgtggctgaaggggaatctctacttctttctgtacctcctggagaagagaaaaggactctacaaaaccagttggttgagctcaaaaaccattgggaagagcttagtaaaaaaactgcagacagacaatccaggctcaaggattgtatgcagaaagctcagaaatatcagtggcatgtggaagaccttgtgccatggatagaagattgtaaagctaagatgtctgagttgcgagtcactctggatccagtgcagctagagtccagtctcctaagatcaaaggctatgctgaatgaggtggagaagcgccgctccctgctggaaatattgaatagtgctgctgacattctgatcaattcttcagaagcagatgaggatggaatccgggatgagaaggctgggatcaaccagaacatggatgctgttacagaagagctgcaggccaaaacagggtcactcgaagaaatgactcagaggctcagggagttccaggaaagctttaagaatattgaaaagaaggttgaaggagccaaacaccaacttgagatctttgatgctctgggttctcaagcctgtagcaacaagaacctggagaagctaagagctcaacaggaagtgctgcaggccctagagcctcaggtagactatctgaggaactttactcagggtctggtagaagatgccccagatggatctgatgcttctcaacttctccaccaagctgaggtcgcccagcaagagttcctcgaagttaagcaaagagtgaacagtggttgtgtgatgatggaaaacaagctggaggggattggccagtttcactgccgggtccgagagatgttctctcaattggcagacctggatgatgagctagatggcatgggtgctattggcagagacactgatagcctccagtcccaaatcgaggatgtccggctattccttaacaaaattcacgtcctcaaattagacatagaggcctctgaagcagagtgtcgacatatgctagaagaagaggggactctggatttgttaggtctcaaaagggagctagaagccctgaacaaacagtgtggcaaactgacagagagggggaaagctcgtcaggaacagctggaactgacactaggccgtgtagaggacttctacaggaaattgaaaggactcaatgacgcgaccacagcagcagaggaggcagaggccctccagtgggtagtggggaccgaagtggaaatcatcaaccaacaattagcagattttaaaatgtttcagaaagaacaagtggatcctcttcagatgaaattgcagcaggtgaatggacttggccagggattaattcagagtgcaggaaaagactgtgatgtacagggtttagaacatgacatggaagagatcaatgctcgatggaatacattgaataaaaaggtcgcacaaagaattgcacagctacaggaagctttgttgcattgtgggaagtttcaagatgccttggagccattgctcagctggttggcagataccgaggagctcatagccaatcagaaacctccatctgctgagtataaagtggtgaaagcacagatccaagaacagaagttgctccagcggctcctagatgatcgaaaggccacagtagacatgcttcaagcagaaggaggcagaatagcccagtcagcagagctggctgatagagagaaaatcactggacagctggagagtcttgaaagtagatggactgaactactcagtaaggcagcagccaggcaaaaacagctggaagacatcctggttctggccaaacagttccatgagacagctgagcctatttctgacttcttatctgtcacagagaaaaagcttgctaactcagaacctgttggcactcagactgccaaaatacagcagcagatcattcggcacaaggctctggaagaagacatagaaaaccatgcaacagatgtgcaccaggcagtcaaaattgggcagtccctctcctccctgacatctcctgcagaacagggtgtgctgtcagaaaagatagactcattgcaggcccgatacagtgaaattcaagaccgctgttgtcggaaggcagccctacttgaccaagctctgtctaatgctaggctgtttggggaggatgaggtggaggtgctcaactggctggctgaggttgaggacaagctcagttcagtgttcgtaaaggatttcaaacaggatgtcctgcacaggcagcatgctgaccacctggctttaaatgaagaaattgttaatagaaagaagaatgtagatcaagctattaaaaatggtcaggctcttctaaaacaaaccacaggtgaggaggtgttacttatccaggaaaaactagatggtataaagactcgttacgcagacatcacagttactagctccaaggccctcagaactttagagcaagcccggcagctggccaccaagttccagtctacttatgaggaactgaccgggtggctgagggaggtggaggaggagctggcaaccagtggaggacagtctcccacaggggaacagataccccagtttcagcagagacagaaggaattaaagaaggaggtcatggagcacaggctggtgttggacacagtgaatgaggtgagccgtgctctcttagagctggtgccctggagagccagagaagggctggataaacttgtgtccgatgctaacgagcagtacaaactagtcagtgacactattggacaaagggtggatgaaattgatgctgctattcagagatcacaacagtatgagcaagctgccgatgcagaactagcttgggttgctgaaacaaaacggaaactgatggctctgggtccaattcgcctggaacaggaccagaccacagctcagcttcaggtacagaaggctttctccattgacattattcgacacaaagattcaatggatgaactcttcagtcaccgtagtgaaatctttggcacatgtggggaggagcaaaaaactgtattacaggaaaagacagagtctctaatacagcaatatgaagccattagcctactcaattcagagcgttatgcccgcctagagcgggcccaggtcttagtaaaccagttttgggaaacttatgaagagctcagcccctggattgaggaaactcgggcactaatagcacagttaccctctccagccattgatcatgagcagctcaggcagcaacaagaggaaatgaggcaattaagggaatctattgctgaacacaaacctcatattgacaaactactaaagataggcccacaactaaaggaattaaaccctgaggaaggggaaatggtggaagaaaaataccagaaagcagaaaacatgtatgcccaaataaaggaggaggtgcgccagcgagccctggctctggatgaagccgtgtcccagtccacacagattacagagtttcatgataaaattgagcctatgttggagacactggagaatctttcctctcgcctgcgtatgccaccactgatccctgctgaagtagacaagatcagagagtgcatcagtgacaataagagtgccaccgtggagctagaaaaactgcagccatcctttgaggccttgaagcgccgtggagaggagcttattggacgatctcagggagcagacaaggatctggctgcaaaagaaatccaggataaattggatcaaatggtattcttctgggaggacatcaaagctcgggctgaagaacgagaaatcaaatttcttgatgtccttgaattagcagagaagttctggtatgacatggcagctctcctgaccaccatcaaagacacccaggatattgtccatgacttggaaagcccaggcattgatccttccatcatcaaacaacaggttgaagctgctgagactattaaggaagagacagatggtctgcatgaagagctggagtttattcggatccttggagcagatttgatttttgcctgtggagaaactgagaagcctgaagtgaggaagagcattgatgagatgaataatgcttgggagaacttaaacaaaacatggaaagagaggctagaaaaacttgaggatgctatgcaagctgctgtgcagtatcaggacactcttcaggctatgtttgactggctagataacactgtgattaaactctgcaccatgccccctgttggcactgacctcaatactgttaaagatcagttaaatgaaatgaaggagttcaaagtagaagtttaccaacagcaaattgagatggagaagcttaatcaccagggtgaactgatgttaaagaaagctactgatgagacggacagagacattatacgagaaccactgacagaactcaaacacctctgggagaacctgggtgagaaaattgcccaccgacagcacaaactagaaggggctctgttggcccttggtcagttccagcatgccttagaggaactaatgagttggctgactcataccgaagagttgttagatgctcagagaccaataagtggagacccaaaagtcattgaagttgagctcgcaaagcaccatgtcctaaaaaatgatgttttggctcatcaagccacagtggaaacagtcaacaaagctggcaatgagcttcttgaatccagtgctggagatgatgccagcagcttaaggagccgtttggaagccatgaaccaagactgtacgtcacatttagaggcagcgagagagtagcagaatccaggtctgagctccatatgccacagtgcccagcatcatatgctatgctggtatatagtctagtggctgtcagttcaatggagagccagctttctgcatctaagcccacaggaggacttcctgaaactgctagggaacagcttgatacacatatggaactctattcccagctgaaagccaaggaagagacttataatcaactacttgacaagggcagactcatgcttctaagccgtgacgactctgggtctggctccaagacagaacagagtgtagcacttttggagcagaagtggcatgtggtcagcagtaagatggaagaaagaaagtcaaagctggaagaggccctcaacttggcaacagaattccagaattccctacaagaatttatcaactggctcactctagcagagcagagtttaaacatcgcttctccaccaagcctgattctaaatactgtcctttcccagatagaagagcacaaggtttttgctaatgaagtaaatgctcatcgagaccagatcattgagctggatcaaactgggaatcaattaaagttccttagccaaaagcaggatgttgttctgatcaagaatttgttggtgagcgtgcagtctcgatgggagaaggttgtccagcgatctattgaaagagggcgatcactagatgatgccaggaagcgggcaaaacaattccatgaagcttggaaaaaactgattgactggctagaagatgcagagagtcacctggactcagaactagagatatccaatgacccagacaaaattaaacttcagctttctaagcataaggagtttcagaagactcttggtggcaagcagcctgtgtatgataccacaattagaactggcagagcactgaaagaaaagactttgcttcccgaagatactcagaaacttgacaatttcctaggagaagtcagagacaaatgggatactgtttgtggcaagtctgtggagcggcagcacaagttggaggaagccctgctcttttcgggtcagttcatggatgctttgcaggcattggttgactggttatacaaggtggagccacagctggctgaggaccagcccgtgcacggggaccttgacctcgtcatgaacctcatggatgcacacaaggttttccagaaggaactgggaaagcgaacaggaaccgttcaggtcctgaagcggtcaggccgagagctgattgagaatagtcgagatgacaccacttgggtaaaaggacagctccaggaactgagcactcgctgggacactgtctgtaaactctctgtttccaaacaaagccggcttgagcaggccttaaaacaagcggaagtgtttcgagacacagtccacatgctgttggagtggctttctgaagcagagcaaacgcttcgctttcggggagcacttcctgatgacacagaggccctgcagtctctcattgacacccataaggaattcatgaagaaagtagaagaaaagcgagtggacgttaactcagcagtagccatgggagaagtcatcctggctgtctgccaccccgattgcatcacaaccatcaaacactggatcaccatcatccgagctcgcttcgaggaggtcctgacatgggctaagcagcaccagcagcgtcttgaaacggccttgtcagaactggtggctaatgctgagctcctggaagaacttctggcatggatccagtgggctgagaccaccctcattcagcgggatcaggagccaatcccgcagaacattgaccgagttaaagcccttatcgctgagcatcagacatttatggaggagatgactcgcaaacagcctgacgtggaccgggtcaccaagacatacaaaaggaaaaacatagagcctactcacgcgcctttcatagagaaatcccgcagcggaggcaggaaatccctaagtcagccaacccctcctcccatgccaatcctttcacagtctgaagcaaaaaacccacggatcaaccagctttctgcccgctggcagcaggtgtggctgttagcactggagcggcaaaggaaactgaatgatgccttggatcggctggaggagttgaaagaatttgccaactttgactttgatgtctggaggaaaaagtatatgcgttggatgaatcacaaaaagtctcgagtgatggatttcttccggcgcattgataaggaccaggatgggaagataacacgtcaggagtttatcgatggcattttagcatccaagttccccaccaccaagttagagatgactgctgtggctgacattttcgaccgagatggggatggttacattgattattatgaatttgtggctgctcttcatcccaacaaggatgcgtatcgaccaacaaccgatgcagataaaatcgaagatgaggttacaagacaagtggctcagtgcaaatgtgcaaaaaggtttcaggtggagcagatcggagagaataaataccggttcttcctcggcaatcagtttggggattctcagcagttgcggctggtccgtattctgcgcagcaccgtgatggttcgcgttggtggaggatggatggccttggatgaatttttagtgaaaaatgatccctgccgagcacgaggtagaactaacattgaacttagagagaaattcatcctaccagagggagcatcccagggaatgacccccttccgctcacggggtcgaaggtccaaaccatcttcccgggcagcttcccctactcgttccagctccagtgctagtcagagtaaccacagctgtacatccatgccatcttctccagccaccccagccagtggaaccaagacttcacttcagttctctcgctgttatgacaaaccctggttggtaaacagtaaagctggcacccctatcagggacagccattctcctgacctccagctgcccacccccgaggttatcccatcatcaggtagcaagttgaaacgaccaacaccaacttttcattctagtcggacatcccttgctggtgataccagcaatagttcttccccggcctccacaggtgccaaaactaatcgggcagaccctaaaaagtctgccagtcgccctgggagtcgggctgggagtcgagccgggagtcgagccagcagccggcgaggaagtgacgcttctgactttgacctcttagagacgcagtctgcttgttccgacacttcagaaagcagcgctgcagggggccaaggcaactccaggagagggctaaacaaaccttccaaaatcccaaccatgtctaagaagaccaccactgcctcccccaggactccaggtcccaagcgataacactgtctaagcacccccaagccactatccactttgaatcctgctccatacattgggtgtatatttattctgaacgggagaagttatattgttaaaagtgtaaaagaataattgtgttatgaagctgccttattttttttctttttgtaagttactattttcatgtgaatatttatgtagataaaatttgcctcctggtaaccctgtaatggatggggcccagaaatgaaatatttgagaaaaacaagtgaaaaggtcaagatacaaatgtgtattaaaaaaaaaaaagcctattaatagggtttctgcgcggtgcagggttgtaaacctgctttatcttttaggattattcctaaatgcatcttctttataaacttgacttgctatctcagcaagataaattatattaaaaaaataagaatcctgcagtgtttaaggaactctttttttgtaaatcacggacacctcaattagcaagaactgaggggagggctttttccattgtttaatgttttgtgatttttagctaaagagagggaacctcatctaagtaacatttgcacatgatacagcaaaaggagttcattgcaatactgtctttggatattgtttcagtactgggtgtttaaaggacaaatagctgctagaattcaggggtaaatgtaagtgttcagaaaacgtcagaacatttggggttttaaactgatttgttgctccctatccagcctagacaccagtaactcttgtgttcaccaggacccagacccttggcaagggataggctcgttggtgacattgtgaatttcagatttgttttatccactttttttgctatttatttaaatggtcgatcaacttcccacaaactgaggaatgaattccacgagcctgttctgaaaatgtggacgtaagacaaacacgtgctcgtcctttaatggagttcaccagcacacttgttaaccagtcctgtttgctttcgtctttttttgtgcgtaataaagtcaactgaccaagtgaccatgaaaaggggctgtctggggctcctgttttttagctgctgttcttcagctccgaccatgttgctgtgtgattatctcaattggttttaattgaggcagaaactgaagctctaccaatgaactgtttagaaacaagacacacttttgtattaaaattgcttgcagtaacaaa

SEQ ID NO: 367586 - DNA, 19218 bp, Homo sapiens
  misc_feature (995)..(995): n is a, c, g, or t
  misc_feature (1066)..(1066): n is a, c, g, or t
  misc_feature (1076)..(1076): n is a, c, g, or t
tcaaaacaccatctattaaagctgacaattgtcacaagcagaattgaatactcaaagggaagttaacttcacacagaaaaacacttcatatttcattcaacttgcaacgtatttactgagcgtctaccgtgtgtaaggcagcctgctaggaaatggggtacgaccctcctcctcacagagcttacattctgacaggggaacccgaagtgaacaagcatgatctgcaacaggtatgagatgtcaagaaagcctattacagaggcacccaggcccagtctacggggtcactaaaggctatgggataaactgatctgaaggatgagcacaaatcaatcatcgagaggctgagagcagctcaagtcgggggaataagatgtgcgagaagcaggagagagcaggatgaaataaaatcaggcccgtgtgatgcgtggtgaacagtgagtacccagagaagcgaagctgggggctgaggggctggtcaggaacacgggcttaattcatcaacccaacagcaaacatcagtgcaacaatgtaagcacatttaccttctgggtcataatgtaatttcttccaaagccagtggtggcactcagatatttgatcagaggattgacagattcaggcttttggtggaaaagccatacctggaaaggaaggatgtgtcaatgatttgtttcttctgcccaaggtgagtgaggctggtggagagtcactatctgcactttatagagctccccagacaaattataaacatcctctcaaatatcatcagtgaatggtttggcaaatatattgagaaccaattaaaatatagtttaaaagcacttgcttctacaaccaatttgtattcccacaataaatgtatttatttctgtaacacttaccaaaacaagagcatcaaagccaattccttcacactgccctccctcccacctgctcttcatgaggagtcctttattcctgcatgtttcctgttctttgggccggaattccgnggcgcgatgtcggctcactacaacctctgcctcctggattcaagcaattctgtacctcagcctcccgagtngctgtgattncagatgaacgggaccgggttcagaagaaaacgttcaccaagtgggtcaacaagcacttaatgaaggtccgcaagcacatcaatgatctttatgaagatctgcgggatggccataacctgatctctctgttggaggtcctctcaggcatcaaactgccccgggagaagggcaggatgcgttttcataggctgcagaatgtgcagattgccctggacttcctaaagcagcgacaggtgaaactagtgaatattcgcaatgatgacatcacagatggcaaccccaagttgaccctgggtctgatctggaccattattttgcatttccagatctctgacatctacattagtggagaatcaggggatatgtcagccaaggagaaactactcctgtggacccagaaggtgacagctggttacacaggaatcaaatgcaccaacttttcctcctgctggagtgatgggaagatgttcaatgcactcattcaccgataccgacccgatctagtagacatggagagggtgcaaatccaaagtaaccgagagaatctggaacaagcttttgaagtggcagaaagactgggggtcactcgcctgctggatgcagaagatgtggatgtgccatctccagatgaaaagtctgtaatcacttatgtgtcttcgatttatgatgccttccctaaagttcctgagggtggagaagggatcagtgctacggaagtggactccaggtggcaagaataccaaagccgagtggactccctcattccctggatcaaacagcatacaatactgatgtcagataaaacttttccccaaaaccctgttgaactaaaggcactttataaccaatatatacacttcaaagaaacagaaattctggccaaggagagagaaaaaggaagaattgaggaattatataaattactagaggtgtggattgaatttggccgaattaaactgcctcaaggttatcaccctaatgatgtggaagaagagtggggaaagctcatcatagagatgctggaacgagagaaatcacttcggccggctgtggagaggctggaattgctgctacagattgcaaacaaaatccagaatggtgctttgaactgtgaagaaaaactgacactagctaagaatacactgcaggctgatgctgctcacctggaatcaggacaaccggtacaatgtgagtcagatgtcattatgtacattcaagagtgtgaaggtctcatcaggcagctgcaggtggatctccagatcctgcgggatgagaattactaccagctagaagagctggcttttagggtcatgcgtcttcaggatgagctggtcaccttgcgtctagagtgtacaaacctgtaccggaagggtcatttcacttcacttgaattggttccaccctctactttaaccaccactcatctgaaagcagaacccttaaccaaggcaacccattcttcttctacctcctggttccgaaagcctatgactcgggctgaacttgggccatcagctcctctgaagatgaaggcaatctccgatttgtgtatgaactactgtctttgggtagaagagatgcagatgaaactggagcgagcagagtggggcaatgacctgcctagtgtggagttgcagctagaaacacagcagcacatccatacgagtgtagaagagctgggctcaagtgtcaaggaggccaggttgtatgagggaaagatgtcccagaatttccataccagctatgctgaaactcttggaaagctggagacacagtattgtaaattgaaggaaacttctagcttccggatgaggcaccttcagagcctgcataaatttgtttccagagctacagctgagttgatctggttgaatgagaaggaggaggaggaactagcatatgactggagtgacaacaattccaatatctcagccaagagaaattacttctctgagttgacaatggaactggaggagaaacaggatgtgtttcgttctctacaagatacagcagaactactttcacttgagaaccacccagccaagcagacagtggaggcttacagtgctgctgtccagtcccagttgcagtggatgaagcagctgtgcctgtgtgttgagcagcatgtgaaagagaatactgcttattttcagttcttcagtgatgcacgagagctggagtcattcttgaggaacctccaagattccattaaacgaaaatattcctgtgaccacaacaccagcttatcccgccttgaagacctgctccaggactccatggatgaaaaggagcagcttatacagtccaagagttccgttgccagtctcgttgggagatcaaaaaccatcgttcagctaaaaccacgcagtccagaccatgtgttaaagaacaccatttctgtcaaggctgtctgtgactacaggcagatcgagattactatttgcaaaaatgatgaatgtgtgctagaagataattctcagcggaccaaatggaaagtgatcagccccacagggaacgaggcaatggtgccgtcagtctgcttcctcatccccccacccaataaggatgccattgagatggccagcagggtcgaacaatcttatcagaaggttatggccctttggcatcagctgcatgttaacaccaaaagccttatctcttggaactatctgcgtaaagaccttgaccttgtacagacctggaacctagaaaagcttcgatcctcagcaccaggggagtgccatcagattatgaagaaccttcaggcccactatgaagactttctgcaggatagtcgtgactctgtgctgttctcagtggctgatcgcttgcgcttggaagaggaggtggaagcttgtaaagcccgcttccagcacctgatgaagtccatggagaatgaggacaaagaggagactgtggccaagatgtacatttcagagttgaagaacatccggctacgcctggaggagtatgaacagagggtggtcaaacgaattcagtctctagccagctctaggactgacagagatgcctggcaggacaatgcattaaggattgcagagcaagagcacacccaggaggatttacagcaattgaggtcagacttggatgcagtttctatgaaatgtgacagctttctccatcagtctccatctagttcaagtgtcccaactctgcgctcagaactgaatctgctggtggagaagatggaccatgtctatggtctctctactgtatatctgaataagttaaagacagttgatgttatagtacgtagcatacaggatgctgaactcttggtcaaaggttatgagattaagctgagtcaagaagaagtagtactggcagatctctcagctctggaggcccattggtcgacattacggcactggcttagtgatgtgaaggacaagaattcagtgttttcagtcctggatgaggaaattgccaaggccaaggtagtggcagagcagatgagtcgtctgacaccagagcgaaatctggatttggagcgctatcaggaaaaaggctcccagctgcaggagcgttggcaccgagtcattgcccagctcgagattcgccaatctgagctagaaagtatccaggaagttctgggagattaccgagcctgccatggaactctcatcaagtggattgaggaaaccactgcccagcaggaaatgatgaagccaggccaggcagaggatagcagagtgctttcggagcagctcagccagcagacggccctatttgcagaaattgagagaaatcagacaaaactggatcaatgtcaaaaattttcccagcagtactctactattgtaaaggactatgaattgcaactgatgacatacaaggcctttgtggaatcgcagcagaaatcccctggcaagcgccgtcgcatgctttcctcttcagatgccatcactcaagagttcatggacttaaggactcgctacacggcattggtgactttaacaactcagcacgtgaaatacatcagtgatgcactccggcgtctggaggaggaggagaaagtggtagaagaggagaaacaagaacatgtggagaaggttaaagaacttttgggctgggtgtctaccctagcgaggaatacacaaggaaaagctacctcatccgagaccaaagaatcaacagacattgaaaaagctattttggaacagcaggttctgtcagaagagctgacaacaaagaaagaacaagtctctgaagctattaaaacatcacagatcttcttggccaagcatggtcataagctctcagaaaaagagaagaaacaaatatctgagcaattgaatgccctaaacaaggcttaccatgacctttgtgatggttctgcaaatcagcttcagcagcttcagagccagttggctcaccagacagaacaaaagaccctgcagaaacaacaaaatacctgtcaccagcaactggaggatctttgcagttgggtaggacaggcagaaagagcactggcaggccaccaaggcagaaccacccagcaggatctctctgctttgcagaagaaccaaagtgacttgaaggatttacaggatgacattcagaatcgtgccacctcatttgccactgttgtcaaggacattgaggggttcatggaagagaatcagaccaagctgagcccacgtgagttgacagctcttcgggaaaagcttcatcaggctaaggagcaatatgaggcgctccaggaagagacacgtgtggcccagaaggaactggaggaagcagtgacctccgccttacagcaggagactgaaaagagtaaagcagcaaaggaactggcagagaacaagaagaagatcgatgctctcctggattgggtaacttcagtaggatcatctggtggacagctgctgaccaaccttccaggaatggagcagctctcgggagctagcttggagaaaggagccttggacaccactgatggttacatgggggtgaatcaagccccagagaaactggacaagcaatgtgagatgatgaaggcccgtcaccaagaattgctgtcccagcagcaaaatttcattctggccacccagtcagctcaggccttcttggatcagcatggccacaatctcacacctgaggagcaacagatgctgcaacagaagctgggagagctaaaggaacaatactctacttccctggcccaatcagaggcagaactgaagcaggtgcagacacttcaggatgagttgcagaaatttctgcaggatcataaagagtttgaaagctggttggaacgatccgagaaagagctggagaacatgcataagggaggcagcagccccgagacccttccctccctgctaaagcggcaaggaagcttctcagaggatgtcatttcccacaaaggagacttgagatttgtgactatctcaggacagaaagtcttggacatggaaaacagttttaaggaaggcaaagaaccatcagaaattggaaacttagtaaaggacaagttgaaggatgcaacagaaagatacactgctctccactcaaagtgtacacgattaggatctcacctgaatatgctgttaggccagtatcatcaattccaaaacagtgctgacagcctgcaggcctggatgcaggcttgtgaggccaacgtggagaagctcctctcagatactgttgcctctgaccctggagttctccaggagcagcttgcaacaacaaagcagttgcaggaggaattggctgagcaccaagtacctgtggaaaaactccaaaaagtagctcgtgacataatggaaattgaaggggagccagccccagaccacaggcatgttcaagaaactacagattccatactcagccacttccaaagcctctcctatagcctggctgagcgatcttctctgctgcagaaagcaattgcccaatctcagagtgtccaggaaagcctggagagcctgttgcagtctattggggaagttgaacaaaacctggaagggaagcaggtgtcatcactctcatcaggagtcatccaggaagccttagccacaaatatgaaattgaagcaggacattgctcggcaaaagagcagcttggaggccacccgtgagatggtgacccgattcatggagacagcagacagtactacagcagcagtgctgcagggcaaactggcagaggtgagccagcggttcgaacagctctgtctacagcagcaagaaaaggagagctccctaaagaagcttctaccccaggcagagatgtttgaacacctctctggtaagctgcagcagttcatggaaaacaaaagtcggatgctggcctctggaaatcagccagatcaagatattacacatttcttccaacagatccaggagctcaatttggaaatggaagaccaacaggagaacctagatactcttgagcacctggtcactgaactgagctcttgtggctttgcgctggacttgtgccagcatcaggacagggtacagaatctaagaaaagacttcacagagctacagaagacagttaaagagagagagaaagatgcatcatcttgccaggaacagttggatgaattccggaagctggtcaggaccttccagaaatggttgaaagaaactgaagggagtattccacctacggaaacttctatgagtgctaaagagttagaaaagcagattgaacacctgaagagtctactagatgactgggcaagtaagggaactctggtggaagaaatcaattgcaaaggtacttctttagaaaatctcatcatggaaatcacagcacctgattcccaaggcaagacagatctgacggagatccagtgtgacatgtcagatgtaaacttgaagtatgagaaactagggggagtacttcatgaacgccaggaaagccttcaggctatcctcaacagaatggaggaggttcacaaggaggcaaactctgtgctgcagtggctggaatcaaaagaggaagtcctgaaatccatggatgccatgtcatctccaaccaagacagaaacagtgaaagcccaagctgaatctaacaaggccttcctggctgagttggaacagaattctccaaaaattcaaaaagtaaaggaagccctggctggattactggtgacatatcccaactcacaggaagcagaaaattggaagaaaattcaggaagaactcaattcccgatgggaaagggccactgaggttactgtggctcggcaaaggcagctagaggaatctgcaagtcatctggcctgcttccaggctgcagaatcccagctccggccgtggctgatggagaaagaactgatgatgggagtgctggggcccctgtctattgaccccaacatgttgaatgcacaaaagcaacaggtccagtttatgctaaaggaatttgaagcacgcaggcaacagcatgagcaactgaatgaggcagctcagggcatcctaacaggccctggagatgtctctctgtccaccagccaagtacagaaagaactccagagcatcaatcagaaatgggttgagctgactgacaaactcaactcccgttccagccaaattgaccaagctattgttaagagcacccagtaccaggaactgctccaggacttatcagagaaggtgagggcagttggacaacggctgagtgtccagtcagctatcagcacccaaccagaggctgtaaagcagcaattggaagagaccagtgaaattcgatctgacttggagcagttagaccacgaggttaaggaggctcagacactgtgcgatgaactctcagtgctcattggtgagcagtacctcaaggatgaactgaagaagcgtttggagacagttgccctgcctctccaaggtttagaagaccttgcagccgatcgcattaacagactccaggcagctcttgccagcacccagcagttccagcaaatgtttgatgagttgaggacctggttggatgataaacaaagccagcaagcaaaaaactgcccaatttctgcaaaattggagcggctacagtctcagctacaggagaatgaagagtttcagaaaagtcttaatcaacacagtggctcctatgaggtgattgtggctgaaggggaatctctacttctttctgtacctcctggagaagagaaaaggactctacaaaaccagttggttgagctcaaaaaccattgggaagagcttagtaaaaaaactgcagacagacaatccaggctcaaggattgtatgcagaaagctcagaaatatcagtggcatgtggaagaccttgtgccatggatagaagattgtaaagctaagatgtctgagttgcgagtcactctggatccagtgcagctagagtccagtctcctaagatcaaaggctatgctgaatgaggtggagaagcgccgctccctgctggaaatattgaatagtgctgctgacattctgatcaattcttcagaagcagatgaggatggaatccgggatgagaaggctgggatcaaccagaacatggatgctgttacagaagagctgcaggccaaaacagggtcactcgaagaaatgactcagaggctcagggagttccaggaaagctttaagaatattgaaaagaaggttgaaggagccaaacaccaacttgagatctttgatgctctgggttctcaagcctgtagcaacaagaacctggagaagctaagagctcaacaggaagtgctgcaggccctagagcctcaggtagactatctgaggaactttactcagggtctggtagaagatgccccagatggatctgatgcttctcaacttctccaccaagctgaggtcgcccagcaagagttcctcgaagttaagcaaagagtgaacagtggttgtgtgatgatggaaaacaagctggaggggattggccagtttcactgccgggtccgagagatgttctctcaattggcagacctggatgatgagctagatggcatgggtgctattggcagagacactgatagcctccagtcccaaatcgaggatgtccggctattccttaacaaaattcacgtcctcaaattagacatagaggcctctgaagcagagtgtcgacatatgctagaagaagaggggactctggatttgttaggtctcaaaagggagctagaagccctgaacaaacagtgtggcaaactgacagagagggggaaagctcgtcaggaacagctggaactgacactaggccgtgtagaggacttctacaggaaattgaaaggactcaatgacgcgaccacagcagcagaggaggcagaggccctccagtgggtagtggggaccgaagtggaaatcatcaaccaacaattagcagattttaaaatgtttcagaaagaacaagtggatcctcttcagatgaaattgcagcaggtgaatggacttggccagggattaattcagagtgcaggaaaagactgtgatgtacagggtttagaacatgacatggaagagatcaatgctcgatggaatacattgaataaaaaggtcgcacaaagaattgcacagctacaggaagctttgttgcattgtgggaagtttcaagatgccttggagccattgctcagctggttggcagataccgaggagctcatagccaatcagaaacctccatctgctgagtataaagtggtgaaagcacagatccaagaacagaagttgctccagcggctcctagatgatcgaaaggccacagtagacatgcttcaagcagaaggaggcagaatagcccagtcagcagagctggctgatagagagaaaatcactggacagctggagagtcttgaaagtagatggactgaactactcagtaaggcagcagccaggcaaaaacagctggaagacatcctggttctggccaaacagttccatgagacagctgagcctatttctgacttcttatctgtcacagagaaaaagcttgctaactcagaacctgttggcactcagactgccaaaatacagcagcagatcattcggcacaaggctctggaagaagacatagaaaaccatgcaacagatgtgcaccaggcagtcaaaattgggcagtccctctcctccctgacatctcctgcagaacagggtgtgctgtcagaaaagatagactcattgcaggcccgatacagtgaaattcaagaccgctgttgtcggaaggcagccctacttgaccaagctctgtctaatgctaggctgtttggggaggatgaggtggaggtgctcaactggctggctgaggttgaggacaagctcagttcagtgttcgtaaaggatttcaaacaggatgtcctgcacaggcagcatgctgaccacctggctttaaatgaagaaattgttaatagaaagaagaatgtagatcaagctattaaaaatggtcaggctcttctaaaacaaaccacaggtgaggaggtgttacttatccaggaaaaactagatggtataaagactcgttacgcagacatcacagttactagctccaaggccctcagaactttagagcaagcccggcagctggccaccaagttccagtctacttatgaggaactgaccgggtggctgagggaggtggaggaggagctggcaaccagtggaggacagtctcccacaggggaacagataccccagtttcagcagagacagaaggaattaaagaaggaggtcatggagcacaggctggtgttggacacagtgaatgaggtgagccgtgctctcttagagctggtgccctggagagccagagaagggctggataaacttgtgtccgatgctaacgagcagtacaaactagtcagtgacactattggacaaagggtggatgaaattgatgctgctattcagagatcacaacagtatgagcaagctgccgatgcagaactagcttgggttgctgaaacaaaacggaaactgatggctctgggtccaattcgcctggaacaggaccagaccacagctcagcttcaggtacagaaggctttctccattgacattattcgacacaaagattcaatggatgaactcttcagtcaccgtagtgaaatctttggcacatgtggggaggagcaaaaaactgtattacaggaaaagacagagtctctaatacagcaatatgaagccattagcctactcaattcagagcgttatgcccgcctagagcgggcccaggtcttagtaaaccagttttgggaaacttatgaagagctcagcccctggattgaggaaactcgggcactaatagcacagttaccctctccagccattgatcatgagcagctcaggcagcaacaagaggaaatgaggcaattaagggaatctattgctgaacacaaacctcatattgacaaactactaaagataggcccacaactaaaggaattaaaccctgaggaaggggaaatggtggaagaaaaataccagaaagcagaaaacatgtatgcccaaataaaggaggaggtgcgccagcgagccctggctctggatgaagccgtgtcccagtccacacagattacagagtttcatgataaaattgagcctatgttggagacactggagaatctttcctctcgcctgcgtatgccaccactgatccctgctgaagtagacaagatcagagagtgcatcagtgacaataagagtgccaccgtggagctagaaaaactgcagccatcctttgaggccttgaagcgccgtggagaggagcttattggacgatctcagggagcagacaaggatctggctgcaaaagaaatccaggataaattggatcaaatggtattcttctgggaggacatcaaagctcgggctgaagaacgagaaatcaaatttcttgatgtccttgaattagcagagaagttctggtatgacatggcagctctcctgaccaccatcaaagacacccaggatattgtccatgacttggaaagcccaggcattgatccttccatcatcaaacaacaggttgaagctgctgagactattaaggaagagacagatggtctgcatgaagagctggagtttattcggatccttggagcagatttgatttttgcctgtggagaaactgagaagcctgaagtgaggaagagcattgatgagatgaataatgcttgggagaacttaaacaaaacatggaaagagaggctagaaaaacttgaggatgctatgcaagctgctgtgcagtatcaggacactcttcaggctatgtttgactggctagataacactgtgattaaactctgcaccatgccccctgttggcactgacctcaatactgttaaagatcagttaaatgaaatgaaggagttcaaagtagaagtttaccaacagcaaattgagatggagaagcttaatcaccagggtgaactgatgttaaagaaagctactgatgagacggacagagacattatacgagaaccactgacagaactcaaacacctctgggagaacctgggtgagaaaattgcccaccgacagcacaaactagaaggggctctgttggcccttggtcagttccagcatgccttagaggaactaatgagttggctgactcataccgaagagttgttagatgctcagagaccaataagtggagacccaaaagtcattgaagttgagctcgcaaagcaccatgtcctaaaaaatgatgttttggctcatcaagccacagtggaaacagtcaacaaagctggcaatgagcttcttgaatccagtgctggagatgatgccagcagcttaaggagccgtttggaagccatgaaccaagactgtacgtcacatttagaggcagcgagagagtagcagaatccaggtctgagctccatatgccacagtgcccagcatcatatgctatgctggtatatagtctagtggctgtcagttcaatggagagccagctttctgcatctaagcccacaggaggacttcctgaaactgctagggaacagcttgatacacatatggaactctattcccagctgaaagccaaggaagagacttataatcaactacttgacaagggcagactcatgcttctaagccgtgacgactctgggtctggctccaagacagaacagagtgtagcacttttggagcagaagtggcatgtggtcagcagtaagatggaagaaagaaagtcaaagctggaagaggccctcaacttggcaacagaattccagaattccctacaagaatttatcaactggctcactctagcagagcagagtttaaacatcgcttctccaccaagcctgattctaaatactgtcctttcccagatagaagagcacaaggtttttgctaatgaagtaaatgctcatcgagaccagatcattgagctggatcaaactgggaatcaattaaagttccttagccaaaagcaggatgttgttctgatcaagaatttgttggtgagcgtgcagtctcgatgggagaaggttgtccagcgatctattgaaagagggcgatcactagatgatgccaggaagcgggcaaaacaattccatgaagcttggaaaaaactgattgactggctagaagatgcagagagtcacctggactcagaactagagatatccaatgacccagacaaaattaaacttcagctttctaagcataaggagtttcagaagactcttggtggcaagcagcctgtgtatgataccacaattagaactggcagagcactgaaagaaaagactttgcttcccgaagatactcagaaacttgacaatttcctaggagaagtcagagacaaatgggatactgtttgtggcaagtctgtggagcggcagcacaagttggaggaagccctgctcttttcgggtcagttcatggatgctttgcaggcattggttgactggttatacaaggtggagccacagctggctgaggaccagcccgtgcacggggaccttgacctcgtcatgaacctcatggatgcacacaaggttttccagaaggaactgggaaagcgaacaggaaccgttcaggtcctgaagcggtcaggccgagagctgattgagaatagtcgagatgacaccacttgggtaaaaggacagctccaggaactgagcactcgctgggacactgtctgtaaactctctgtttccaaacaaagccggcttgagcaggccttaaaacaagcggaagtgtttcgagacacagtccacatgctgttggagtggctttctgaagcagagcaaacgcttcgctttcggggagcacttcctgatgacacagaggccctgcagtctctcattgacacccataaggaattcatgaagaaagtagaagaaaagcgagtggacgttaactcagcagtagccatgggagaagtcatcctggctgtctgccaccccgattgcatcacaaccatcaaacactggatcaccatcatccgagctcgcttcgaggaggtcctgacatgggctaagcagcaccagcagcgtcttgaaacggccttgtcagaactggtggctaatgctgagctcctggaagaacttctggcatggatccagtgggctgagaccaccctcattcagcgggatcaggagccaatcccgcagaacattgaccgagttaaagcccttatcgctgagcatcagacatttatggaggagatgactcgcaaacagcctgacgtggaccgggtcaccaagacatacaaaaggaaaaacatagagcctactcacgcgcctttcatagagaaatcccgcagcggaggcaggaaatccctaagtcagccaacccctcctcccatgccaatcctttcacagtctgaagcaaaaaacccacggatcaaccagctttctgcccgctggcagcaggtgtggctgttagcactggagcggcaaaggaaactgaatgatgccttggatcggctggaggagttgaaagaatttgccaactttgactttgatgtctggaggaaaaagtatatgcgttggatgaatcacaaaaagtctcgagtgatggatttcttccggcgcattgataaggaccaggatgggaagataacacgtcaggagtttatcgatggcattttagcatccaagttccccaccaccaagttagagatgactgctgtggctgacattttcgaccgagatggggatggttacattgattattatgaatttgtggctgctcttcatcccaacaaggatgcgtatcgaccaacaaccgatgcagataaaatcgaagatgaggttacaagacaagtggctcagtgcaaatgtgcaaaaaggtttcaggtggagcagatcggagagaataaataccggttcttcctcggcaatcagtttggggattctcagcagttgcggctggtccgtattctgcgcagcaccgtgatggttcgcgttggtggaggatggatggccttggatgaatttttagtgaaaaatgatccctgccgagcacgaggtagaactaacattgaacttagagagaaattcatcctaccagagggagcatcccagggaatgacccccttccgctcacggggtcgaaggtccaaaccatcttcccgggcagcttcccctactcgttccagctccagtgctagtcagagtaaccacagctgtacatccatgccatcttctccagccaccccagccagtggaaccaagacttcacttcagttctctcgctgttatgacaaaccctggttggtaaacagtaaagctggcacccctatcagggacagccattctcctgacctccagctgcccacccccgaggttatcccatcatcaggtagcaagttgaaacgaccaacaccaacttttcattctagtcggacatcccttgctggtgataccagcaatagttcttccccggcctccacaggtgccaaaactaatcgggcaggtaagtacctgccccgtgacctacaagccaggctgagaatttggaaacaacagcctatgtggaatgtttcactgctcccaaggagcgggtaatgagagtggcacttagtgtgatgcccagaaagacagacctgcagatgctcaagtgacctttactttttctgtcattacagctagctttaagctttccttctgagatgagatgcttccacagccaaagctgggccatgcgttctcatcagaaatgatcacatttgagagaatgtaaaaggaaatgtgggtcttcctcagacaccagtccagtgttgggatgagcagcttgctagtaatttttccaacacgtcatacttactatggctgctgttgaaccaagaaaggcaggggaagatcacatctgttctcctgctactgttcctcatgggaacctaggaatcttccttcatttcctggctggctgcttcccctcattttgcctctatccatcctgcccatggattagcccggctggcaggctcacccacctgtgctgaggtggttgagcaaccttgcttgcctccactttggggccatggaaggtgacagtgctgctgatagagtggctttctaatccccaggaggcagcttctcaagtagaatcacaaagccagaaaaggcttcagcaacttctgtatggatgaggaaactggggtgcagaaaggctgtgagatttgcttaagatcacacaggatcagaaccctagcttctgctcacttgttcttccaccccatgccatctctattaagtctgctgttttattcttgaattccagaccctaaaaagtctgccagtcgccctgggagtcgggctgggagtcgagccgggagtcgagccagcagccggcgaggaagtgacgcttctgactttgacctcttagagacgcagtctgcttgttccgacacttcagaaagcagcgctgcagggggccaaggcaactccaggagagggctaaacaaaccttccaaaatcccaaccatgtctaagaagaccaccactgcctcccccaggactccaggtcccaagcgataacactgtctaagcacccccaagccactatccactttgaatcctgctccatacattgggtgtatatttattctgaacgggagaagttatattgttaaaagtgtaaaagaataattgtgttatgaagctgccttattttttttctttttgtaagttactattttcatgtgaatatttatgtagataaaatttgcctcctggtaaccctgtaatggatggggcccagaaatgaaatatttgagaaaaacaagtgaaaaggtcaagatacaaatgtgtattaaaaaaaaaaaagcctattaatagggtttctgcgcggtgcagggttgtaaacctgctttatcttttaggattattcctaaatgcatcttctttataaacttgacttgctatctcagcaagataaattatattaaaaaaataagaatcctgcagtgtttaaggaactctttttttgtaaatcacggacacctcaattagcaagaactgaggggagggctttttccattgtttaatgttttgtgatttttagctaaagagagggaacctcatctaagtaacatttgcacatgatacagcaaaaggagttcattgcaatactgtctttggatattgtttcagtactgggtgtttaaaggacaaatagctgctagaattcaggggtaaatgtaagtgttcagaaaacgtcagaacatttggggttttaaactgatttgttgctccctatccagcctagacaccagtaactcttgtgttcaccaggacccagacccttggcaagggataggctcgttggtgacattgtgaatttcagatttgttttatccactttttttgctatttatttaaatggtcgatcaacttcccacaaactgaggaatgaattccacgagcctgttctgaaaatgtggacgtaagacaaacacgtgctcgtcctttaatggagttcaccagcacacttgttaaccagtcctgtttgctttcgtctttttttgtgcgtaataaagtcaactgaccaagtgaccatgaaaaggggctgtctggggctcctgttttttagctgctgttcttcagctccgaccatgttgctgtgtgattatctcaattggttttaattgaggcagaaactgaagctctaccaatgaactgtttagaaacaagacacacttttgtattaaaattgcttgcagtaacaaa

SEQ ID NO: 367587 - DNA, 3425 bp, Homo sapiens
ttagaggatcccaccctactgtgcttctgggggaccttgacctcgtcactgagctcatggatgcacacaaggttttccagaaggaactgggaaagcgaacaggaaccgttcaggtcctgaagcggtcaggccgagagctgattgagaatagtcgagatgacaccacttgggtaaaaggacagctccaggaactgagcactcgctgggacactgtctgtaaactctctgtttccaaacaaagccggcttgagcaggccttaaaacaagcggaagtgtttcgagacacagtccacatgctgttggagtggctttctgaagcagagcaaacgcttcgctttcggggagcacttcctgatgacacagaggccctgcagtctctcattgacacccataaggaattcatgaagaaagtagaagaaaagcgagtggacgttaactcagcagtagccatgggagaagtcatcctggctgtctgccaccccgattgcatcacaaccatcaaacactggatcaccatcatccgagctcgcttcgaggaggtcctgacatgggctaagcagcaccagcagcgtcttgaaacggccttgtcagaactggtggctaatgctgagctcctggaagaacttctggcatggatccagtgggctgagaccaccctcattcagcgggatcaggagccaatcccgcagaacattgaccgagttaaagcccttatcgctgagcatcagacatttatggaggagatgactcgcaaacagcctgacgtggaccgggtcaccaagacatacaaaaggaaaaacatagagcctactcacgcgcctttcatagagaaatcccgcagcggaggcaggaaatccctaagtcagccaacccctcctcccatgccaatcctttcacagtctgaagcaaaaaacccacggatcaaccagctttctgcccgctggcagcaggtgtggctgttagcactggagcggcaaaggaaactgaatgatgccttggatcggctggaggagttgaaagaatttgccaactttgactttgatgtctggaggaaaaagtatatgcgttggatgaatcacaaaaagtctcgagtgatggatttcttccggcgcattgataaggaccaggatgggaagataacacgtcaggagtttatcgatggcattttagcatccaagttccccaccaccaagttagagatgactgctgtggctgacattttcgaccgagatggggatggttacattgattattatgaatttgtggctgctcttcatcccaacaaggatgcgtatcgaccaacaaccgatgcagataaaatcgaagatgaggttacaagacaagtggctcagtgcaaatgtgcaaaaaggtttcaggtggagcagatcggagagaataaataccggtttggggattctcagcagttgcggctggtccgtattctgcgcagcaccgtgatggttcgcgttggtggaggatggatggccttggatgaatttttagtgaaaaatgatccctgccgagcacgaggtagaactaacattgaacttagagagaaattcatcctaccagagggagcatcccagggaatgacccccttccgctcacggggtcgaaggtccaaaccatcttcccgggcagcttcccctactcgttccagctccagtgctagtcagagtaaccacagctgtacatccatgccatcttctccagccaccccagccagtggaaccaagacttcacttcagttctctcgctgttatgacaaaccctggttggtaaacagtaaagctggcacccctatcagggacagccattctcctgacctccagctgcccacccccgaggttatcccatcatcaggtagcaagttgaaacgaccaacaccaacttttcattctagtcggacatcccttgctggtgataccagcaatagttcttccccggcctccacaggtgccaaaactaatcgggcagaccctaaaaagtctgccagtcgccctgggagtcgggctgggagtcgagccgggagtcgagccagcagccggcgaggaagtgacgcttctgactttgacctcttagagacgcagtctgcttgttccgacacttcagaaagcagcgctgcagggggccaaggcaactccaggagagggctaaacaaaccttccaaaatcccaaccatgtctaagaagaccaccactgcctcccccaggactccaggtcccaagcgataacactgtctaagcacccccaagccactatccactttgaatcctgctccatacattgggtgtatatttattctgaacgggagaagttatattgttaaaagtgtaaaagaataattgtgttatgaagctgccttattttttttctttttgtaagttactattttcatgtgaatatttatgtagataaaatttgcctcctggtaaccctgtaatggatggggcccagaaatgaaatatttgagaaaaacaagtgaaaaggtcaagatacaaatgtgtattaaaaaaaaaaaagcctattaatagggtttctgcgcggtgcagggttgtaaacctgctttatcttttaggattattcctaaatgcatcttctttataaacttgacttgctatctcagcaagataaattatattaaaaaaataagaatcctgcagtgtttaaggaactctttttttgtaaatcacggacacctcaattagcaagaactgaggggagggctttttccattgtttaatgttttgtgatttttagctaaagagagggaacctcatctaagtaacatttgcacatgatacagcaaaaggagttcattgcaatactgtctttggatattgtttcagtactgggtgtttaaaggacaaatagctgctagaattcaggggtaaatgtaagtgttcagaaaacgtcagaacatttggggttttaaactgatttgttgctccctatccagcctagacaccagtaactcttgtgttcaccaggacccagacccttggcaagggataggctcgttggtgacattgtgaatttcagatttgttttatccactttttttgctatttatttaaatggtcgatcaacttcccacaaactgaggaatgaattccacgagcctgttctgaaaatgtggacgtaagacaaacacgtgctcgtcctttaatggagttcaccagcacacttgttaaccagtcctgtttgctttcgtctttttttgtgcgtaataaagtcaactgaccaagtgaccatgaaaaggggctgtctggggctcctgttttttagctgctgttcttcagctccgaccatgttgctgtgtgattatctcaattggttttaattgaggcagaaactgaagctctaccaatgaactgtttagaaacaagacacacttttgtattaaaattgcttgcagtaacaaa

SEQ ID NO: 367588 - DNA, 1970 bp, Homo sapiens
ctctacaggatctgatcgtaatatgtaaccaggtgcagcagagtggagagaataaataccggtttggggattctcagcagttgcggctggtccgtattctgcgcagcaccgtgatggttcgcgttggtggaggatggatggccttggatgaatttttagtgaaaaatgatccctgccgagcacgaggtagaactaacattgaacttagagagaaattcatcctaccagagggagcatcccagggaatgacccccttccgctcacggggtcgaaggtccaaaccatcttcccgggcagcttcccctactcgttccagctccagtgctagtcagagtaaccacagctgtacatccatgccatcttctccagccaccccagccagtggaaccaaggttatcccatcatcaggtagcaagttgaaacgaccaacaccaacttttcattctagtcggacatcccttgctggtgataccagcaatagttcttccccggcctccacaggtgccaaaactaatcgggcagaccctaaaaagtctgccagtcgccctgggagtcgggctgggagtcgagccgggagtcgagccagcagccggcgaggaagtgacgcttctgactttgacctcttagagacgcagtctgcttgttccgacacttcagaaagcagcgctgcagggggccaaggcaactccaggagagggctaaacaaaccttccaaaatcccaaccatgtctaagaagaccaccactgcctcccccaggactccaggtcccaagcgataacactgtctaagcacccccaagccactatccactttgaatcctgctccatacattgggtgtatatttattctgaacgggagaagttatattgttaaaagtgtaaaagaataattgtgttatgaagctgccttattttttttctttttgtaagttactattttcatgtgaatatttatgtagataaaatttgcctcctggtaaccctgtaatggatggggcccagaaatgaaatatttgagaaaaacaagtgaaaaggtcaagatacaaatgtgtattaaaaaaaaaaaagcctattaatagggtttctgcgcggtgcagggttgtaaacctgctttatcttttaggattattcctaaatgcatcttctttataaacttgacttgctatctcagcaagataaattatattaaaaaaataagaatcctgcagtgtttaaggaactctttttttgtaaatcacggacacctcaattagcaagaactgaggggagggctttttccattgtttaatgttttgtgatttttagctaaagagagggaacctcatctaagtaacatttgcacatgatacagcaaaaggagttcattgcaatactgtctttggatattgtttcagtactgggtgtttaaaggacaaatagctgctagaattcaggggtaaatgtaagtgttcagaaaacgtcagaacatttggggttttaaactgatttgttgctccctatccagcctagacaccagtaactcttgtgttcaccaggacccagacccttggcaagggataggctcgttggtgacattgtgaatttcagatttgttttatccactttttttgctatttatttaaatggtcgatcaacttcccacaaactgaggaatgaattccacgagcctgttctgaaaatgtggacgtaagacaaacacgtgctcgtcctttaatggagttcaccagcacacttgttaaccagtcctgtttgctttcgtctttttttgtgcgtaataaagtcaactgaccaagtgaccatgaaaaggggctgtctggggctcctgttttttagctgctgttcttcagctccgaccatgttgctgtgtgattatctcaattggttttaattgaggcagaaactgaagctctaccaatgaactgtttagaaacaagacacacttttgtattaaaattgcttgcagtaacaaa

SEQ ID NO: 367589 - DNA, 17535 bp, Homo sapiens
  misc_feature (995)..(995): n is a, c, g, or t
  misc_feature (1066)..(1066): n is a, c, g, or t
  misc_feature (1076)..(1076): n is a, c, g, or t
tcaaaacaccatctattaaagctgacaattgtcacaagcagaattgaatactcaaagggaagttaacttcacacagaaaaacacttcatatttcattcaacttgcaacgtatttactgagcgtctaccgtgtgtaaggcagcctgctaggaaatggggtacgaccctcctcctcacagagcttacattctgacaggggaacccgaagtgaacaagcatgatctgcaacaggtatgagatgtcaagaaagcctattacagaggcacccaggcccagtctacggggtcactaaaggctatgggataaactgatctgaaggatgagcacaaatcaatcatcgagaggctgagagcagctcaagtcgggggaataagatgtgcgagaagcaggagagagcaggatgaaataaaatcaggcccgtgtgatgcgtggtgaacagtgagtacccagagaagcgaagctgggggctgaggggctggtcaggaacacgggcttaattcatcaacccaacagcaaacatcagtgcaacaatgtaagcacatttaccttctgggtcataatgtaatttcttccaaagccagtggtggcactcagatatttgatcagaggattgacagattcaggcttttggtggaaaagccatacctggaaaggaaggatgtgtcaatgatttgtttcttctgcccaaggtgagtgaggctggtggagagtcactatctgcactttatagagctccccagacaaattataaacatcctctcaaatatcatcagtgaatggtttggcaaatatattgagaaccaattaaaatatagtttaaaagcacttgcttctacaaccaatttgtattcccacaataaatgtatttatttctgtaacacttaccaaaacaagagcatcaaagccaattccttcacactgccctccctcccacctgctcttcatgaggagtcctttattcctgcatgtttcctgttctttgggccggaattccgnggcgcgatgtcggctcactacaacctctgcctcctggattcaagcaattctgtacctcagcctcccgagtngctgtgattncagatgaacgggaccgggttcagaagaaaacgttcaccaagtgggtcaacaagcacttaatgaaggtccgcaagcacatcaatgatctttatgaagatctgcgggatggccataacctgatctctctgttggaggtcctctcaggcatcaaactgccccgggagaagggcaggatgcgttttcataggctgcagaatgtgcagattgccctggacttcctaaagcagcgacaggtgaaactagtgaatattcgcaatgatgacatcacagatggcaaccccaagttgaccctgggtctgatctggaccattattttgcatttccagatctctgacatctacattagtggagaatcaggggatatgtcagccaaggagaaactactcctgtggacccagaaggtgacagctggttacacaggaatcaaatgcaccaacttttcctcctgctggagtgatgggaagatgttcaatgcactcattcaccgataccgacccgatctagtagacatggagagggtgcaaatccaaagtaaccgagagaatctggaacaagcttttgaagtggcagaaagactgggggtcactcgcctgctggatgcagaagatgtggatgtgccatctccagatgaaaagtctgtaatcacttatgtgtcttcgatttatgatgccttccctaaagttcctgagggtggagaagggatcagtgctacggaagtggactccaggtggcaagaataccaaagccgagtggactccctcattccctggatcaaacagcatacaatactgatgtcagataaaacttttccccaaaaccctgttgaactaaaggcactttataaccaatatatacacttcaaagaaacagaaattctggccaaggagagagaaaaaggaagaattgaggaattatataaattactagaggtgtggattgaatttggccgaattaaactgcctcaaggttatcaccctaatgatgtggaagaagagtggggaaagctcatcatagagatgctggaacgagagaaatcacttcggccggctgtggagaggctggaattgctgctacagattgcaaacaaaatccagaatggtgctttgaactgtgaagaaaaactgacactagctaagaatacactgcaggctgatgctgctcacctggaatcaggacaaccggtacaatgtgagtcagatgtcattatgtacattcaagagtgtgaaggtctcatcaggcagctgcaggtggatctccagatcctgcgggatgagaattactaccagctagaagagctggcttttagggtcatgcgtcttcaggatgagctggtcaccttgcgtctagagtgtacaaacctgtaccggaagggtcatttcacttcacttgaattggttccaccctctactttaaccaccactcatctgaaagcagaacccttaaccaaggcaacccattcttcttctacctcctggttccgaaagcctatgactcgggctgaacttgggccatcagctcctctgaagatgaaggcaatctccgatttgtgtatgaactactgtctttgggtagaagagatgcagatgaaactggagcgagcagagtggggcaatgacctgcctagtgtggagttgcagctagaaacacagcagcacatccatacgagtgtagaagagctgggctcaagtgtcaaggaggccaggttgtatgagggaaagatgtcccagaatttccataccagctatgctgaaactcttggaaagctggagacacagtattgtaaattgaaggaaacttctagcttccggatgaggcaccttcagagcctgcataaatttgtttccagagctacagctgagttgatctggttgaatgagaaggaggaggaggaactagcatatgactggagtgacaacaattccaatatctcagccaagagaaattacttctctgagttgacaatggaactggaggagaaacaggatgtgtttcgttctctacaagatacagcagaactactttcacttgagaaccacccagccaagcagacagtggaggcttacagtgctgctgtccagtcccagttgcagtggatgaagcagctgtgcctgtgtgttgagcagcatgtgaaagagaatactgcttattttcagttcttcagtgatgcacgagagctggagtcattcttgaggaacctccaagattccattaaacgaaaatattcctgtgaccacaacaccagcttatcccgccttgaagacctgctccaggactccatggatgaaaaggagcagcttatacagtccaagagttccgttgccagtctcgttgggagatcaaaaaccatcgttcagctaaaaccacgcagtccagaccatgtgttaaagaacaccatttctgtcaaggctgtctgtgactacaggcagatcgagattactatttgcaaaaatgatgaatgtgtgctagaagataattctcagcggaccaaatggaaagtgatcagccccacagggaacgaggcaatggtgccgtcagtctgcttcctcatccccccacccaataaggatgccattgagatggccagcagggtcgaacaatcttatcagaaggttatggccctttggcatcagctgcatgttaacaccaaaagccttatctcttggaactatctgcgtaaagaccttgaccttgtacagacctggaacctagaaaagcttcgatcctcagcaccaggggagtgccatcagattatgaagaaccttcaggcccactatgaagactttctgcaggatagtcgtgactctgtgctgttctcagtggctgatcgcttgcgcttggaagaggaggtggaagcttgtaaagcccgcttccagcacctgatgaagtccatggagaatgaggacaaagaggagactgtggccaagatgtacatttcagagttgaagaacatccggctacgcctggaggagtatgaacagagggtggtcaaacgaattcagtctctagccagctctaggactgacagagatgcctggcaggacaatgcattaaggattgcagagcaagagcacacccaggaggatttacagcaattgaggtcagacttggatgcagtttctatgaaatgtgacagctttctccatcagtctccatctagttcaagtgtcccaactctgcgctcagaactgaatctgctggtggagaagatggaccatgtctatggtctctctactgtatatctgaataagttaaagacagttgatgttatagtacgtagcatacaggatgctgaactcttggtcaaaggttatgagattaagctgagtcaagaagaagtagtactggcagatctctcagctctggaggcccattggtcgacattacggcactggcttagtgatgtgaaggacaagaattcagtgttttcagtcctggatgaggaaattgccaaggccaaggtagtggcagagcagatgagtcgtctgacaccagagcgaaatctggatttggagcgctatcaggaaaaaggctcccagctgcaggagcgttggcaccgagtcattgcccagctcgagattcgccaatctgagctagaaagtatccaggaagttctgggagattaccgagcctgccatggaactctcatcaagtggattgaggaaaccactgcccagcaggaaatgatgaagccaggccaggcagaggatagcagagtgctttcggagcagctcagccagcagacggccctatttgcagaaattgagagaaatcagacaaaactggatcaatgtcaaaaattttcccagcagtactctactattgtaaaggactatgaattgcaactgatgacatacaaggcctttgtggaatcgcagcagaaatcccctggcaagcgccgtcgcatgctttcctcttcagatgccatcactcaagagttcatggacttaaggactcgctacacggcattggtgactttaacaactcagcacgtgaaatacatcagtgatgcactccggcgtctggaggaggaggagaaagtggtagaagaggagaaacaagaacatgtggagaaggttaaagaacttttgggctgggtgtctaccctagcgaggaatacacaaggaaaagctacctcatccgagaccaaagaatcaacagacattgaaaaagctattttggaacagcaggttctgtcagaagagctgacaacaaagaaagaacaagtctctgaagctattaaaacatcacagatcttcttggccaagcatggtcataagctctcagaaaaagagaagaaacaaatatctgagcaattgaatgccctaaacaaggcttaccatgacctttgtgatggttctgcaaatcagcttcagcagcttcagagccagttggctcaccagacagaacaaaagaccctgcagaaacaacaaaatacctgtcaccagcaactggaggatctttgcagttgggtaggacaggcagaaagagcactggcaggccaccaaggcagaaccacccagcaggatctctctgctttgcagaagaaccaaagtgacttgaaggatttacaggatgacattcagaatcgtgccacctcatttgccactgttgtcaaggacattgaggggttcatggaagagaatcagaccaagctgagcccacgtgagttgacagctcttcgggaaaagcttcatcaggctaaggagcaatatgaggcgctccaggaagagacacgtgtggcccagaaggaactggaggaagcagtgacctccgccttacagcaggagactgaaaagagtaaagcagcaaaggaactggcagagaacaagaagaagatcgatgctctcctggattgggtaacttcagtaggatcatctggtggacagctgctgaccaaccttccaggaatggagcagctctcgggagctagcttggagaaaggagccttggacaccactgatggttacatgggggtgaatcaagccccagagaaactggacaagcaatgtgagatgatgaaggcccgtcaccaagaattgctgtcccagcagcaaaatttcattctggccacccagtcagctcaggccttcttggatcagcatggccacaatctcacacctgaggagcaacagatgctgcaacagaagctgggagagctaaaggaacaatactctacttccctggcccaatcagaggcagaactgaagcaggtgcagacacttcaggatgagttgcagaaatttctgcaggatcataaagagtttgaaagctggttggaacgatccgagaaagagctggagaacatgcataagggaggcagcagccccgagacccttccctccctgctaaagcggcaaggaagcttctcagaggatgtcatttcccacaaaggagacttgagatttgtgactatctcaggacagaaagtcttggacatggaaaacagttttaaggaaggcaaagaaccatcagaaattggaaacttagtaaaggacaagttgaaggatgcaacagaaagatacactgctctccactcaaagtgtacacgattaggatctcacctgaatatgctgttaggccagtatcatcaattccaaaacagtgctgacagcctgcaggcctggatgcaggcttgtgaggccaacgtggagaagctcctctcagatactgttgcctctgaccctggagttctccaggagcagcttgcaacaacaaagcagttgcaggaggaattggctgagcaccaagtacctgtggaaaaactccaaaaagtagctcgtgacataatggaaattgaaggggagccagccccagaccacaggcatgttcaagaaactacagattccatactcagccacttccaaagcctctcctatagcctggctgagcgatcttctctgctgcagaaagcaattgcccaatctcagagtgtccaggaaagcctggagagcctgttgcagtctattggggaagttgaacaaaacctggaagggaagcaggtgtcatcactctcatcaggagtcatccaggaagccttagccacaaatatgaaattgaagcaggacattgctcggcaaaagagcagcttggaggccacccgtgagatggtgacccgattcatggagacagcagacagtactacagcagcagtgctgcagggcaaactggcagaggtgagccagcggttcgaacagctctgtctacagcagcaagaaaaggagagctccctaaagaagcttctaccccaggcagagatgtttgaacacctctctggtaagctgcagcagttcatggaaaacaaaagtcggatgctggcctctggaaatcagccagatcaagatattacacatttcttccaacagatccaggagctcaatttggaaatggaagaccaacaggagaacctagatactcttgagcacctggtcactgaactgagctcttgtggctttgcgctggacttgtgccagcatcaggacagggtacagaatctaagaaaagacttcacagagctacagaagacagttaaagagagagagaaagatgcatcatcttgccaggaacagttggatgaattccggaagctggtcaggaccttccagaaatggttgaaagaaactgaagggagtattccacctacggaaacttctatgagtgctaaagagttagaaaagcagattgaacacctgaagagtctactagatgactgggcaagtaagggaactctggtggaagaaatcaattgcaaaggtacttctttagaaaatctcatcatggaaatcacagcacctgattcccaaggcaagacagatctgacggagatccagtgtgacatgtcagatgtaaacttgaagtatgagaaactagggggagtacttcatgaacgccaggaaagccttcaggctatcctcaacagaatggaggaggttcacaaggaggcaaactctgtgctgcagtggctggaatcaaaagaggaagtcctgaaatccatggatgccatgtcatctccaaccaagacagaaacagtgaaagcccaagctgaatctaacaaggccttcctggctgagttggaacagaattctccaaaaattcaaaaagtaaaggaagccctggctggattactggtgacatatcccaactcacaggaagcagaaaattggaagaaaattcaggaagaactcaattcccgatgggaaagggccactgaggttactgtggctcggcaaaggcagctagaggaatctgcaagtcatctggcctgcttccaggctgcagaatcccagctccggccgtggctgatggagaaagaactgatgatgggagtgctggggcccctgtctattgaccccaacatgttgaatgcacaaaagcaacaggtccagtttatgctaaaggaatttgaagcacgcaggcaacagcatgagcaactgaatgaggcagctcagggcatcctaacaggccctggagatgtctctctgtccaccagccaagtacagaaagaactccagagcatcaatcagaaatgggttgagctgactgacaaactcaactcccgttccagccaaattgaccaagctattgttaagagcacccagtaccaggaactgctccaggacttatcagagaaggtgagggcagttggacaacggctgagtgtccagtcagctatcagcacccaaccagaggctgtaaagcagcaattggaagagaccagtgaaattcgatctgacttggagcagttagaccacgaggttaaggaggctcagacactgtgcgatgaactctcagtgctcattggtgagcagtacctcaaggatgaactgaagaagcgtttggagacagttgccctgcctctccaaggtttagaagaccttgcagccgatcgcattaacagactccaggcagctcttgccagcacccagcagttccagcaaatgtttgatgagttgaggacctggttggatgataaacaaagccagcaagcaaaaaactgcccaatttctgcaaaattggagcggctacagtctcagctacaggagaatgaagagtttcagaaaagtcttaatcaacacagtggctcctatgaggtgattgtggctgaaggggaatctctacttctttctgtacctcctggagaagagaaaaggactctacaaaaccagttggttgagctcaaaaaccattgggaagagcttagtaaaaaaactgcagacagacaatccaggctcaaggattgtatgcagaaagctcagaaatatcagtggcatgtggaagaccttgtgccatggatagaagattgtaaagctaagatgtctgagttgcgagtcactctggatccagtgcagctagagtccagtctcctaagatcaaaggctatgctgaatgaggtggagaagcgccgctccctgctggaaatattgaatagtgctgctgacattctgatcaattcttcagaagcagatgaggatggaatccgggatgagaaggctgggatcaaccagaacatggatgctgttacagaagagctgcaggccaaaacagggtcactcgaagaaatgactcagaggctcagggagttccaggaaagctttaagaatattgaaaagaaggttgaaggagccaaacaccaacttgagatctttgatgctctgggttctcaagcctgtagcaacaagaacctggagaagctaagagctcaacaggaagtgctgcaggccctagagcctcaggtagactatctgaggaactttactcagggtctggtagaagatgccccagatggatctgatgcttctcaacttctccaccaagctgaggtcgcccagcaagagttcctcgaagttaagcaaagagtgaacagtggttgtgtgatgatggaaaacaagctggaggggattggccagtttcactgccgggtccgagagatgttctctcaattggcagacctggatgatgagctagatggcatgggtgctattggcagagacactgatagcctccagtcccaaatcgaggatgtccggctattccttaacaaaattcacgtcctcaaattagacatagaggcctctgaagcagagtgtcgacatatgctagaagaagaggggactctggatttgttaggtctcaaaagggagctagaagccctgaacaaacagtgtggcaaactgacagagagggggaaagctcgtcaggaacagctggaactgacactaggccgtgtagaggacttctacaggaaattgaaaggactcaatgacgcgaccacagcagcagaggaggcagaggccctccagtgggtagtggggaccgaagtggaaatcatcaaccaacaattagcagattttaaaatgtttcagaaagaacaagtggatcctcttcagatgaaattgcagcaggtgaatggacttggccagggattaattcagagtgcaggaaaagactgtgatgtacagggtttagaacatgacatggaagagatcaatgctcgatggaatacattgaataaaaaggtcgcacaaagaattgcacagctacaggaagctttgttgcattgtgggaagtttcaagatgccttggagccattgctcagctggttggcagataccgaggagctcatagccaatcagaaacctccatctgctgagtataaagtggtgaaagcacagatccaagaacagaagttgctccagcggctcctagatgatcgaaaggccacagtagacatgcttcaagcagaaggaggcagaatagcccagtcagcagagctggctgatagagagaaaatcactggacagctggagagtcttgaaagtagatggactgaactactcagtaaggcagcagccaggcaaaaacagctggaagacatcctggttctggccaaacagttccatgagacagctgagcctatttctgacttcttatctgtcacagagaaaaagcttgctaactcagaacctgttggcactcagactgccaaaatacagcagcagatcattcggcacaaggctctggaagaagacatagaaaaccatgcaacagatgtgcaccaggcagtcaaaattgggcagtccctctcctccctgacatctcctgcagaacagggtgtgctgtcagaaaagatagactcattgcaggcccgatacagtgaaattcaagaccgctgttgtcggaaggcagccctacttgaccaagctctgtctaatgctaggctgtttggggaggatgaggtggaggtgctcaactggctggctgaggttgaggacaagctcagttcagtgttcgtaaaggatttcaaacaggatgtcctgcacaggcagcatgctgaccacctggctttaaatgaagaaattgttaatagaaagaagaatgtagatcaagctattaaaaatggtcaggctcttctaaaacaaaccacaggtgaggaggtgttacttatccaggaaaaactagatggtataaagactcgttacgcagacatcacagttactagctccaaggccctcagaactttagagcaagcccggcagctggccaccaagttccagtctacttatgaggaactgaccgggtggctgagggaggtggaggaggagctggcaaccagtggaggacagtctcccacaggggaacagataccccagtttcagcagagacagaaggaattaaagaaggaggtcatggagcacaggctggtgttggacacagtgaatgaggtgagccgtgctctcttagagctggtgccctggagagccagagaagggctggataaacttgtgtccgatgctaacgagcagtacaaactagtcagtgacactattggacaaagggtggatgaaattgatgctgctattcagagatcacaacagtatgagcaagctgccgatgcagaactagcttgggttgctgaaacaaaacggaaactgatggctctgggtccaattcgcctggaacaggaccagaccacagctcagcttcaggtacagaaggctttctccattgacattattcgacacaaagattcaatggatgaactcttcagtcaccgtagtgaaatctttggcacatgtggggaggagcaaaaaactgtattacaggaaaagacagagtctctaatacagcaatatgaagccattagcctactcaattcagagcgttatgcccgcctagagcgggcccaggtcttagtaaaccagttttgggaaacttatgaagagctcagcccctggattgaggaaactcgggcactaatagcacagttaccctctccagccattgatcatgagcagctcaggcagcaacaagaggaaatgaggcaattaagggaatctattgctgaacacaaacctcatattgacaaactactaaagataggcccacaactaaaggaattaaaccctgaggaaggggaaatggtggaagaaaaataccagaaagcagaaaacatgtatgcccaaataaaggaggaggtgcgccagcgagccctggctctggatgaagccgtgtcccagtccacacagattacagagtttcatgataaaattgagcctatgttggagacactggagaatctttcctctcgcctgcgtatgccaccactgatccctgctgaagtagacaagatcagagagtgcatcagtgacaataagagtgccaccgtggagctagaaaaactgcagccatcctttgaggccttgaagcgccgtggagaggagcttattggacgatctcagggagcagacaaggatctggctgcaaaagaaatccaggataaattggatcaaatggtattcttctgggaggacatcaaagctcgggctgaagaacgagaaatcaaatttcttgatgtccttgaattagcagagaagttctggtatgacatggcagctctcctgaccaccatcaaagacacccaggatattgtccatgacttggaaagcccaggcattgatccttccatcatcaaacaacaggttgaagctgctgagactattaaggaagagacagatggtctgcatgaagagctggagtttattcggatccttggagcagatttgatttttgcctgtggagaaactgagaagcctgaagtgaggaagagcattgatgagatgaataatgcttgggagaacttaaacaaaacatggaaagagaggctagaaaaacttgaggatgctatgcaagctgctgtgcagtatcaggacactcttcaggctatgtttgactggctagataacactgtgattaaactctgcaccatgccccctgttggcactgacctcaatactgttaaagatcagttaaatgaaatgaaggagttcaaagtagaagtttaccaacagcaaattgagatggagaagcttaatcaccagggtgaactgatgttaaagaaagctactgatgagacggacagagacattatacgagaaccactgacagaactcaaacacctctgggagaacctgggtgagaaaattgcccaccgacagcacaaactagaaggggctctgttggcccttggtcagttccagcatgccttagaggaactaatgagttggctgactcataccgaagagttgttagatgctcagagaccaataagtggagacccaaaagtcattgaagttgagctcgcaaagcaccatgtcctaaaaaatgatgttttggctcatcaagccacagtggaaacagtcaacaaagctggcaatgagcttcttgaatccagtgctggagatgatgccagcagcttaaggagccgtttggaagccatgaaccaagactgtacgtcacatttagaggcagcgagagagtagcagaatccaggtctgagctccatatgccacagtgcccagcatcatatgctatgctggtatatagtctagtggctgtcagttcaatggagagccagctttctgcatctaagcccacaggaggacttcctgaaactgctagggaacagcttgatacacatatggaactctattcccagctgaaagccaaggaagagacttataatcaactacttgacaagggcagactcatgcttctaagccgtgacgactctgggtctggctccaagacagaacagagtgtagcacttttggagcagaagtggcatgtggtcagcagtaagatggaagaaagaaagtcaaagctggaagaggccctcaacttggcaacagaattccagaattccctacaagaatttatcaactggctcactctagcagagcagagtttaaacatcgcttctccaccaagcctgattctaaatactgtcctttcccagatagaagagcacaaggtttttgctaatgaagtaaatgctcatcgagaccagatcattgagctggatcaaactgggaatcaattaaagttccttagccaaaagcaggatgttgttctgatcaagaatttgttggtgagcgtgcagtctcgatgggagaaggttgtccagcgatctattgaaagagggcgatcactagatgatgccaggaagcgggcaaaacaattccatgaagcttggaaaaaactgattgactggctagaagatgcagagagtcacctggactcagaactagagatatccaatgacccagacaaaattaaacttcagctttctaagcataaggagtttcagaagactcttggtggcaagcagcctgtgtatgataccacaattagaactggcagagcactgaaagaaaagactttgcttcccgaagatactcagaaacttgacaatttcctaggagaagtcagagacaaatgggatactgtttgtggcaagtctgtggagcggcagcacaagttggaggaagccctgctcttttcgggtcagttcatggatgctttgcaggcattggttgactggttatacaaggtggagccacagctggctgaggaccagcccgtgcacggggaccttgacctcgtcatgaacctcatggatgcacacaaggttttccagaaggaactgggaaagcgaacaggaaccgttcaggtcctgaagcggtcaggccgagagctgattgagaatagtcgagatgacaccacttgggtaaaaggacagctccaggaactgagcactcgctgggacactgtctgtaaactctctgtttccaaacaaagccggcttgagcaggccttaaaacaagcggaagtgtttcgagacacagtccacatgctgttggagtggctttctgaagcagagcaaacgcttcgctttcggggagcacttcctgatgacacagaggccctgcagtctctcattgacacccataaggaattcatgaagaaagtagaagaaaagcgagtggacgttaactcagcagtagccatgggagaagtcatcctggctgtctgccaccccgattgcatcacaaccatcaaacactggatcaccatcatccgagctcgcttcgaggaggtcctgacatgggctaagcagcaccagcagcgtcttgaaacggccttgtcagaactggtggctaatgctgagctcctggaagaacttctggcatggatccagtgggctgagaccaccctcattcagcgggatcaggagccaatcccgcagaacattgaccgagttaaagcccttatcgctgagcatcagacatttatggaggagatgactcgcaaacagcctgacgtggaccgggtcaccaagacatacaaaaggaaaaacatagagcctactcacgcgcctttcatagagaaatcccgcagcggaggcaggaaatccctaagtcagccaacccctcctcccatgccaatcctttcacagtctgaagcaaaaaacccacggatcaaccagctttctgcccgctggcagcaggtgtggctgttagcactggagcggcaaaggaaactgaatgatgccttggatcggctggaggagttgaaagaatttgccaactttgactttgatgtctggaggaaaaagtatatgcgttggatgaatcacaaaaagtctcgagtgatggatttcttccggcgcattgataaggaccaggatgggaagataacacgtcaggagtttatcgatggcattttagcatccaagttccccaccaccaagttagagatgactgctgtggctgacattttcgaccgagatggggatggttacattgattattatgaatttgtggctgctcttcatcccaacaaggatgcgtatcgaccaacaaccgatgcagataaaatcgaagatgaggttacaagacaagtggctcagtgcaaatgtgcaaaaaggtttcaggtggagcagatcggagagaataaataccggttcttcctcggcaatcagtttggggattctcagcagttgcggctggtccgtattctgcgcagcaccgtgatggttcgcgttggtggaggatggatggccttggatgaatttttagtgaaaaatgatccctgccgagcacgaggtagaactaacattgaacttagagagaaattcatcctaccagagggagcatcccagggaatgacccccttccgctcacggggtcgaaggtccaaaccatcttcccgggcagcttcccctactcgttccagctccagtgctagtcagagtaaccacagctgtacatccatgccatcttctccagccaccccagccagtggaaccaaggttatcccatcatcaggtagcaagttgaaacgaccaacaccaacttttcattctagtcggacatcccttgctggtgataccagcaatagttcttccccggcctccacaggtgccaaaactaatcgggcagaccctaaaaagtctgccagtcgccctgggagtcgggctgggagtcgagccgggagtcgagccagcagccggcgaggaagtgacgcttctgactttgacctcttagagacgcagtctgcttgttccgacacttcagaaagcagcgctgcagggggccaaggcaactccaggagagggctaaacaaaccttccaaaatcccaaccatgtctaagaagaccaccactgcctcccccaggactccaggtcccaagcgataacactgtctaagcacccccaagccactatccactttgaatcctgctccatacattgggtgtatatttattctgaacgggagaagttatattgttaaaagtgtaaaagaataattgtgttatgaagctgccttattttttttctttttgtaagttactattttcatgtgaatatttatgtagataaaatttgcctcctggtaaccctgtaatggatggggcccagaaatgaaatatttgagaaaaacaagtgaaaaggtcaagatacaaatgtgtattaaaaaaaaaaaagcctattaatagggtttctgcgcggtgcagggttgtaaacctgctttatcttttaggattattcctaaatgcatcttcacgacctcccctcccttgtttcagaggatgaggagatatacaataaaaatattcatcctc

SEQ ID NO: 367590 - DNA, 17340 bp, Homo sapiens
  misc_feature (995)..(995): n is a, c, g, or t
  misc_feature (1066)..(1066): n is a, c, g, or t
  misc_feature (1076)..(1076): n is a, c, g, or t
tcaaaacaccatctattaaagctgacaattgtcacaagcagaattgaatactcaaagggaagttaacttcacacagaaaaacacttcatatttcattcaacttgcaacgtatttactgagcgtctaccgtgtgtaaggcagcctgctaggaaatggggtacgaccctcctcctcacagagcttacattctgacaggggaacccgaagtgaacaagcatgatctgcaacaggtatgagatgtcaagaaagcctattacagaggcacccaggcccagtctacggggtcactaaaggctatgggataaactgatctgaaggatgagcacaaatcaatcatcgagaggctgagagcagctcaagtcgggggaataagatgtgcgagaagcaggagagagcaggatgaaataaaatcaggcccgtgtgatgcgtggtgaacagtgagtacccagagaagcgaagctgggggctgaggggctggtcaggaacacgggcttaattcatcaacccaacagcaaacatcagtgcaacaatgtaagcacatttaccttctgggtcataatgtaatttcttccaaagccagtggtggcactcagatatttgatcagaggattgacagattcaggcttttggtggaaaagccatacctggaaaggaaggatgtgtcaatgatttgtttcttctgcccaaggtgagtgaggctggtggagagtcactatctgcactttatagagctccccagacaaattataaacatcctctcaaatatcatcagtgaatggtttggcaaatatattgagaaccaattaaaatatagtttaaaagcacttgcttctacaaccaatttgtattcccacaataaatgtatttatttctgtaacacttaccaaaacaagagcatcaaagccaattccttcacactgccctccctcccacctgctcttcatgaggagtcctttattcctgcatgtttcctgttctttgggccggaattccgnggcgcgatgtcggctcactacaacctctgcctcctggattcaagcaattctgtacctcagcctcccgagtngctgtgattncagatgaacgggaccgggttcagaagaaaacgttcaccaagtgggtcaacaagcacttaatgaaggtccgcaagcacatcaatgatctttatgaagatctgcgggatggccataacctgatctctctgttggaggtcctctcaggcatcaaactgccccgggagaagggcaggatgcgttttcataggctgcagaatgtgcagattgccctggacttcctaaagcagcgacaggtgaaactagtgaatattcgcaatgatgacatcacagatggcaaccccaagttgaccctgggtctgatctggaccattattttgcatttccagatctctgacatctacattagtggagaatcaggggatatgtcagccaaggagaaactactcctgtggacccagaaggtgacagctggttacacaggaatcaaatgcaccaacttttcctcctgctggagtgatgggaagatgttcaatgcactcattcaccgataccgacccgatctagtagacatggagagggtgcaaatccaaagtaaccgagagaatctggaacaagcttttgaagtggcagaaagactgggggtcactcgcctgctggatgcagaagatgtggatgtgccatctccagatgaaaagtctgtaatcacttatgtgtcttcgatttatgatgccttccctaaagttcctgagggtggagaagggatcagtgctacggaagtggactccaggtggcaagaataccaaagccgagtggactccctcattccctggatcaaacagcatacaatactgatgtcagataaaacttttccccaaaaccctgttgaactaaaggcactttataaccaatatatacacttcaaagaaacagaaattctggccaaggagagagaaaaaggaagaattgaggaattatataaattactagaggtgtggattgaatttggccgaattaaactgcctcaaggttatcaccctaatgatgtggaagaagagtggggaaagctcatcatagagatgctggaacgagagaaatcacttcggccggctgtggagaggctggaattgctgctacagattgcaaacaaaatccagaatggtgctttgaactgtgaagaaaaactgacactagctaagaatacactgcaggctgatgctgctcacctggaatcaggacaaccggtacaatgtgagtcagatgtcattatgtacattcaagagtgtgaaggtctcatcaggcagctgcaggtggatctccagatcctgcgggatgagaattactaccagctagaagagctggcttttagggtcatgcgtcttcaggatgagctggtcaccttgcgtctagagtgtacaaacctgtaccggaagggtcatttcacttcacttgaattggttccaccctctactttaaccaccactcatctgaaagcagaacccttaaccaaggcaacccattcttcttctacctcctggttccgaaagcctatgactcgggctgaacttgggccatcagctcctctgaagatgaaggcaatctccgatttgtgtatgaactactgtctttgggtagaagagatgcagatgaaactggagcgagcagagtggggcaatgacctgcctagtgtggagttgcagctagaaacacagcagcacatccatacgagtgtagaagagctgggctcaagtgtcaaggaggccaggttgtatgagggaaagatgtcccagaatttccataccagctatgctgaaactcttggaaagctggagacacagtattgtaaattgaaggaaacttctagcttccggatgaggcaccttcagagcctgcataaatttgtttccagagctacagctgagttgatctggttgaatgagaaggaggaggaggaactagcatatgactggagtgacaacaattccaatatctcagccaagagaaattacttctctgagttgacaatggaactggaggagaaacaggatgtgtttcgttctctacaagatacagcagaactactttcacttgagaaccacccagccaagcagacagtggaggcttacagtgctgctgtccagtcccagttgcagtggatgaagcagctgtgcctgtgtgttgagcagcatgtgaaagagaatactgcttattttcagttcttcagtgatgcacgagagctggagtcattcttgaggaacctccaagattccattaaacgaaaatattcctgtgaccacaacaccagcttatcccgccttgaagacctgctccaggactccatggatgaaaaggagcagcttatacagtccaagagttccgttgccagtctcgttgggagatcaaaaaccatcgttcagctaaaaccacgcagtccagaccatgtgttaaagaacaccatttctgtcaaggctgtctgtgactacaggcagatcgagattactatttgcaaaaatgatgaatgtgtgctagaagataattctcagcggaccaaatggaaagtgatcagccccacagggaacgaggcaatggtgccgtcagtctgcttcctcatccccccacccaataaggatgccattgagatggccagcagggtcgaacaatcttatcagaaggttatggccctttggcatcagctgcatgttaacaccaaaagccttatctcttggaactatctgcgtaaagaccttgaccttgtacagacctggaacctagaaaagcttcgatcctcagcaccaggggagtgccatcagattatgaagaaccttcaggcccactatgaagactttctgcaggatagtcgtgactctgtgctgttctcagtggctgatcgcttgcgcttggaagaggaggtggaagcttgtaaagcccgcttccagcacctgatgaagtccatggagaatgaggacaaagaggagactgtggccaagatgtacatttcagagttgaagaacatccggctacgcctggaggagtatgaacagagggtggtcaaacgaattcagtctctagccagctctaggactgacagagatgcctggcaggacaatgcattaaggattgcagagcaagagcacacccaggaggatttacagcaattgaggtcagacttggatgcagtttctatgaaatgtgacagctttctccatcagtctccatctagttcaagtgtcccaactctgcgctcagaactgaatctgctggtggagaagatggaccatgtctatggtctctctactgtatatctgaataagttaaagacagttgatgttatagtacgtagcatacaggatgctgaactcttggtcaaaggttatgagattaagctgagtcaagaagaagtagtactggcagatctctcagctctggaggcccattggtcgacattacggcactggcttagtgatgtgaaggacaagaattcagtgttttcagtcctggatgaggaaattgccaaggccaaggtagtggcagagcagatgagtcgtctgacaccagagcgaaatctggatttggagcgctatcaggaaaaaggctcccagctgcaggagcgttggcaccgagtcattgcccagctcgagattcgccaatctgagctagaaagtatccaggaagttctgggagattaccgagcctgccatggaactctcatcaagtggattgaggaaaccactgcccagcaggaaatgatgaagccaggccaggcagaggatagcagagtgctttcggagcagctcagccagcagacggccctatttgcagaaattgagagaaatcagacaaaactggatcaatgtcaaaaattttcccagcagtactctactattgtaaaggactatgaattgcaactgatgacatacaaggcctttgtggaatcgcagcagaaatcccctggcaagcgccgtcgcatgctttcctcttcagatgccatcactcaagagttcatggacttaaggactcgctacacggcattggtgactttaacaactcagcacgtgaaatacatcagtgatgcactccggcgtctggaggaggaggagaaagtggtagaagaggagaaacaagaacatgtggagaaggttaaagaacttttgggctgggtgtctaccctagcgaggaatacacaaggaaaagctacctcatccgagaccaaagaatcaacagacattgaaaaagctattttggaacagcaggttctgtcagaagagctgacaacaaagaaagaacaagtctctgaagctattaaaacatcacagatcttcttggccaagcatggtcataagctctcagaaaaagagaagaaacaaatatctgagcaattgaatgccctaaacaaggcttaccatgacctttgtgatggttctgcaaatcagcttcagcagcttcagagccagttggctcaccagacagaacaaaagaccctgcagaaacaacaaaatacctgtcaccagcaactggaggatctttgcagttgggtaggacaggcagaaagagcactggcaggccaccaaggcagaaccacccagcaggatctctctgctttgcagaagaaccaaagtgacttgaaggatttacaggatgacattcagaatcgtgccacctcatttgccactgttgtcaaggacattgaggggttcatggaagagaatcagaccaagctgagcccacgtgagttgacagctcttcgggaaaagcttcatcaggctaaggagcaatatgaggcgctccaggaagagacacgtgtggcccagaaggaactggaggaagcagtgacctccgccttacagcaggagactgaaaagagtaaagcagcaaaggaactggcagagaacaagaagaagatcgatgctctcctggattgggtaacttcagtaggatcatctggtggacagctgctgaccaaccttccaggaatggagcagctctcgggagctagcttggagaaaggagccttggacaccactgatggttacatgggggtgaatcaagccccagagaaactggacaagcaatgtgagatgatgaaggcccgtcaccaagaattgctgtcccagcagcaaaatttcattctggccacccagtcagctcaggccttcttggatcagcatggccacaatctcacacctgaggagcaacagatgctgcaacagaagctgggagagctaaaggaacaatactctacttccctggcccaatcagaggcagaactgaagcaggtgcagacacttcaggatgagttgcagaaatttctgcaggatcataaagagtttgaaagctggttggaacgatccgagaaagagctggagaacatgcataagggaggcagcagccccgagacccttccctccctgctaaagcggcaaggaagcttctcagaggatgtcatttcccacaaaggagacttgagatttgtgactatctcaggacagaaagtcttggacatggaaaacagttttaaggaaggcaaagaaccatcagaaattggaaacttagtaaaggacaagttgaaggatgcaacagaaagatacactgctctccactcaaagtgtacacgattaggatctcacctgaatatgctgttaggccagtatcatcaattccaaaacagtgctgacagcctgcaggcctggatgcaggcttgtgaggccaacgtggagaagctcctctcagatactgttgcctctgaccctggagttctccaggagcagcttgcaacaacaaagcagttgcaggaggaattggctgagcaccaagtacctgtggaaaaactccaaaaagtagctcgtgacataatggaaattgaaggggagccagccccagaccacaggcatgttcaagaaactacagattccatactcagccacttccaaagcctctcctatagcctggctgagcgatcttctctgctgcagaaagcaattgcccaatctcagagtgtccaggaaagcctggagagcctgttgcagtctattggggaagttgaacaaaacctggaagggaagcaggtgtcatcactctcatcaggagtcatccaggaagccttagccacaaatatgaaattgaagcaggacattgctcggcaaaagagcagcttggaggccacccgtgagatggtgacccgattcatggagacagcagacagtactacagcagcagtgctgcagggcaaactggcagaggtgagccagcggttcgaacagctctgtctacagcagcaagaaaaggagagctccctaaagaagcttctaccccaggcagagatgtttgaacacctctctggtaagctgcagcagttcatggaaaacaaaagtcggatgctggcctctggaaatcagccagatcaagatattacacatttcttccaacagatccaggagctcaatttggaaatggaagaccaacaggagaacctagatactcttgagcacctggtcactgaactgagctcttgtggctttgcgctggacttgtgccagcatcaggacagggtacagaatctaagaaaagacttcacagagctacagaagacagttaaagagagagagaaagatgcatcatcttgccaggaacagttggatgaattccggaagctggtcaggaccttccagaaatggttgaaagaaactgaagggagtattccacctacggaaacttctatgagtgctaaagagttagaaaagcagattgaacacctgaagagtctactagatgactgggcaagtaagggaactctggtggaagaaatcaattgcaaaggtacttctttagaaaatctcatcatggaaatcacagcacctgattcccaaggcaagacagatctgacggagatccagtgtgacatgtcagatgtaaacttgaagtatgagaaactagggggagtacttcatgaacgccaggaaagccttcaggctatcctcaacagaatggaggaggttcacaaggaggcaaactctgtgctgcagtggctggaatcaaaagaggaagtcctgaaatccatggatgccatgtcatctccaaccaagacagaaacagtgaaagcccaagctgaatctaacaaggccttcctggctgagttggaacagaattctccaaaaattcaaaaagtaaaggaagccctggctggattactggtgacatatcccaactcacaggaagcagaaaattggaagaaaattcaggaagaactcaattcccgatgggaaagggccactgaggttactgtggctcggcaaaggcagctagaggaatctgcaagtcatctggcctgcttccaggctgcagaatcccagctccggccgtggctgatggagaaagaactgatgatgggagtgctggggcccctgtctattgaccccaacatgttgaatgcacaaaagcaacaggtccagtttatgctaaaggaatttgaagcacgcaggcaacagcatgagcaactgaatgaggcagctcagggcatcctaacaggccctggagatgtctctctgtccaccagccaagtacagaaagaactccagagcatcaatcagaaatgggttgagctgactgacaaactcaactcccgttccagccaaattgaccaagctattgttaagagcacccagtaccaggaactgctccaggacttatcagagaaggtgagggcagttggacaacggctgagtgtccagtcagctatcagcacccaaccagaggctgtaaagcagcaattggaagagaccagtgaaattcgatctgacttggagcagttagaccacgaggttaaggaggctcagacactgtgcgatgaactctcagtgctcattggtgagcagtacctcaaggatgaactgaagaagcgtttggagacagttgccctgcctctccaaggtttagaagaccttgcagccgatcgcattaacagactccaggcagctcttgccagcacccagcagttccagcaaatgtttgatgagttgaggacctggttggatgataaacaaagccagcaagcaaaaaactgcccaatttctgcaaaattggagcggctacagtctcagctacaggagaatgaagagtttcagaaaagtcttaatcaacacagtggctcctatgaggtgattgtggctgaaggggaatctctacttctttctgtacctcctggagaagagaaaaggactctacaaaaccagttggttgagctcaaaaaccattgggaagagcttagtaaaaaaactgcagacagacaatccaggctcaaggattgtatgcagaaagctcagaaatatcagtggcatgtggaagaccttgtgccatggatagaagattgtaaagctaagatgtctgagttgcgagtcactctggatccagtgcagctagagtccagtctcctaagatcaaaggctatgctgaatgaggtggagaagcgccgctccctgctggaaatattgaatagtgctgctgacattctgatcaattcttcagaagcagatgaggatggaatccgggatgagaaggctgggatcaaccagaacatggatgctgttacagaagagctgcaggccaaaacagggtcactcgaagaaatgactcagaggctcagggagttccaggaaagctttaagaatattgaaaagaaggttgaaggagccaaacaccaacttgagatctttgatgctctgggttctcaagcctgtagcaacaagaacctggagaagctaagagctcaacaggaagtgctgcaggccctagagcctcaggtagactatctgaggaactttactcagggtctggtagaagatgccccagatggatctgatgcttctcaacttctccaccaagctgaggtcgcccagcaagagttcctcgaagttaagcaaagagtgaacagtggttgtgtgatgatggaaaacaagctggaggggattggccagtttcactgccgggtccgagagatgttctctcaattggcagacctggatgatgagctagatggcatgggtgctattggcagagacactgatagcctccagtcccaaatcgaggatgtccggctattccttaacaaaattcacgtcctcaaattagacatagaggcctctgaagcagagtgtcgacatatgctagaagaagaggggactctggatttgttaggtctcaaaagggagctagaagccctgaacaaacagtgtggcaaactgacagagagggggaaagctcgtcaggaacagctggaactgacactaggccgtgtagaggacttctacaggaaattgaaaggactcaatgacgcgaccacagcagcagaggaggcagaggccctccagtgggtagtggggaccgaagtggaaatcatcaaccaacaattagcagattttaaaatgtttcagaaagaacaagtggatcctcttcagatgaaattgcagcaggtgaatggacttggccagggattaattcagagtgcaggaaaagactgtgatgtacagggtttagaacatgacatggaagagatcaatgctcgatggaatacattgaataaaaaggtcgcacaaagaattgcacagctacaggaagctttgttgcattgtgggaagtttcaagatgccttggagccattgctcagctggttggcagataccgaggagctcatagccaatcagaaacctccatctgctgagtataaagtggtgaaagcacagatccaagaacagaagttgctccagcggctcctagatgatcgaaaggccacagtagacatgcttcaagcagaaggaggcagaatagcccagtcagcagagctggctgatagagagaaaatcactggacagctggagagtcttgaaagtagatggactgaactactcagtaaggcagcagccaggcaaaaacagctggaagacatcctggttctggccaaacagttccatgagacagctgagcctatttctgacttcttatctgtcacagagaaaaagcttgctaactcagaacctgttggcactcagactgccaaaatacagcagcagatcattcggcacaaggctctggaagaagacatagaaaaccatgcaacagatgtgcaccaggcagtcaaaattgggcagtccctctcctccctgacatctcctgcagaacagggtgtgctgtcagaaaagatagactcattgcaggcccgatacagtgaaattcaagaccgctgttgtcggaaggcagccctacttgaccaagctctgtctaatgctaggctgtttggggaggatgaggtggaggtgctcaactggctggctgaggttgaggacaagctcagttcagtgttcgtaaaggatttcaaacaggatgtcctgcacaggcagcatgctgaccacctggctttaaatgaagaaattgttaatagaaagaagaatgtagatcaagctattaaaaatggtcaggctcttctaaaacaaaccacaggtgaggaggtgttacttatccaggaaaaactagatggtataaagactcgttacgcagacatcacagttactagctccaaggccctcagaactttagagcaagcccggcagctggccaccaagttccagtctacttatgaggaactgaccgggtggctgagggaggtggaggaggagctggcaaccagtggaggacagtctcccacaggggaacagataccccagtttcagcagagacagaaggaattaaagaaggaggtcatggagcacaggctggtgttggacacagtgaatgaggtgagccgtgctctcttagagctggtgccctggagagccagagaagggctggataaacttgtgtccgatgctaacgagcagtacaaactagtcagtgacactattggacaaagggtggatgaaattgatgctgctattcagagatcacaacagtatgagcaagctgccgatgcagaactagcttgggttgctgaaacaaaacggaaactgatggctctgggtccaattcgcctggaacaggaccagaccacagctcagcttcaggtacagaaggctttctccattgacattattcgacacaaagattcaatggatgaactcttcagtcaccgtagtgaaatctttggcacatgtggggaggagcaaaaaactgtattacaggaaaagacagagtctctaatacagcaatatgaagccattagcctactcaattcagagcgttatgcccgcctagagcgggcccaggtcttagtaaaccagttttgggaaacttatgaagagctcagcccctggattgaggaaactcgggcactaatagcacagttaccctctccagccattgatcatgagcagctcaggcagcaacaagaggaaatgaggcaattaagggaatctattgctgaacacaaacctcatattgacaaactactaaagataggcccacaactaaaggaattaaaccctgaggaaggggaaatggtggaagaaaaataccagaaagcagaaaacatgtatgcccaaataaaggaggaggtgcgccagcgagccctggctctggatgaagccgtgtcccagtccacacagattacagagtttcatgataaaattgagcctatgttggagacactggagaatctttcctctcgcctgcgtatgccaccactgatccctgctgaagtagacaagatcagagagtgcatcagtgacaataagagtgccaccgtggagctagaaaaactgcagccatcctttgaggccttgaagcgccgtggagaggagcttattggacgatctcagggagcagacaaggatctggctgcaaaagaaatccaggataaattggatcaaatggtattcttctgggaggacatcaaagctcgggctgaagaacgagaaatcaaatttcttgatgtccttgaattagcagagaagttctggtatgacatggcagctctcctgaccaccatcaaagacacccaggatattgtccatgacttggaaagcccaggcattgatccttccatcatcaaacaacaggttgaagctgctgagactattaaggaagagacagatggtctgcatgaagagctggagtttattcggatccttggagcagatttgatttttgcctgtggagaaactgagaagcctgaagtgaggaagagcattgatgagatgaataatgcttgggagaacttaaacaaaacatggaaagagaggctagaaaaacttgaggatgctatgcaagctgctgtgcagtatcaggacactcttcaggctatgtttgactggctagataacactgtgattaaactctgcaccatgccccctgttggcactgacctcaatactgttaaagatcagttaaatgaaatgaaggagttcaaagtagaagtttaccaacagcaaattgagatggagaagcttaatcaccagggtgaactgatgttaaagaaagctactgatgagacggacagagacattatacgagaaccactgacagaactcaaacacctctgggagaacctgggtgagaaaattgcccaccgacagcacaaactagaaggggctctgttggcccttggtcagttccagcatgccttagaggaactaatgagttggctgactcataccgaagagttgttagatgctcagagaccaataagtggagacccaaaagtcattgaagttgagctcgcaaagcaccatgtcctaaaaaatgatgttttggctcatcaagccacagtggaaacagtcaacaaagctggcaatgagcttcttgaatccagtgctggagatgatgccagcagcttaaggagccgtttggaagccatgaaccaagactgtacgtcacatttagaggcagcgagagagtagcagaatccaggtctgagctccatatgccacagtgcccagcatcatatgctatgctggtatatagtctagtggctgtcagttcaatggagagccagctttctgcatctaagcccacaggaggacttcctgaaactgctagggaacagcttgatacacatatggaactctattcccagctgaaagccaaggaagagacttataatcaactacttgacaagggcagactcatgcttctaagccgtgacgactctgggtctggctccaagacagaacagagtgtagcacttttggagcagaagtggcatgtggtcagcagtaagatggaagaaagaaagtcaaagctggaagaggccctcaacttggcaacagaattccagaattccctacaagaatttatcaactggctcactctagcagagcagagtttaaacatcgcttctccaccaagcctgattctaaatactgtcctttcccagatagaagagcacaaggtttttgctaatgaagtaaatgctcatcgagaccagatcattgagctggatcaaactgggaatcaattaaagttccttagccaaaagcaggatgttgttctgatcaagaatttgttggtgagcgtgcagtctcgatgggagaaggttgtccagcgatctattgaaagagggcgatcactagatgatgccaggaagcgggcaaaacaattccatgaagcttggaaaaaactgattgactggctagaagatgcagagagtcacctggactcagaactagagatatccaatgacccagacaaaattaaacttcagctttctaagcataaggagtttcagaagactcttggtggcaagcagcctgtgtatgataccacaattagaactggcagagcactgaaagaaaagactttgcttcccgaagatactcagaaacttgacaatttcctaggagaagtcagagacaaatgggatactgtttgtggcaagtctgtggagcggcagcacaagttggaggaagccctgctcttttcgggtcagttcatggatgctttgcaggcattggttgactggttatacaaggtggagccacagctggctgaggaccagcccgtgcacggggaccttgacctcgtcatgaacctcatggatgcacacaaggttttccagaaggaactgggaaagcgaacaggaaccgttcaggtcctgaagcggtcaggccgagagctgattgagaatagtcgagatgacaccacttgggtaaaaggacagctccaggaactgagcactcgctgggacactgtctgtaaactctctgtttccaaacaaagccggcttgagcaggccttaaaacaagcggaagtgtttcgagacacagtccacatgctgttggagtggctttctgaagcagagcaaacgcttcgctttcggggagcacttcctgatgacacagaggccctgcagtctctcattgacacccataaggaattcatgaagaaagtagaagaaaagcgagtggacgttaactcagcagtagccatgggagaagtcatcctggctgtctgccaccccgattgcatcacaaccatcaaacactggatcaccatcatccgagctcgcttcgaggaggtcctgacatgggctaagcagcaccagcagcgtcttgaaacggccttgtcagaactggtggctaatgctgagctcctggaagaacttctggcatggatccagtgggctgagaccaccctcattcagcgggatcaggagccaatcccgcagaacattgaccgagttaaagcccttatcgctgagcatcagacatttatggaggagatgactcgcaaacagcctgacgtggaccgggtcaccaagacatacaaaaggaaaaacatagagcctactcacgcgcctttcatagagaaatcccgcagcggaggcaggaaatccctaagtcagccaacccctcctcccatgccaatcctttcacagtctgaagcaaaaaacccacggatcaaccagctttctgcccgctggcagcaggtgtggctgttagcactggagcggcaaaggaaactgaatgatgccttggatcggctggaggagttgaaagaatttgccaactttgactttgatgtctggaggaaaaagtatatgcgttggatgaatcacaaaaagtctcgagtgatggatttcttccggcgcattgataaggaccaggatgggaagataacacgtcaggagtttatcgatggcattttagcatccaagttccccaccaccaagttagagatgactgctgtggctgacattttcgaccgagatggggatggttacattgattattatgaatttgtggctgctcttcatcccaacaaggatgcgtatcgaccaacaaccgatgcagataaaatcgaagatgaggttacaagacaagtggctcagtgcaaatgtgcaaaaaggtttcaggtggagcagatcggagagaataaataccggtttggggattctcagcagttgcggctggtccgtattctgcgcagcaccgtgatggttcgcgttggtggaggatggatggccttggatgaatttttagtgaaaaatgatccctgccgagcacgaggtagaactaacattgaacttagagagaaattcatcctaccagagggagcatcccagggaatgacccccttccgctcacggggtcgaaggtccaaaccatcttcccgggcagcttcccctactcgttccagctccagtgctagtcagagtaaccacagctgtacatccatgccatcttctccagccaccccagccagtggaaccaagggtatgtactgatctccattatgcccttcttccccaatcccaccctcacagatgttcattgttcacggtagcctctgaaagactccagtgaggagaagaaataaaaatgaaaacatgttttctattttagaaataaaacgtgaaaacacacagatcaagactgccctgttcctagcagtacacagatatatggcctttaagatgactccaaaggacatttattaaaatatgcactcagcctggttatgtcagaaatgtttatttcctcatgttctcagtttaagtttgagcccatccagtgttactacttttgaaaatccaggctggacacagtggctcatgcctgtaatcccagcctttgggaagctgtggtgggaggatcccttgagaccagaagttgaagaccagcgtgggcaacatagcaagaccatctctacaaatttctaaatttatcatctctaatttttaaatttagcctagcatggtggtgagcacctatagtcccagctactcaggaagctgaggcaagaggattgcttgagcccaggaatacaaggctgcagtaagctatgaactgcaccactgcactccagcctgggcaacagagtgagactctgtctctaaaaaataaaaatt

SEQ ID NO: 367591 - DNA, 16725 bp, Homo sapiens
  misc_feature (995)..(995): n is a, c, g, or t
  misc_feature (1066)..(1066): n is a, c, g, or t
  misc_feature (1076)..(1076): n is a, c, g, or t
tcaaaacaccatctattaaagctgacaattgtcacaagcagaattgaatactcaaagggaagttaacttcacacagaaaaacacttcatatttcattcaacttgcaacgtatttactgagcgtctaccgtgtgtaaggcagcctgctaggaaatggggtacgaccctcctcctcacagagcttacattctgacaggggaacccgaagtgaacaagcatgatctgcaacaggtatgagatgtcaagaaagcctattacagaggcacccaggcccagtctacggggtcactaaaggctatgggataaactgatctgaaggatgagcacaaatcaatcatcgagaggctgagagcagctcaagtcgggggaataagatgtgcgagaagcaggagagagcaggatgaaataaaatcaggcccgtgtgatgcgtggtgaacagtgagtacccagagaagcgaagctgggggctgaggggctggtcaggaacacgggcttaattcatcaacccaacagcaaacatcagtgcaacaatgtaagcacatttaccttctgggtcataatgtaatttcttccaaagccagtggtggcactcagatatttgatcagaggattgacagattcaggcttttggtggaaaagccatacctggaaaggaaggatgtgtcaatgatttgtttcttctgcccaaggtgagtgaggctggtggagagtcactatctgcactttatagagctccccagacaaattataaacatcctctcaaatatcatcagtgaatggtttggcaaatatattgagaaccaattaaaatatagtttaaaagcacttgcttctacaaccaatttgtattcccacaataaatgtatttatttctgtaacacttaccaaaacaagagcatcaaagccaattccttcacactgccctccctcccacctgctcttcatgaggagtcctttattcctgcatgtttcctgttctttgggccggaattccgnggcgcgatgtcggctcactacaacctctgcctcctggattcaagcaattctgtacctcagcctcccgagtngctgtgattncagatgaacgggaccgggttcagaagaaaacgttcaccaagtgggtcaacaagcacttaatgaaggtccgcaagcacatcaatgatctttatgaagatctgcgggatggccataacctgatctctctgttggaggtcctctcaggcatcaaactgccccgggagaagggcaggatgcgttttcataggctgcagaatgtgcagattgccctggacttcctaaagcagcgacaggtgaaactagtgaatattcgcaatgatgacatcacagatggcaaccccaagttgaccctgggtctgatctggaccattattttgcatttccagatctctgacatctacattagtggagaatcaggggatatgtcagccaaggagaaactactcctgtggacccagaaggtgacagctggttacacaggaatcaaatgcaccaacttttcctcctgctggagtgatgggaagatgttcaatgcactcattcaccgataccgacccgatctagtagacatggagagggtgcaaatccaaagtaaccgagagaatctggaacaagcttttgaagtggcagaaagactgggggtcactcgcctgctggatgcagaagatgtggatgtgccatctccagatgaaaagtctgtaatcacttatgtgtcttcgatttatgatgccttccctaaagttcctgagggtggagaagggatcagtgctacggaagtggactccaggtggcaagaataccaaagccgagtggactccctcattccctggatcaaacagcatacaatactgatgtcagataaaacttttccccaaaaccctgttgaactaaaggcactttataaccaatatatacacttcaaagaaacagaaattctggccaaggagagagaaaaaggaagaattgaggaattatataaattactagaggtgtggattgaatttggccgaattaaactgcctcaaggttatcaccctaatgatgtggaagaagagtggggaaagctcatcatagagatgctggaacgagagaaatcacttcggccggctgtggagaggctggaattgctgctacagattgcaaacaaaatccagaatggtgctttgaactgtgaagaaaaactgacactagctaagaatacactgcaggctgatgctgctcacctggaatcaggacaaccggtacaatgtgagtcagatgtcattatgtacattcaagagtgtgaaggtctcatcaggcagctgcaggtggatctccagatcctgcgggatgagaattactaccagctagaagagctggcttttagggtcatgcgtcttcaggatgagctggtcaccttgcgtctagagtgtacaaacctgtaccggaagggtcatttcacttcacttgaattggttccaccctctactttaaccaccactcatctgaaagcagaacccttaaccaaggcaacccattcttcttctacctcctggttccgaaagcctatgactcgggctgaacttgggccatcagctcctctgaagatgaaggcaatctccgatttgtgtatgaactactgtctttgggtagaagagatgcagatgaaactggagcgagcagagtggggcaatgacctgcctagtgtggagttgcagctagaaacacagcagcacatccatacgagtgtagaagagctgggctcaagtgtcaaggaggccaggttgtatgagggaaagatgtcccagaatttccataccagctatgctgaaactcttggaaagctggagacacagtattgtaaattgaaggaaacttctagcttccggatgaggcaccttcagagcctgcataaatttgtttccagagctacagctgagttgatctggttgaatgagaaggaggaggaggaactagcatatgactggagtgacaacaattccaatatctcagccaagagaaattacttctctgagttgacaatggaactggaggagaaacaggatgtgtttcgttctctacaagatacagcagaactactttcacttgagaaccacccagccaagcagacagtggaggcttacagtgctgctgtccagtcccagttgcagtggatgaagcagctgtgcctgtgtgttgagcagcatgtgaaagagaatactgcttattttcagttcttcagtgatgcacgagagctggagtcattcttgaggaacctccaagattccattaaacgaaaatattcctgtgaccacaacaccagcttatcccgccttgaagacctgctccaggactccatggatgaaaaggagcagcttatacagtccaagagttccgttgccagtctcgttgggagatcaaaaaccatcgttcagctaaaaccacgcagtccagaccatgtgttaaagaacaccatttctgtcaaggctgtctgtgactacaggcagatcgagattactatttgcaaaaatgatgaatgtgtgctagaagataattctcagcggaccaaatggaaagtgatcagccccacagggaacgaggcaatggtgccgtcagtctgcttcctcatccccccacccaataaggatgccattgagatggccagcagggtcgaacaatcttatcagaaggttatggccctttggcatcagctgcatgttaacaccaaaagccttatctcttggaactatctgcgtaaagaccttgaccttgtacagacctggaacctagaaaagcttcgatcctcagcaccaggggagtgccatcagattatgaagaaccttcaggcccactatgaagactttctgcaggatagtcgtgactctgtgctgttctcagtggctgatcgcttgcgcttggaagaggaggtggaagcttgtaaagcccgcttccagcacctgatgaagtccatggagaatgaggacaaagaggagactgtggccaagatgtacatttcagagttgaagaacatccggctacgcctggaggagtatgaacagagggtggtcaaacgaattcagtctctagccagctctaggactgacagagatgcctggcaggacaatgcattaaggattgcagagcaagagcacacccaggaggatttacagcaattgaggtcagacttggatgcagtttctatgaaatgtgacagctttctccatcagtctccatctagttcaagtgtcccaactctgcgctcagaactgaatctgctggtggagaagatggaccatgtctatggtctctctactgtatatctgaataagttaaagacagttgatgttatagtacgtagcatacaggatgctgaactcttggtcaaaggttatgagattaagctgagtcaagaagaagtagtactggcagatctctcagctctggaggcccattggtcgacattacggcactggcttagtgatgtgaaggacaagaattcagtgttttcagtcctggatgaggaaattgccaaggccaaggtagtggcagagcagatgagtcgtctgacaccagagcgaaatctggatttggagcgctatcaggaaaaaggctcccagctgcaggagcgttggcaccgagtcattgcccagctcgagattcgccaatctgagctagaaagtatccaggaagttctgggagattaccgagcctgccatggaactctcatcaagtggattgaggaaaccactgcccagcaggaaatgatgaagccaggccaggcagaggatagcagagtgctttcggagcagctcagccagcagacggccctatttgcagaaattgagagaaatcagacaaaactggatcaatgtcaaaaattttcccagcagtactctactattgtaaaggactatgaattgcaactgatgacatacaaggcctttgtggaatcgcagcagaaatcccctggcaagcgccgtcgcatgctttcctcttcagatgccatcactcaagagttcatggacttaaggactcgctacacggcattggtgactttaacaactcagcacgtgaaatacatcagtgatgcactccggcgtctggaggaggaggagaaagtggtagaagaggagaaacaagaacatgtggagaaggttaaagaacttttgggctgggtgtctaccctagcgaggaatacacaaggaaaagctacctcatccgagaccaaagaatcaacagacattgaaaaagctattttggaacagcaggttctgtcagaagagctgacaacaaagaaagaacaagtctctgaagctattaaaacatcacagatcttcttggccaagcatggtcataagctctcagaaaaagagaagaaacaaatatctgagcaattgaatgccctaaacaaggcttaccatgacctttgtgatggttctgcaaatcagcttcagcagcttcagagccagttggctcaccagacagaacaaaagaccctgcagaaacaacaaaatacctgtcaccagcaactggaggatctttgcagttgggtaggacaggcagaaagagcactggcaggccaccaaggcagaaccacccagcaggatctctctgctttgcagaagaaccaaagtgacttgaaggatttacaggatgacattcagaatcgtgccacctcatttgccactgttgtcaaggacattgaggggttcatggaagagaatcagaccaagctgagcccacgtgagttgacagctcttcgggaaaagcttcatcaggctaaggagcaatatgaggcgctccaggaagagacacgtgtggcccagaaggaactggaggaagcagtgacctccgccttacagcaggagactgaaaagagtaaagcagcaaaggaactggcagagaacaagaagaagatcgatgctctcctggattgggtaacttcagtaggatcatctggtggacagctgctgaccaaccttccaggaatggagcagctctcgggagctagcttggagaaaggagccttggacaccactgatggttacatgggggtgaatcaagccccagagaaactggacaagcaatgtgagatgatgaaggcccgtcaccaagaattgctgtcccagcagcaaaatttcattctggccacccagtcagctcaggccttcttggatcagcatggccacaatctcacacctgaggagcaacagatgctgcaacagaagctgggagagctaaaggaacaatactctacttccctggcccaatcagaggcagaactgaagcaggtgcagacacttcaggatgagttgcagaaatttctgcaggatcataaagagtttgaaagctggttggaacgatccgagaaagagctggagaacatgcataagggaggcagcagccccgagacccttccctccctgctaaagcggcaaggaagcttctcagaggatgtcatttcccacaaaggagacttgagatttgtgactatctcaggacagaaagtcttggacatggaaaacagttttaaggaaggcaaagaaccatcagaaattggaaacttagtaaaggacaagttgaaggatgcaacagaaagatacactgctctccactcaaagtgtacacgattaggatctcacctgaatatgctgttaggccagtatcatcaattccaaaacagtgctgacagcctgcaggcctggatgcaggcttgtgaggccaacgtggagaagctcctctcagatactgttgcctctgaccctggagttctccaggagcagcttgcaacaacaaagcagttgcaggaggaattggctgagcaccaagtacctgtggaaaaactccaaaaagtagctcgtgacataatggaaattgaaggggagccagccccagaccacaggcatgttcaagaaactacagattccatactcagccacttccaaagcctctcctatagcctggctgagcgatcttctctgctgcagaaagcaattgcccaatctcagagtgtccaggaaagcctggagagcctgttgcagtctattggggaagttgaacaaaacctggaagggaagcaggtgtcatcactctcatcaggagtcatccaggaagccttagccacaaatatgaaattgaagcaggacattgctcggcaaaagagcagcttggaggccacccgtgagatggtgacccgattcatggagacagcagacagtactacagcagcagtgctgcagggcaaactggcagaggtgagccagcggttcgaacagctctgtctacagcagcaagaaaaggagagctccctaaagaagcttctaccccaggcagagatgtttgaacacctctctggtaagctgcagcagttcatggaaaacaaaagtcggatgctggcctctggaaatcagccagatcaagatattacacatttcttccaacagatccaggagctcaatttggaaatggaagaccaacaggagaacctagatactcttgagcacctggtcactgaactgagctcttgtggctttgcgctggacttgtgccagcatcaggacagggtacagaatctaagaaaagacttcacagagctacagaagacagttaaagagagagagaaagatgcatcatcttgccaggaacagttggatgaattccggaagctggtcaggaccttccagaaatggttgaaagaaactgaagggagtattccacctacggaaacttctatgagtgctaaagagttagaaaagcagattgaacacctgaagagtctactagatgactgggcaagtaagggaactctggtggaagaaatcaattgcaaaggtacttctttagaaaatctcatcatggaaatcacagcacctgattcccaaggcaagacagatctgacggagatccagtgtgacatgtcagatgtaaacttgaagtatgagaaactagggggagtacttcatgaacgccaggaaagccttcaggctatcctcaacagaatggaggaggttcacaaggaggcaaactctgtgctgcagtggctggaatcaaaagaggaagtcctgaaatccatggatgccatgtcatctccaaccaagacagaaacagtgaaagcccaagctgaatctaacaaggccttcctggctgagttggaacagaattctccaaaaattcaaaaagtaaaggaagccctggctggattactggtgacatatcccaactcacaggaagcagaaaattggaagaaaattcaggaagaactcaattcccgatgggaaagggccactgaggttactgtggctcggcaaaggcagctagaggaatctgcaagtcatctggcctgcttccaggctgcagaatcccagctccggccgtggctgatggagaaagaactgatgatgggagtgctggggcccctgtctattgaccccaacatgttgaatgcacaaaagcaacaggtccagtttatgctaaaggaatttgaagcacgcaggcaacagcatgagcaactgaatgaggcagctcagggcatcctaacaggccctggagatgtctctctgtccaccagccaagtacagaaagaactccagagcatcaatcagaaatgggttgagctgactgacaaactcaactcccgttccagccaaattgaccaagctattgttaagagcacccagtaccaggaactgctccaggacttatcagagaaggtgagggcagttggacaacggctgagtgtccagtcagctatcagcacccaaccagaggctgtaaagcagcaattggaagagaccagtgaaattcgatctgacttggagcagttagaccacgaggttaaggaggctcagacactgtgcgatgaactctcagtgctcattggtgagcagtacctcaaggatgaactgaagaagcgtttggagacagttgccctgcctctccaaggtttagaagaccttgcagccgatcgcattaacagactccaggcagctcttgccagcacccagcagttccagcaaatgtttgatgagttgaggacctggttggatgataaacaaagccagcaagcaaaaaactgcccaatttctgcaaaattggagcggctacagtctcagctacaggagaatgaagagtttcagaaaagtcttaatcaacacagtggctcctatgaggtgattgtggctgaaggggaatctctacttctttctgtacctcctggagaagagaaaaggactctacaaaaccagttggttgagctcaaaaaccattgggaagagcttagtaaaaaaactgcagacagacaatccaggctcaaggattgtatgcagaaagctcagaaatatcagtggcatgtggaagaccttgtgccatggatagaagattgtaaagctaagatgtctgagttgcgagtcactctggatccagtgcagctagagtccagtctcctaagatcaaaggctatgctgaatgaggtggagaagcgccgctccctgctggaaatattgaatagtgctgctgacattctgatcaattcttcagaagcagatgaggatggaatccgggatgagaaggctgggatcaaccagaacatggatgctgttacagaagagctgcaggccaaaacagggtcactcgaagaaatgactcagaggctcagggagttccaggaaagctttaagaatattgaaaagaaggttgaaggagccaaacaccaacttgagatctttgatgctctgggttctcaagcctgtagcaacaagaacctggagaagctaagagctcaacaggaagtgctgcaggccctagagcctcaggtagactatctgaggaactttactcagggtctggtagaagatgccccagatggatctgatgcttctcaacttctccaccaagctgaggtcgcccagcaagagttcctcgaagttaagcaaagagtgaacagtggttgtgtgatgatggaaaacaagctggaggggattggccagtttcactgccgggtccgagagatgttctctcaattggcagacctggatgatgagctagatggcatgggtgctattggcagagacactgatagcctccagtcccaaatcgaggatgtccggctattccttaacaaaattcacgtcctcaaattagacatagaggcctctgaagcagagtgtcgacatatgctagaagaagaggggactctggatttgttaggtctcaaaagggagctagaagccctgaacaaacagtgtggcaaactgacagagagggggaaagctcgtcaggaacagctggaactgacactaggccgtgtagaggacttctacaggaaattgaaaggactcaatgacgcgaccacagcagcagaggaggcagaggccctccagtgggtagtggggaccgaagtggaaatcatcaaccaacaattagcagattttaaaatgtttcagaaagaacaagtggatcctcttcagatgaaattgcagcaggtgaatggacttggccagggattaattcagagtgcaggaaaagactgtgatgtacagggtttagaacatgacatggaagagatcaatgctcgatggaatacattgaataaaaaggtcgcacaaagaattgcacagctacaggaagctttgttgcattgtgggaagtttcaagatgccttggagccattgctcagctggttggcagataccgaggagctcatagccaatcagaaacctccatctgctgagtataaagtggtgaaagcacagatccaagaacagaagttgctccagcggctcctagatgatcgaaaggccacagtagacatgcttcaagcagaaggaggcagaatagcccagtcagcagagctggctgatagagagaaaatcactggacagctggagagtcttgaaagtagatggactgaactactcagtaaggcagcagccaggcaaaaacagctggaagacatcctggttctggccaaacagttccatgagacagctgagcctatttctgacttcttatctgtcacagagaaaaagcttgctaactcagaacctgttggcactcagactgccaaaatacagcagcagatcattcggcacaaggctctggaagaagacatagaaaaccatgcaacagatgtgcaccaggcagtcaaaattgggcagtccctctcctccctgacatctcctgcagaacagggtgtgctgtcagaaaagatagactcattgcaggcccgatacagtgaaattcaagaccgctgttgtcggaaggcagccctacttgaccaagctctgtctaatgctaggctgtttggggaggatgaggtggaggtgctcaactggctggctgaggttgaggacaagctcagttcagtgttcgtaaaggatttcaaacaggatgtcctgcacaggcagcatgctgaccacctggctttaaatgaagaaattgttaatagaaagaagaatgtagatcaagctattaaaaatggtcaggctcttctaaaacaaaccacaggtgaggaggtgttacttatccaggaaaaactagatggtataaagactcgttacgcagacatcacagttactagctccaaggccctcagaactttagagcaagcccggcagctggccaccaagttccagtctacttatgaggaactgaccgggtggctgagggaggtggaggaggagctggcaaccagtggaggacagtctcccacaggggaacagataccccagtttcagcagagacagaaggaattaaagaaggaggtcatggagcacaggctggtgttggacacagtgaatgaggtgagccgtgctctcttagagctggtgccctggagagccagagaagggctggataaacttgtgtccgatgctaacgagcagtacaaactagtcagtgacactattggacaaagggtggatgaaattgatgctgctattcagagatcacaacagtatgagcaagctgccgatgcagaactagcttgggttgctgaaacaaaacggaaactgatggctctgggtccaattcgcctggaacaggaccagaccacagctcagcttcaggtacagaaggctttctccattgacattattcgacacaaagattcaatggatgaactcttcagtcaccgtagtgaaatctttggcacatgtggggaggagcaaaaaactgtattacaggaaaagacagagtctctaatacagcaatatgaagccattagcctactcaattcagagcgttatgcccgcctagagcgggcccaggtcttagtaaaccagttttgggaaacttatgaagagctcagcccctggattgaggaaactcgggcactaatagcacagttaccctctccagccattgatcatgagcagctcaggcagcaacaagaggaaatgaggcaattaagggaatctattgctgaacacaaacctcatattgacaaactactaaagataggcccacaactaaaggaattaaaccctgaggaaggggaaatggtggaagaaaaataccagaaagcagaaaacatgtatgcccaaataaaggaggaggtgcgccagcgagccctggctctggatgaagccgtgtcccagtccacacagattacagagtttcatgataaaattgagcctatgttggagacactggagaatctttcctctcgcctgcgtatgccaccactgatccctgctgaagtagacaagatcagagagtgcatcagtgacaataagagtgccaccgtggagctagaaaaactgcagccatcctttgaggccttgaagcgccgtggagaggagcttattggacgatctcagggagcagacaaggatctggctgcaaaagaaatccaggataaattggatcaaatggtattcttctgggaggacatcaaagctcgggctgaagaacgagaaatcaaatttcttgatgtccttgaattagcagagaagttctggtatgacatggcagctctcctgaccaccatcaaagacacccaggatattgtccatgacttggaaagcccaggcattgatccttccatcatcaaacaacaggttgaagctgctgagactattaaggaagagacagatggtctgcatgaagagctggagtttattcggatccttggagcagatttgatttttgcctgtggagaaactgagaagcctgaagtgaggaagagcattgatgagatgaataatgcttgggagaacttaaacaaaacatggaaagagaggctagaaaaacttgaggatgctatgcaagctgctgtgcagtatcaggacactcttcaggctatgtttgactggctagataacactgtgattaaactctgcaccatgccccctgttggcactgacctcaatactgttaaagatcagttaaatgaaatgaaggagttcaaagtagaagtttaccaacagcaaattgagatggagaagcttaatcaccagggtgaactgatgttaaagaaagctactgatgagacggacagagacattatacgagaaccactgacagaactcaaacacctctgggagaacctgggtgagaaaattgcccaccgacagcacaaactagaaggggctctgttggcccttggtcagttccagcatgccttagaggaactaatgagttggctgactcataccgaagagttgttagatgctcagagaccaataagtggagacccaaaagtcattgaagttgagctcgcaaagcaccatgtcctaaaaaatgatgttttggctcatcaagccacagtggaaacagtcaacaaagctggcaatgagcttcttgaatccagtgctggagatgatgccagcagcttaaggagccgtttggaagccatgaaccaagactgtacgtcacatttagaggcagcgagagagtagcagaatccaggtctgagctccatatgccacagtgcccagcatcatatgctatgctggtatatagtctagtggctgtcagttcaatggagagccagctttctgcatctaagcccacaggaggacttcctgaaactgctagggaacagcttgatacacatatggaactctattcccagctgaaagccaaggaagagacttataatcaactacttgacaagggcagactcatgcttctaagccgtgacgactctgggtctggctccaagacagaacagagtgtagcacttttggagcagaagtggcatgtggtcagcagtaagatggaagaaagaaagtcaaagctggaagaggccctcaacttggcaacagaattccagaattccctacaagaatttatcaactggctcactctagcagagcagagtttaaacatcgcttctccaccaagcctgattctaaatactgtcctttcccagatagaagagcacaaggtttttgctaatgaagtaaatgctcatcgagaccagatcattgagctggatcaaactgggaatcaattaaagttccttagccaaaagcaggatgttgttctgatcaagaatttgttggtgagcgtgcagtctcgatgggagaaggttgtccagcgatctattgaaagagggcgatcactagatgatgccaggaagcgggcaaaacaattccatgaagcttggaaaaaactgattgactggctagaagatgcagagagtcacctggactcagaactagagatatccaatgacccagacaaaattaaacttcagctttctaagcataaggagtttcagaagactcttggtggcaagcagcctgtgtatgataccacaattagaactggcagagcactgaaagaaaagactttgcttcccgaagatactcagaaacttgacaatttcctaggagaagtcagagacaaatgggatactgtttgtggcaagtctgtggagcggcagcacaagttggaggaagccctgctcttttcgggtcagttcatggatgctttgcaggcattggttgactggttatacaaggtggagccacagctggctgaggaccagcccgtgcacggggaccttgacctcgtcatgaacctcatggatgcacacaaggttttccagaaggaactgggaaagcgaacaggaaccgttcaggtcctgaagcggtcaggccgagagctgattgagaatagtcgagatgacaccacttgggtaaaaggacagctccaggaactgagcactcgctgggacactgtctgtaaactctctgtttccaaacaaagccggcttgagcaggccttaaaacaagcggaagtgtttcgagacacagtccacatgctgttggagtggctttctgaagcagagcaaacgcttcgctttcggggagcacttcctgatgacacagaggccctgcagtctctcattgacacccataaggaattcatgaagaaagtagaagaaaagcgagtggacgttaactcagcagtagccatgggagaagtcatcctggctgtctgccaccccgattgcatcacaaccatcaaacactggatcaccatcatccgagctcgcttcgaggaggtcctgacatgggctaagcagcaccagcagcgtcttgaaacggccttgtcagaactggtggctaatgctgagctcctggaagaacttctggcatggatccagtgggctgagaccaccctcattcagcgggatcaggagccaatcccgcagaacattgaccgagttaaagcccttatcgctgagcatcagacatttatggaggagatgactcgcaaacagcctgacgtggaccgggtcaccaagacatacaaaaggaaaaacatagagcctactcacgcgcctttcatagagaaatcccgcagcggaggcaggaaatccctaagtcagccaacccctcctcccatgccaatcctttcacagtctgaagcaaaaaacccacggatcaaccagctttctgcccgctggcagcaggtgtggctgttagcactggagcggcaaaggaaactgaatgatgccttggatcggctggaggagttgaaagaatttgccaactttgactttgatgtctggaggaaaaagtatatgcgttggatgaatcacaaaaagtctcgagtgatggatttcttccggcgcattgataaggaccaggatgggaagataacacgtcaggagtttatcgatggcattttagcatccaagttccccaccaccaagttagagatgactgctgtggctgacattttcgaccgagatggggatggttacattgattattatgaatttgtggctgctcttcatcccaacaaggatgcgtatcgaccaacaaccgatgcagataaaatcgaagatgaggtaagggaaataattatattttgagtacacttctggctgtaggtttgtaatatcctgaatttggttgggttcagtgatcatattagcctttgacttgtctgttgggagataattatttggagttctatttatgtgtaacgggcccacgactgctcgcgaacacgagatggtgatagcgcctaagtcatagtgttagagatttggattagtagggctattttactgctatgggcatgaaagcgctggatactgaatcatgtcgtagtgctttccatccccaaacagctacatatttgataaactaatcacattctagtctctaatacacctgatttctctttgcagtttagagtgcagatagctgcctctcacatgacactcatggagtgtcccccttcaggaagggatgaaggagctggacatgaa

SEQ ID NO: 367592 - DNA, 16360 bp, Homo sapiens
  misc_feature (995)..(995): n is a, c, g, or t
  misc_feature (1066)..(1066): n is a, c, g, or t
  misc_feature (1076)..(1076): n is a, c, g, or t
tcaaaacaccatctattaaagctgacaattgtcacaagcagaattgaatactcaaagggaagttaacttcacacagaaaaacacttcatatttcattcaacttgcaacgtatttactgagcgtctaccgtgtgtaaggcagcctgctaggaaatggggtacgaccctcctcctcacagagcttacattctgacaggggaacccgaagtgaacaagcatgatctgcaacaggtatgagatgtcaagaaagcctattacagaggcacccaggcccagtctacggggtcactaaaggctatgggataaactgatctgaaggatgagcacaaatcaatcatcgagaggctgagagcagctcaagtcgggggaataagatgtgcgagaagcaggagagagcaggatgaaataaaatcaggcccgtgtgatgcgtggtgaacagtgagtacccagagaagcgaagctgggggctgaggggctggtcaggaacacgggcttaattcatcaacccaacagcaaacatcagtgcaacaatgtaagcacatttaccttctgggtcataatgtaatttcttccaaagccagtggtggcactcagatatttgatcagaggattgacagattcaggcttttggtggaaaagccatacctggaaaggaaggatgtgtcaatgatttgtttcttctgcccaaggtgagtgaggctggtggagagtcactatctgcactttatagagctccccagacaaattataaacatcctctcaaatatcatcagtgaatggtttggcaaatatattgagaaccaattaaaatatagtttaaaagcacttgcttctacaaccaatttgtattcccacaataaatgtatttatttctgtaacacttaccaaaacaagagcatcaaagccaattccttcacactgccctccctcccacctgctcttcatgaggagtcctttattcctgcatgtttcctgttctttgggccggaattccgnggcgcgatgtcggctcactacaacctctgcctcctggattcaagcaattctgtacctcagcctcccgagtngctgtgattncagatgaacgggaccgggttcagaagaaaacgttcaccaagtgggtcaacaagcacttaatgaaggtccgcaagcacatcaatgatctttatgaagatctgcgggatggccataacctgatctctctgttggaggtcctctcaggcatcaaactgccccgggagaagggcaggatgcgttttcataggctgcagaatgtgcagattgccctggacttcctaaagcagcgacaggtgaaactagtgaatattcgcaatgatgacatcacagatggcaaccccaagttgaccctgggtctgatctggaccattattttgcatttccagatctctgacatctacattagtggagaatcaggggatatgtcagccaaggagaaactactcctgtggacccagaaggtgacagctggttacacaggaatcaaatgcaccaacttttcctcctgctggagtgatgggaagatgttcaatgcactcattcaccgataccgacccgatctagtagacatggagagggtgcaaatccaaagtaaccgagagaatctggaacaagcttttgaagtggcagaaagactgggggtcactcgcctgctggatgcagaagatgtggatgtgccatctccagatgaaaagtctgtaatcacttatgtgtcttcgatttatgatgccttccctaaagttcctgagggtggagaagggatcagtgctacggaagtggactccaggtggcaagaataccaaagccgagtggactccctcattccctggatcaaacagcatacaatactgatgtcagataaaacttttccccaaaaccctgttgaactaaaggcactttataaccaatatatacacttcaaagaaacagaaattctggccaaggagagagaaaaaggaagaattgaggaattatataaattactagaggtgtggattgaatttggccgaattaaactgcctcaaggttatcaccctaatgatgtggaagaagagtggggaaagctcatcatagagatgctggaacgagagaaatcacttcggccggctgtggagaggctggaattgctgctacagattgcaaacaaaatccagaatggtgctttgaactgtgaagaaaaactgacactagctaagaatacactgcaggctgatgctgctcacctggaatcaggacaaccggtacaatgtgagtcagatgtcattatgtacattcaagagtgtgaaggtctcatcaggcagctgcaggtggatctccagatcctgcgggatgagaattactaccagctagaagagctggcttttagggtcatgcgtcttcaggatgagctggtcaccttgcgtctagagtgtacaaacctgtaccggaagggtcatttcacttcacttgaattggttccaccctctactttaaccaccactcatctgaaagcagaacccttaaccaaggcaacccattcttcttctacctcctggttccgaaagcctatgactcgggctgaacttgggccatcagctcctctgaagatgaaggcaatctccgatttgtgtatgaactactgtctttgggtagaagagatgcagatgaaactggagcgagcagagtggggcaatgacctgcctagtgtggagttgcagctagaaacacagcagcacatccatacgagtgtagaagagctgggctcaagtgtcaaggaggccaggttgtatgagggaaagatgtcccagaatttccataccagctatgctgaaactcttggaaagctggagacacagtattgtaaattgaaggaaacttctagcttccggatgaggcaccttcagagcctgcataaatttgtttccagagctacagctgagttgatctggttgaatgagaaggaggaggaggaactagcatatgactggagtgacaacaattccaatatctcagccaagagaaattacttctctgagttgacaatggaactggaggagaaacaggatgtgtttcgttctctacaagatacagcagaactactttcacttgagaaccacccagccaagcagacagtggaggcttacagtgctgctgtccagtcccagttgcagtggatgaagcagctgtgcctgtgtgttgagcagcatgtgaaagagaatactgcttattttcagttcttcagtgatgcacgagagctggagtcattcttgaggaacctccaagattccattaaacgaaaatattcctgtgaccacaacaccagcttatcccgccttgaagacctgctccaggactccatggatgaaaaggagcagcttatacagtccaagagttccgttgccagtctcgttgggagatcaaaaaccatcgttcagctaaaaccacgcagtccagaccatgtgttaaagaacaccatttctgtcaaggctgtctgtgactacaggcagatcgagattactatttgcaaaaatgatgaatgtgtgctagaagataattctcagcggaccaaatggaaagtgatcagccccacagggaacgaggcaatggtgccgtcagtctgcttcctcatccccccacccaataaggatgccattgagatggccagcagggtcgaacaatcttatcagaaggttatggccctttggcatcagctgcatgttaacaccaaaagccttatctcttggaactatctgcgtaaagaccttgaccttgtacagacctggaacctagaaaagcttcgatcctcagcaccaggggagtgccatcagattatgaagaaccttcaggcccactatgaagactttctgcaggatagtcgtgactctgtgctgttctcagtggctgatcgcttgcgcttggaagaggaggtggaagcttgtaaagcccgcttccagcacctgatgaagtccatggagaatgaggacaaagaggagactgtggccaagatgtacatttcagagttgaagaacatccggctacgcctggaggagtatgaacagagggtggtcaaacgaattcagtctctagccagctctaggactgacagagatgcctggcaggacaatgcattaaggattgcagagcaagagcacacccaggaggatttacagcaattgaggtcagacttggatgcagtttctatgaaatgtgacagctttctccatcagtctccatctagttcaagtgtcccaactctgcgctcagaactgaatctgctggtggagaagatggaccatgtctatggtctctctactgtatatctgaataagttaaagacagttgatgttatagtacgtagcatacaggatgctgaactcttggtcaaaggttatgagattaagctgagtcaagaagaagtagtactggcagatctctcagctctggaggcccattggtcgacattacggcactggcttagtgatgtgaaggacaagaattcagtgttttcagtcctggatgaggaaattgccaaggccaaggtagtggcagagcagatgagtcgtctgacaccagagcgaaatctggatttggagcgctatcaggaaaaaggctcccagctgcaggagcgttggcaccgagtcattgcccagctcgagattcgccaatctgagctagaaagtatccaggaagttctgggagattaccgagcctgccatggaactctcatcaagtggattgaggaaaccactgcccagcaggaaatgatgaagccaggccaggcagaggatagcagagtgctttcggagcagctcagccagcagacggccctatttgcagaaattgagagaaatcagacaaaactggatcaatgtcaaaaattttcccagcagtactctactattgtaaaggactatgaattgcaactgatgacatacaaggcctttgtggaatcgcagcagaaatcccctggcaagcgccgtcgcatgctttcctcttcagatgccatcactcaagagttcatggacttaaggactcgctacacggcattggtgactttaacaactcagcacgtgaaatacatcagtgatgcactccggcgtctggaggaggaggagaaagtggtagaagaggagaaacaagaacatgtggagaaggttaaagaacttttgggctgggtgtctaccctagcgaggaatacacaaggaaaagctacctcatccgagaccaaagaatcaacagacattgaaaaagctattttggaacagcaggttctgtcagaagagctgacaacaaagaaagaacaagtctctgaagctattaaaacatcacagatcttcttggccaagcatggtcataagctctcagaaaaagagaagaaacaaatatctgagcaattgaatgccctaaacaaggcttaccatgacctttgtgatggttctgcaaatcagcttcagcagcttcagagccagttggctcaccagacagaacaaaagaccctgcagaaacaacaaaatacctgtcaccagcaactggaggatctttgcagttgggtaggacaggcagaaagagcactggcaggccaccaaggcagaaccacccagcaggatctctctgctttgcagaagaaccaaagtgacttgaaggatttacaggatgacattcagaatcgtgccacctcatttgccactgttgtcaaggacattgaggggttcatggaagagaatcagaccaagctgagcccacgtgagttgacagctcttcgggaaaagcttcatcaggctaaggagcaatatgaggcgctccaggaagagacacgtgtggcccagaaggaactggaggaagcagtgacctccgccttacagcaggagactgaaaagagtaaagcagcaaaggaactggcagagaacaagaagaagatcgatgctctcctggattgggtaacttcagtaggatcatctggtggacagctgctgaccaaccttccaggaatggagcagctctcgggagctagcttggagaaaggagccttggacaccactgatggttacatgggggtgaatcaagccccagagaaactggacaagcaatgtgagatgatgaaggcccgtcaccaagaattgctgtcccagcagcaaaatttcattctggccacccagtcagctcaggccttcttggatcagcatggccacaatctcacacctgaggagcaacagatgctgcaacagaagctgggagagctaaaggaacaatactctacttccctggcccaatcagaggcagaactgaagcaggtgcagacacttcaggatgagttgcagaaatttctgcaggatcataaagagtttgaaagctggttggaacgatccgagaaagagctggagaacatgcataagggaggcagcagccccgagacccttccctccctgctaaagcggcaaggaagcttctcagaggatgtcatttcccacaaaggagacttgagatttgtgactatctcaggacagaaagtcttggacatggaaaacagttttaaggaaggcaaagaaccatcagaaattggaaacttagtaaaggacaagttgaaggatgcaacagaaagatacactgctctccactcaaagtgtacacgattaggatctcacctgaatatgctgttaggccagtatcatcaattccaaaacagtgctgacagcctgcaggcctggatgcaggcttgtgaggccaacgtggagaagctcctctcagatactgttgcctctgaccctggagttctccaggagcagcttgcaacaacaaagcagttgcaggaggaattggctgagcaccaagtacctgtggaaaaactccaaaaagtagctcgtgacataatggaaattgaaggggagccagccccagaccacaggcatgttcaagaaactacagattccatactcagccacttccaaagcctctcctatagcctggctgagcgatcttctctgctgcagaaagcaattgcccaatctcagagtgtccaggaaagcctggagagcctgttgcagtctattggggaagttgaacaaaacctggaagggaagcaggtgtcatcactctcatcaggagtcatccaggaagccttagccacaaatatgaaattgaagcaggacattgctcggcaaaagagcagcttggaggccacccgtgagatggtgacccgattcatggagacagcagacagtactacagcagcagtgctgcagggcaaactggcagaggtgagccagcggttcgaacagctctgtctacagcagcaagaaaaggagagctccctaaagaagcttctaccccaggcagagatgtttgaacacctctctggtaagctgcagcagttcatggaaaacaaaagtcggatgctggcctctggaaatcagccagatcaagatattacacatttcttccaacagatccaggagctcaatttggaaatggaagaccaacaggagaacctagatactcttgagcacctggtcactgaactgagctcttgtggctttgcgctggacttgtgccagcatcaggacagggtacagaatctaagaaaagacttcacagagctacagaagacagttaaagagagagagaaagatgcatcatcttgccaggaacagttggatgaattccggaagctggtcaggaccttccagaaatggttgaaagaaactgaagggagtattccacctacggaaacttctatgagtgctaaagagttagaaaagcagattgaacacctgaagagtctactagatgactgggcaagtaagggaactctggtggaagaaatcaattgcaaaggtacttctttagaaaatctcatcatggaaatcacagcacctgattcccaaggcaagacagatctgacggagatccagtgtgacatgtcagatgtaaacttgaagtatgagaaactagggggagtacttcatgaacgccaggaaagccttcaggctatcctcaacagaatggaggaggttcacaaggaggcaaactctgtgctgcagtggctggaatcaaaagaggaagtcctgaaatccatggatgccatgtcatctccaaccaagacagaaacagtgaaagcccaagctgaatctaacaaggccttcctggctgagttggaacagaattctccaaaaattcaaaaagtaaaggaagccctggctggattactggtgacatatcccaactcacaggaagcagaaaattggaagaaaattcaggaagaactcaattcccgatgggaaagggccactgaggttactgtggctcggcaaaggcagctagaggaatctgcaagtcatctggcctgcttccaggctgcagaatcccagctccggccgtggctgatggagaaagaactgatgatgggagtgctggggcccctgtctattgaccccaacatgttgaatgcacaaaagcaacaggtccagtttatgctaaaggaatttgaagcacgcaggcaacagcatgagcaactgaatgaggcagctcagggcatcctaacaggccctggagatgtctctctgtccaccagccaagtacagaaagaactccagagcatcaatcagaaatgggttgagctgactgacaaactcaactcccgttccagccaaattgaccaagctattgttaagagcacccagtaccaggaactgctccaggacttatcagagaaggtgagggcagttggacaacggctgagtgtccagtcagctatcagcacccaaccagaggctgtaaagcagcaattggaagagaccagtgaaattcgatctgacttggagcagttagaccacgaggttaaggaggctcagacactgtgcgatgaactctcagtgctcattggtgagcagtacctcaaggatgaactgaagaagcgtttggagacagttgccctgcctctccaaggtttagaagaccttgcagccgatcgcattaacagactccaggcagctcttgccagcacccagcagttccagcaaatgtttgatgagttgaggacctggttggatgataaacaaagccagcaagcaaaaaactgcccaatttctgcaaaattggagcggctacagtctcagctacaggagaatgaagagtttcagaaaagtcttaatcaacacagtggctcctatgaggtgattgtggctgaaggggaatctctacttctttctgtacctcctggagaagagaaaaggactctacaaaaccagttggttgagctcaaaaaccattgggaagagcttagtaaaaaaactgcagacagacaatccaggctcaaggattgtatgcagaaagctcagaaatatcagtggcatgtggaagaccttgtgccatggatagaagattgtaaagctaagatgtctgagttgcgagtcactctggatccagtgcagctagagtccagtctcctaagatcaaaggctatgctgaatgaggtggagaagcgccgctccctgctggaaatattgaatagtgctgctgacattctgatcaattcttcagaagcagatgaggatggaatccgggatgagaaggctgggatcaaccagaacatggatgctgttacagaagagctgcaggccaaaacagggtcactcgaagaaatgactcagaggctcagggagttccaggaaagctttaagaatattgaaaagaaggttgaaggagccaaacaccaacttgagatctttgatgctctgggttctcaagcctgtagcaacaagaacctggagaagctaagagctcaacaggaagtgctgcaggccctagagcctcaggtagactatctgaggaactttactcagggtctggtagaagatgccccagatggatctgatgcttctcaacttctccaccaagctgaggtcgcccagcaagagttcctcgaagttaagcaaagagtgaacagtggttgtgtgatgatggaaaacaagctggaggggattggccagtttcactgccgggtccgagagatgttctctcaattggcagacctggatgatgagctagatggcatgggtgctattggcagagacactgatagcctccagtcccaaatcgaggatgtccggctattccttaacaaaattcacgtcctcaaattagacatagaggcctctgaagcagagtgtcgacatatgctagaagaagaggggactctggatttgttaggtctcaaaagggagctagaagccctgaacaaacagtgtggcaaactgacagagagggggaaagctcgtcaggaacagctggaactgacactaggccgtgtagaggacttctacaggaaattgaaaggactcaatgacgcgaccacagcagcagaggaggcagaggccctccagtgggtagtggggaccgaagtggaaatcatcaaccaacaattagcagattttaaaatgtttcagaaagaacaagtggatcctcttcagatgaaattgcagcaggtgaatggacttggccagggattaattcagagtgcaggaaaagactgtgatgtacagggtttagaacatgacatggaagagatcaatgctcgatggaatacattgaataaaaaggtcgcacaaagaattgcacagctacaggaagctttgttgcattgtgggaagtttcaagatgccttggagccattgctcagctggttggcagataccgaggagctcatagccaatcagaaacctccatctgctgagtataaagtggtgaaagcacagatccaagaacagaagttgctccagcggctcctagatgatcgaaaggccacagtagacatgcttcaagcagaaggaggcagaatagcccagtcagcagagctggctgatagagagaaaatcactggacagctggagagtcttgaaagtagatggactgaactactcagtaaggcagcagccaggcaaaaacagctggaagacatcctggttctggccaaacagttccatgagacagctgagcctatttctgacttcttatctgtcacagagaaaaagcttgctaactcagaacctgttggcactcagactgccaaaatacagcagcagatcattcggcacaaggctctggaagaagacatagaaaaccatgcaacagatgtgcaccaggcagtcaaaattgggcagtccctctcctccctgacatctcctgcagaacagggtgtgctgtcagaaaagatagactcattgcaggcccgatacagtgaaattcaagaccgctgttgtcggaaggcagccctacttgaccaagctctgtctaatgctaggctgtttggggaggatgaggtggaggtgctcaactggctggctgaggttgaggacaagctcagttcagtgttcgtaaaggatttcaaacaggatgtcctgcacaggcagcatgctgaccacctggctttaaatgaagaaattgttaatagaaagaagaatgtagatcaagctattaaaaatggtcaggctcttctaaaacaaaccacaggtgaggaggtgttacttatccaggaaaaactagatggtataaagactcgttacgcagacatcacagttactagctccaaggccctcagaactttagagcaagcccggcagctggccaccaagttccagtctacttatgaggaactgaccgggtggctgagggaggtggaggaggagctggcaaccagtggaggacagtctcccacaggggaacagataccccagtttcagcagagacagaaggaattaaagaaggaggtcatggagcacaggctggtgttggacacagtgaatgaggtgagccgtgctctcttagagctggtgccctggagagccagagaagggctggataaacttgtgtccgatgctaacgagcagtacaaactagtcagtgacactattggacaaagggtggatgaaattgatgctgctattcagagatcacaacagtatgagcaagctgccgatgcagaactagcttgggttgctgaaacaaaacggaaactgatggctctgggtccaattcgcctggaacaggaccagaccacagctcagcttcaggtacagaaggctttctccattgacattattcgacacaaagattcaatggatgaactcttcagtcaccgtagtgaaatctttggcacatgtggggaggagcaaaaaactgtattacaggaaaagacagagtctctaatacagcaatatgaagccattagcctactcaattcagagcgttatgcccgcctagagcgggcccaggtcttagtaaaccagttttgggaaacttatgaagagctcagcccctggattgaggaaactcgggcactaatagcacagttaccctctccagccattgatcatgagcagctcaggcagcaacaagaggaaatgaggcaattaagggaatctattgctgaacacaaacctcatattgacaaactactaaagataggcccacaactaaaggaattaaaccctgaggaaggggaaatggtggaagaaaaataccagaaagcagaaaacatgtatgcccaaataaaggaggaggtgcgccagcgagccctggctctggatgaagccgtgtcccagtccacacagattacagagtttcatgataaaattgagcctatgttggagacactggagaatctttcctctcgcctgcgtatgccaccactgatccctgctgaagtagacaagatcagagagtgcatcagtgacaataagagtgccaccgtggagctagaaaaactgcagccatcctttgaggccttgaagcgccgtggagaggagcttattggacgatctcagggagcagacaaggatctggctgcaaaagaaatccaggataaattggatcaaatggtattcttctgggaggacatcaaagctcgggctgaagaacgagaaatcaaatttcttgatgtccttgaattagcagagaagttctggtatgacatggcagctctcctgaccaccatcaaagacacccaggatattgtccatgacttggaaagcccaggcattgatccttccatcatcaaacaacaggttgaagctgctgagactattaaggaagagacagatggtctgcatgaagagctggagtttattcggatccttggagcagatttgatttttgcctgtggagaaactgagaagcctgaagtgaggaagagcattgatgagatgaataatgcttgggagaacttaaacaaaacatggaaagagaggctagaaaaacttgaggatgctatgcaagctgctgtgcagtatcaggacactcttcaggctatgtttgactggctagataacactgtgattaaactctgcaccatgccccctgttggcactgacctcaatactgttaaagatcagttaaatgaaatgaaggagttcaaagtagaagtttaccaacagcaaattgagatggagaagcttaatcaccagggtgaactgatgttaaagaaagctactgatgagacggacagagacattatacgagaaccactgacagaactcaaacacctctgggagaacctgggtgagaaaattgcccaccgacagcacaaactagaaggggctctgttggcccttggtcagttccagcatgccttagaggaactaatgagttggctgactcataccgaagagttgttagatgctcagagaccaataagtggagacccaaaagtcattgaagttgagctcgcaaagcaccatgtcctaaaaaatgatgttttggctcatcaagccacagtggaaacagtcaacaaagctggcaatgagcttcttgaatccagtgctggagatgatgccagcagcttaaggagccgtttggaagccatgaaccaagactgtacgtcacatttagaggcagcgagagagtagcagaatccaggtctgagctccatatgccacagtgcccagcatcatatgctatgctggtatatagtctagtggctgtcagttcaatggagagccagctttctgcatctaagcccacaggaggacttcctgaaactgctagggaacagcttgatacacatatggaactctattcccagctgaaagccaaggaagagacttataatcaactacttgacaagggcagactcatgcttctaagccgtgacgactctgggtctggctccaagacagaacagagtgtagcacttttggagcagaagtggcatgtggtcagcagtaagatggaagaaagaaagtcaaagctggaagaggccctcaacttggcaacagaattccagaattccctacaagaatttatcaactggctcactctagcagagcagagtttaaacatcgcttctccaccaagcctgattctaaatactgtcctttcccagatagaagagcacaaggtttttgctaatgaagtaaatgctcatcgagaccagatcattgagctggatcaaactgggaatcaattaaagttccttagccaaaagcaggatgttgttctgatcaagaatttgttggtgagcgtgcagtctcgatgggagaaggttgtccagcgatctattgaaagagggcgatcactagatgatgccaggaagcgggcaaaacaattccatgaagcttggaaaaaactgattgactggctagaagatgcagagagtcacctggactcagaactagagatatccaatgacccagacaaaattaaacttcagctttctaagcataaggagtttcagaagactcttggtggcaagcagcctgtgtatgataccacaattagaactggcagagcactgaaagaaaagactttgcttcccgaagatactcagaaacttgacaatttcctaggagaagtcagagacaaatgggatactgtttgtggcaagtctgtggagcggcagcacaagttggaggaagccctgctcttttcgggtcagttcatggatgctttgcaggcattggttgactggttatacaaggtggagccacagctggctgaggaccagcccgtgcacggggaccttgacctcgtcatgaacctcatggatgcacacaaggttttccagaaggaactgggaaagcgaacaggaaccgttcaggtcctgaagcggtcaggccgagagctgattgagaatagtcgagatgacaccacttgggtaaaaggacagctccaggaactgagcactcgctgggacactgtctgtaaactctctgtttccaaacaaagccggcttgagcaggccttaaaacaagcggaagtgtttcgagacacagtccacatgctgttggagtggctttctgaagcagagcaaacgcttcgctttcggggagcacttcctgatgacacagaggccctgcagtctctcattgacacccataaggaattcatgaagaaagtagaagaaaagcgagtggacgttaactcagcagtagccatgggagaagtcatcctggctgtctgccaccccgattgcatcacaaccatcaaacactggatcaccatcatccgagctcgcttcgaggaggtcctgacatgggctaagcagcaccagcagcgtcttgaaacggccttgtcagaactggtggctaatgctgagctcctggaagaacttctggcatggatccagtgggctgagaccaccctcattcagcgggatcaggagccaatcccgcagaacattgaccgagttaaagcccttatcgctgagcatcagacatttatggaggagatgactcgcaaacagcctgacgtggaccgggtcaccaagacatacaaaaggaaaaacatagagcctactcacgcgcctttcatagagaaatcccgcagcggaggcaggaaatccctaagtcagccaacccctcctcccatgccaatcctttcacagtctgaagcaaaaaacccacggatcaaccagctttctgcccgctggcagcaggtgtggctgttagcactggagcggcaaaggaaactgaatgatgccttggatcggctggaggagttgaaagaatttgccaactttgactttgatgtctggaggaaaaagtatatgcgttggatgaatcacaaaaagtctcgagtgatggatttcttccggcgcattgataaggaccaggatgggaagataacacgtcaggagtttatcgatggcattttagcatccaagttccccaccaccaagttagagatgactgctgtggctgacattttcgaccgagatggggatggttacattgattattatgaatttgtggctgctcttcatcccaacaaggatgcgtatcgaccaacaaccgatgcagataaaatcgaagatgaggttacaatgacaatgtggctcatgtgcaagatgtgcaaaacaggtttcagtgtgtgagcag

SEQ ID NO: 367593 - DNA, 1535 bp, Homo sapiens
gcgcctcggtaatattttttaaatatatcctacccaattttttcccagaacattatacccttgtgtgaccccaataaacccttgaaatgtgtatatatcccctaaggccgttataaaatttctccttaggaggatattttttcccacttatgttccccccccccccacatagtagggttcttctttttccacaaatgtcccccgtatcgcccgttttttcgtccctccccggctttgttttacgatcgcgccgccgcggcgcctgctttttttattacgggcctctctcctcttgggggcccctctctttgcagcaaaaaaggggggcaatggggccccccgggggaatttttgccgccccccccctctttttttttttttttttttttttttttttttttttttttttttggacccggaagtagaatttattggtgagtattaagaaagaataattgtgttatgaagctgccttattttttttctttttgtaagttactattttcatgtgaatatttatgtagataaaatttgcctcctggtaaccctgtaatggatggggcccagaaatgaaatatttgagaaaaacaagtgaaaaggtcaagatacaaatgtgtattaaaaaaaaaaaagcctattaatagggtttctgcgcggtgcagggttgtaaacctgctttatcttttaggattattcctaaatgcatcttctttataaacttgacttgctatctcagcaagataaattatattaaaaaaataagaatcctgcagtgtttaaggaactctttttttgtaaatcacggacacctcaattagcaagaactgaggggagggctttttccattgtttaatgttttgtgatttttagctaaagagagggaacctcatctaagtaacatttgcacatgatacagcaaaaggagttcattgcaatactgtctttggatattgtttcagtactgggtgtttaaaggacaaatagctgctagaattcaggggtaaatgtaagtgttcagaaaacgtcagaacatttggggttttaaactgatttgttgctccctatccagcctagacaccagtaactcttgtgttcaccaggacccagacccttggcaagggataggctcgttggtgacattgtgaatttcagatttgttttatccactttttttgctatttatttaaatggtcgatcaacttcccacaaactgaggaatgaattccacgagcctgttctgaaaatgtggacgtaagacaaacacgtgctcgtcctttaatggagttcaccagcacacttgttaaccagtcctgtttgctttcgtctttttttgtgcgtaataaagtcaactgaccaagtgaccatgaaaaggggctgtctggggctcctgttttttagctgctgttcttcagctccgaccatgttgctgtgtgattatctcaattggttttaattgaggcagaaactgaagctctaccaatgaactgtttagaaacaagacacacttttgtattaaaattgcttgcagtaacaaa

SEQ ID NO: 367594 - DNA, 15828 bp, Homo sapiens
  misc_feature (995)..(995): n is a, c, g, or t
  misc_feature (1066)..(1066): n is a, c, g, or t
  misc_feature (1076)..(1076): n is a, c, g, or t
tcaaaacaccatctattaaagctgacaattgtcacaagcagaattgaatactcaaagggaagttaacttcacacagaaaaacacttcatatttcattcaacttgcaacgtatttactgagcgtctaccgtgtgtaaggcagcctgctaggaaatggggtacgaccctcctcctcacagagcttacattctgacaggggaacccgaagtgaacaagcatgatctgcaacaggtatgagatgtcaagaaagcctattacagaggcacccaggcccagtctacggggtcactaaaggctatgggataaactgatctgaaggatgagcacaaatcaatcatcgagaggctgagagcagctcaagtcgggggaataagatgtgcgagaagcaggagagagcaggatgaaataaaatcaggcccgtgtgatgcgtggtgaacagtgagtacccagagaagcgaagctgggggctgaggggctggtcaggaacacgggcttaattcatcaacccaacagcaaacatcagtgcaacaatgtaagcacatttaccttctgggtcataatgtaatttcttccaaagccagtggtggcactcagatatttgatcagaggattgacagattcaggcttttggtggaaaagccatacctggaaaggaaggatgtgtcaatgatttgtttcttctgcccaaggtgagtgaggctggtggagagtcactatctgcactttatagagctccccagacaaattataaacatcctctcaaatatcatcagtgaatggtttggcaaatatattgagaaccaattaaaatatagtttaaaagcacttgcttctacaaccaatttgtattcccacaataaatgtatttatttctgtaacacttaccaaaacaagagcatcaaagccaattccttcacactgccctccctcccacctgctcttcatgaggagtcctttattcctgcatgtttcctgttctttgggccggaattccgnggcgcgatgtcggctcactacaacctctgcctcctggattcaagcaattctgtacctcagcctcccgagtngctgtgattncagatgaacgggaccgggttcagaagaaaacgttcaccaagtgggtcaacaagcacttaatgaaggtccgcaagcacatcaatgatctttatgaagatctgcgggatggccataacctgatctctctgttggaggtcctctcaggcatcaaactgccccgggagaagggcaggatgcgttttcataggctgcagaatgtgcagattgccctggacttcctaaagcagcgacaggtgaaactagtgaatattcgcaatgatgacatcacagatggcaaccccaagttgaccctgggtctgatctggaccattattttgcatttccagatctctgacatctacattagtggagaatcaggggatatgtcagccaaggagaaactactcctgtggacccagaaggtgacagctggttacacaggaatcaaatgcaccaacttttcctcctgctggagtgatgggaagatgttcaatgcactcattcaccgataccgacccgatctagtagacatggagagggtgcaaatccaaagtaaccgagagaatctggaacaagcttttgaagtggcagaaagactgggggtcactcgcctgctggatgcagaagatgtggatgtgccatctccagatgaaaagtctgtaatcacttatgtgtcttcgatttatgatgccttccctaaagttcctgagggtggagaagggatcagtgctacggaagtggactccaggtggcaagaataccaaagccgagtggactccctcattccctggatcaaacagcatacaatactgatgtcagataaaacttttccccaaaaccctgttgaactaaaggcactttataaccaatatatacacttcaaagaaacagaaattctggccaaggagagagaaaaaggaagaattgaggaattatataaattactagaggtgtggattgaatttggccgaattaaactgcctcaaggttatcaccctaatgatgtggaagaagagtggggaaagctcatcatagagatgctggaacgagagaaatcacttcggccggctgtggagaggctggaattgctgctacagattgcaaacaaaatccagaatggtgctttgaactgtgaagaaaaactgacactagctaagaatacactgcaggctgatgctgctcacctggaatcaggacaaccggtacaatgtgagtcagatgtcattatgtacattcaagagtgtgaaggtctcatcaggcagctgcaggtggatctccagatcctgcgggatgagaattactaccagctagaagagctggcttttagggtcatgcgtcttcaggatgagctggtcaccttgcgtctagagtgtacaaacctgtaccggaagggtcatttcacttcacttgaattggttccaccctctactttaaccaccactcatctgaaagcagaacccttaaccaaggcaacccattcttcttctacctcctggttccgaaagcctatgactcgggctgaacttgggccatcagctcctctgaagatgaaggcaatctccgatttgtgtatgaactactgtctttgggtagaagagatgcagatgaaactggagcgagcagagtggggcaatgacctgcctagtgtggagttgcagctagaaacacagcagcacatccatacgagtgtagaagagctgggctcaagtgtcaaggaggccaggttgtatgagggaaagatgtcccagaatttccataccagctatgctgaaactcttggaaagctggagacacagtattgtaaattgaaggaaacttctagcttccggatgaggcaccttcagagcctgcataaatttgtttccagagctacagctgagttgatctggttgaatgagaaggaggaggaggaactagcatatgactggagtgacaacaattccaatatctcagccaagagaaattacttctctgagttgacaatggaactggaggagaaacaggatgtgtttcgttctctacaagatacagcagaactactttcacttgagaaccacccagccaagcagacagtggaggcttacagtgctgctgtccagtcccagttgcagtggatgaagcagctgtgcctgtgtgttgagcagcatgtgaaagagaatactgcttattttcagttcttcagtgatgcacgagagctggagtcattcttgaggaacctccaagattccattaaacgaaaatattcctgtgaccacaacaccagcttatcccgccttgaagacctgctccaggactccatggatgaaaaggagcagcttatacagtccaagagttccgttgccagtctcgttgggagatcaaaaaccatcgttcagctaaaaccacgcagtccagaccatgtgttaaagaacaccatttctgtcaaggctgtctgtgactacaggcagatcgagattactatttgcaaaaatgatgaatgtgtgctagaagataattctcagcggaccaaatggaaagtgatcagccccacagggaacgaggcaatggtgccgtcagtctgcttcctcatccccccacccaataaggatgccattgagatggccagcagggtcgaacaatcttatcagaaggttatggccctttggcatcagctgcatgttaacaccaaaagccttatctcttggaactatctgcgtaaagaccttgaccttgtacagacctggaacctagaaaagcttcgatcctcagcaccaggggagtgccatcagattatgaagaaccttcaggcccactatgaagactttctgcaggatagtcgtgactctgtgctgttctcagtggctgatcgcttgcgcttggaagaggaggtggaagcttgtaaagcccgcttccagcacctgatgaagtccatggagaatgaggacaaagaggagactgtggccaagatgtacatttcagagttgaagaacatccggctacgcctggaggagtatgaacagagggtggtcaaacgaattcagtctctagccagctctaggactgacagagatgcctggcaggacaatgcattaaggattgcagagcaagagcacacccaggaggatttacagcaattgaggtcagacttggatgcagtttctatgaaatgtgacagctttctccatcagtctccatctagttcaagtgtcccaactctgcgctcagaactgaatctgctggtggagaagatggaccatgtctatggtctctctactgtatatctgaataagttaaagacagttgatgttatagtacgtagcatacaggatgctgaactcttggtcaaaggttatgagattaagctgagtcaagaagaagtagtactggcagatctctcagctctggaggcccattggtcgacattacggcactggcttagtgatgtgaaggacaagaattcagtgttttcagtcctggatgaggaaattgccaaggccaaggtagtggcagagcagatgagtcgtctgacaccagagcgaaatctggatttggagcgctatcaggaaaaaggctcccagctgcaggagcgttggcaccgagtcattgcccagctcgagattcgccaatctgagctagaaagtatccaggaagttctgggagattaccgagcctgccatggaactctcatcaagtggattgaggaaaccactgcccagcaggaaatgatgaagccaggccaggcagaggatagcagagtgctttcggagcagctcagccagcagacggccctatttgcagaaattgagagaaatcagacaaaactggatcaatgtcaaaaattttcccagcagtactctactattgtaaaggactatgaattgcaactgatgacatacaaggcctttgtggaatcgcagcagaaatcccctggcaagcgccgtcgcatgctttcctcttcagatgccatcactcaagagttcatggacttaaggactcgctacacggcattggtgactttaacaactcagcacgtgaaatacatcagtgatgcactccggcgtctggaggaggaggagaaagtggtagaagaggagaaacaagaacatgtggagaaggttaaagaacttttgggctgggtgtctaccctagcgaggaatacacaaggaaaagctacctcatccgagaccaaagaatcaacagacattgaaaaagctattttggaacagcaggttctgtcagaagagctgacaacaaagaaagaacaagtctctgaagctattaaaacatcacagatcttcttggccaagcatggtcataagctctcagaaaaagagaagaaacaaatatctgagcaattgaatgccctaaacaaggcttaccatgacctttgtgatggttctgcaaatcagcttcagcagcttcagagccagttggctcaccagacagaacaaaagaccctgcagaaacaacaaaatacctgtcaccagcaactggaggatctttgcagttgggtaggacaggcagaaagagcactggcaggccaccaaggcagaaccacccagcaggatctctctgctttgcagaagaaccaaagtgacttgaaggatttacaggatgacattcagaatcgtgccacctcatttgccactgttgtcaaggacattgaggggttcatggaagagaatcagaccaagctgagcccacgtgagttgacagctcttcgggaaaagcttcatcaggctaaggagcaatatgaggcgctccaggaagagacacgtgtggcccagaaggaactggaggaagcagtgacctccgccttacagcaggagactgaaaagagtaaagcagcaaaggaactggcagagaacaagaagaagatcgatgctctcctggattgggtaacttcagtaggatcatctggtggacagctgctgaccaaccttccaggaatggagcagctctcgggagctagcttggagaaaggagccttggacaccactgatggttacatgggggtgaatcaagccccagagaaactggacaagcaatgtgagatgatgaaggcccgtcaccaagaattgctgtcccagcagcaaaatttcattctggccacccagtcagctcaggccttcttggatcagcatggccacaatctcacacctgaggagcaacagatgctgcaacagaagctgggagagctaaaggaacaatactctacttccctggcccaatcagaggcagaactgaagcaggtgcagacacttcaggatgagttgcagaaatttctgcaggatcataaagagtttgaaagctggttggaacgatccgagaaagagctggagaacatgcataagggaggcagcagccccgagacccttccctccctgctaaagcggcaaggaagcttctcagaggatgtcatttcccacaaaggagacttgagatttgtgactatctcaggacagaaagtcttggacatggaaaacagttttaaggaaggcaaagaaccatcagaaattggaaacttagtaaaggacaagttgaaggatgcaacagaaagatacactgctctccactcaaagtgtacacgattaggatctcacctgaatatgctgttaggccagtatcatcaattccaaaacagtgctgacagcctgcaggcctggatgcaggcttgtgaggccaacgtggagaagctcctctcagatactgttgcctctgaccctggagttctccaggagcagcttgcaacaacaaagcagttgcaggaggaattggctgagcaccaagtacctgtggaaaaactccaaaaagtagctcgtgacataatggaaattgaaggggagccagccccagaccacaggcatgttcaagaaactacagattccatactcagccacttccaaagcctctcctatagcctggctgagcgatcttctctgctgcagaaagcaattgcccaatctcagagtgtccaggaaagcctggagagcctgttgcagtctattggggaagttgaacaaaacctggaagggaagcaggtgtcatcactctcatcaggagtcatccaggaagccttagccacaaatatgaaattgaagcaggacattgctcggcaaaagagcagcttggaggccacccgtgagatggtgacccgattcatggagacagcagacagtactacagcagcagtgctgcagggcaaactggcagaggtgagccagcggttcgaacagctctgtctacagcagcaagaaaaggagagctccctaaagaagcttctaccccaggcagagatgtttgaacacctctctggtaagctgcagcagttcatggaaaacaaaagtcggatgctggcctctggaaatcagccagatcaagatattacacatttcttccaacagatccaggagctcaatttggaaatggaagaccaacaggagaacctagatactcttgagcacctggtcactgaactgagctcttgtggctttgcgctggacttgtgccagcatcaggacagggtacagaatctaagaaaagacttcacagagctacagaagacagttaaagagagagagaaagatgcatcatcttgccaggaacagttggatgaattccggaagctggtcaggaccttccagaaatggttgaaagaaactgaagggagtattccacctacggaaacttctatgagtgctaaagagttagaaaagcagattgaacacctgaagagtctactagatgactgggcaagtaagggaactctggtggaagaaatcaattgcaaaggtacttctttagaaaatctcatcatggaaatcacagcacctgattcccaaggcaagacagatctgacggagatccagtgtgacatgtcagatgtaaacttgaagtatgagaaactagggggagtacttcatgaacgccaggaaagccttcaggctatcctcaacagaatggaggaggttcacaaggaggcaaactctgtgctgcagtggctggaatcaaaagaggaagtcctgaaatccatggatgccatgtcatctccaaccaagacagaaacagtgaaagcccaagctgaatctaacaaggccttcctggctgagttggaacagaattctccaaaaattcaaaaagtaaaggaagccctggctggattactggtgacatatcccaactcacaggaagcagaaaattggaagaaaattcaggaagaactcaattcccgatgggaaagggccactgaggttactgtggctcggcaaaggcagctagaggaatctgcaagtcatctggcctgcttccaggctgcagaatcccagctccggccgtggctgatggagaaagaactgatgatgggagtgctggggcccctgtctattgaccccaacatgttgaatgcacaaaagcaacaggtccagtttatgctaaaggaatttgaagcacgcaggcaacagcatgagcaactgaatgaggcagctcagggcatcctaacaggccctggagatgtctctctgtccaccagccaagtacagaaagaactccagagcatcaatcagaaatgggttgagctgactgacaaactcaactcccgttccagccaaattgaccaagctattgttaagagcacccagtaccaggaactgctccaggacttatcagagaaggtgagggcagttggacaacggctgagtgtccagtcagctatcagcacccaaccagaggctgtaaagcagcaattggaagagaccagtgaaattcgatctgacttggagcagttagaccacgaggttaaggaggctcagacactgtgcgatgaactctcagtgctcattggtgagcagtacctcaaggatgaactgaagaagcgtttggagacagttgccctgcctctccaaggtttagaagaccttgcagccgatcgcattaacagactccaggcagctcttgccagcacccagcagttccagcaaatgtttgatgagttgaggacctggttggatgataaacaaagccagcaagcaaaaaactgcccaatttctgcaaaattggagcggctacagtctcagctacaggagaatgaagagtttcagaaaagtcttaatcaacacagtggctcctatgaggtgattgtggctgaaggggaatctctacttctttctgtacctcctggagaagagaaaaggactctacaaaaccagttggttgagctcaaaaaccattgggaagagcttagtaaaaaaactgcagacagacaatccaggctcaaggattgtatgcagaaagctcagaaatatcagtggcatgtggaagaccttgtgccatggatagaagattgtaaagctaagatgtctgagttgcgagtcactctggatccagtgcagctagagtccagtctcctaagatcaaaggctatgctgaatgaggtggagaagcgccgctccctgctggaaatattgaatagtgctgctgacattctgatcaattcttcagaagcagatgaggatggaatccgggatgagaaggctgggatcaaccagaacatggatgctgttacagaagagctgcaggccaaaacagggtcactcgaagaaatgactcagaggctcagggagttccaggaaagctttaagaatattgaaaagaaggttgaaggagccaaacaccaacttgagatctttgatgctctgggttctcaagcctgtagcaacaagaacctggagaagctaagagctcaacaggaagtgctgcaggccctagagcctcaggtagactatctgaggaactttactcagggtctggtagaagatgccccagatggatctgatgcttctcaacttctccaccaagctgaggtcgcccagcaagagttcctcgaagttaagcaaagagtgaacagtggttgtgtgatgatggaaaacaagctggaggggattggccagtttcactgccgggtccgagagatgttctctcaattggcagacctggatgatgagctagatggcatgggtgctattggcagagacactgatagcctccagtcccaaatcgaggatgtccggctattccttaacaaaattcacgtcctcaaattagacatagaggcctctgaagcagagtgtcgacatatgctagaagaagaggggactctggatttgttaggtctcaaaagggagctagaagccctgaacaaacagtgtggcaaactgacagagagggggaaagctcgtcaggaacagctggaactgacactaggccgtgtagaggacttctacaggaaattgaaaggactcaatgacgcgaccacagcagcagaggaggcagaggccctccagtgggtagtggggaccgaagtggaaatcatcaaccaacaattagcagattttaaaatgtttcagaaagaacaagtggatcctcttcagatgaaattgcagcaggtgaatggacttggccagggattaattcagagtgcaggaaaagactgtgatgtacagggtttagaacatgacatggaagagatcaatgctcgatggaatacattgaataaaaaggtcgcacaaagaattgcacagctacaggaagctttgttgcattgtgggaagtttcaagatgccttggagccattgctcagctggttggcagataccgaggagctcatagccaatcagaaacctccatctgctgagtataaagtggtgaaagcacagatccaagaacagaagttgctccagcggctcctagatgatcgaaaggccacagtagacatgcttcaagcagaaggaggcagaatagcccagtcagcagagctggctgatagagagaaaatcactggacagctggagagtcttgaaagtagatggactgaactactcagtaaggcagcagccaggcaaaaacagctggaagacatcctggttctggccaaacagttccatgagacagctgagcctatttctgacttcttatctgtcacagagaaaaagcttgctaactcagaacctgttggcactcagactgccaaaatacagcagcagatcattcggcacaaggctctggaagaagacatagaaaaccatgcaacagatgtgcaccaggcagtcaaaattgggcagtccctctcctccctgacatctcctgcagaacagggtgtgctgtcagaaaagatagactcattgcaggcccgatacagtgaaattcaagaccgctgttgtcggaaggcagccctacttgaccaagctctgtctaatgctaggctgtttggggaggatgaggtggaggtgctcaactggctggctgaggttgaggacaagctcagttcagtgttcgtaaaggatttcaaacaggatgtcctgcacaggcagcatgctgaccacctggctttaaatgaagaaattgttaatagaaagaagaatgtagatcaagctattaaaaatggtcaggctcttctaaaacaaaccacaggtgaggaggtgttacttatccaggaaaaactagatggtataaagactcgttacgcagacatcacagttactagctccaaggccctcagaactttagagcaagcccggcagctggccaccaagttccagtctacttatgaggaactgaccgggtggctgagggaggtggaggaggagctggcaaccagtggaggacagtctcccacaggggaacagataccccagtttcagcagagacagaaggaattaaagaaggaggtcatggagcacaggctggtgttggacacagtgaatgaggtgagccgtgctctcttagagctggtgccctggagagccagagaagggctggataaacttgtgtccgatgctaacgagcagtacaaactagtcagtgacactattggacaaagggtggatgaaattgatgctgctattcagagatcacaacagtatgagcaagctgccgatgcagaactagcttgggttgctgaaacaaaacggaaactgatggctctgggtccaattcgcctggaacaggaccagaccacagctcagcttcaggtacagaaggctttctccattgacattattcgacacaaagattcaatggatgaactcttcagtcaccgtagtgaaatctttggcacatgtggggaggagcaaaaaactgtattacaggaaaagacagagtctctaatacagcaatatgaagccattagcctactcaattcagagcgttatgcccgcctagagcgggcccaggtcttagtaaaccagttttgggaaacttatgaagagctcagcccctggattgaggaaactcgggcactaatagcacagttaccctctccagccattgatcatgagcagctcaggcagcaacaagaggaaatgaggcaattaagggaatctattgctgaacacaaacctcatattgacaaactactaaagataggcccacaactaaaggaattaaaccctgaggaaggggaaatggtggaagaaaaataccagaaagcagaaaacatgtatgcccaaataaaggaggaggtgcgccagcgagccctggctctggatgaagccgtgtcccagtccacacagattacagagtttcatgataaaattgagcctatgttggagacactggagaatctttcctctcgcctgcgtatgccaccactgatccctgctgaagtagacaagatcagagagtgcatcagtgacaataagagtgccaccgtggagctagaaaaactgcagccatcctttgaggccttgaagcgccgtggagaggagcttattggacgatctcagggagcagacaaggatctggctgcaaaagaaatccaggataaattggatcaaatggtattcttctgggaggacatcaaagctcgggctgaagaacgagaaatcaaatttcttgatgtccttgaattagcagagaagttctggtatgacatggcagctctcctgaccaccatcaaagacacccaggatattgtccatgacttggaaagcccaggcattgatccttccatcatcaaacaacaggttgaagctgctgagactattaaggaagagacagatggtctgcatgaagagctggagtttattcggatccttggagcagatttgatttttgcctgtggagaaactgagaagcctgaagtgaggaagagcattgatgagatgaataatgcttgggagaacttaaacaaaacatggaaagagaggctagaaaaacttgaggatgctatgcaagctgctgtgcagtatcaggacactcttcaggctatgtttgactggctagataacactgtgattaaactctgcaccatgccccctgttggcactgacctcaatactgttaaagatcagttaaatgaaatgaaggagttcaaagtagaagtttaccaacagcaaattgagatggagaagcttaatcaccagggtgaactgatgttaaagaaagctactgatgagacggacagagacattatacgagaaccactgacagaactcaaacacctctgggagaacctgggtgagaaaattgcccaccgacagcacaaactagaaggggctctgttggcccttggtcagttccagcatgccttagaggaactaatgagttggctgactcataccgaagagttgttagatgctcagagaccaataagtggagacccaaaagtcattgaagttgagctcgcaaagcaccatgtcctaaaaaatgatgttttggctcatcaagccacagtggaaacagtcaacaaagctggcaatgagcttcttgaatccagtgctggagatgatgccagcagcttaaggagccgtttggaagccatgaaccaagactgtacgtcacatttagaggcagcgagagagtagcagaatccaggtctgagctccatatgccacagtgcccagcatcatatgctatgctggtatatagtctagtggctgtcagttcaatggagagccagctttctgcatctaagcccacaggaggacttcctgaaactgctagggaacagcttgatacacatatggaactctattcccagctgaaagccaaggaagagacttataatcaactacttgacaagggcagactcatgcttctaagccgtgacgactctgggtctggctccaagacagaacagagtgtagcacttttggagcagaagtggcatgtggtcagcagtaagatggaagaaagaaagtcaaagctggaagaggccctcaacttggcaacagaattccagaattccctacaagaatttatcaactggctcactctagcagagcagagtttaaacatcgcttctccaccaagcctgattctaaatactgtcctttcccagatagaagagcacaaggtttttgctaatgaagtaaatgctcatcgagaccagatcattgagctggatcaaactgggaatcaattaaagttccttagccaaaagcaggatgttgttctgatcaagaatttgttggtgagcgtgcagtctcgatgggagaaggttgtccagcgatctattgaaagagggcgatcactagatgatgccaggaagcgggcaaaacaattccatgaagcttggaaaaaactgattgactggctagaagatgcagagagtcacctggactcagaactagagatatccaatgacccagacaaaattaaacttcagctttctaagcataaggagtttcagaagactcttggtggcaagcagcctgtgtatgataccacaattagaactggcagagcactgaaagaaaagactttgcttcccgaagatactcagaaacttgacaatttcctaggagaagtcagagacaaatgggatactgtttgtggcaagtctgtggagcggcagcacaagttggaggaagccctgctcttttcgggtcagttcatggatgctttgcaggcattggttgactggttatacaaggtggagccacagctggctgaggaccagcccgtgcacggggaccttgacctcgtcatgaacctcatggatgcacacaaggtaggggtgaggtctgggctacattggagtgcagtgggtcttctgtatatgactgcctagggtcttctacatatgactgcctctgcccttctttctaggggagaaagagagcctgacagttgctttgtgtgtttaaacaaactgttgctgagattctgcattagtcacaacgaatttaccaaaattggtttgattcagatttggcaatgtgtaaacttcacttcaaggttgcgcctcttcctgtttgtttctctcagttgagtcacaaaatggatctaaattccaacggaaacccataagatagccatttccactgactcctaaaatggaaatgagtgattttttttttaaaccacttctgaacctaacaatcctaacaccaggcacgccaatatttaacataatctctatctgtcatgttgaattatgtaatatcctcctgtttcagcacaagcatttaactttaccttgaaattacaacagattcttattatgtgcacagcagatgtttttatttcccataattctggaaacgttagtataatggttaccattttacagatgaagaaactgggccttaagcaacttttcaaaattatgtatctcctaaatgcctgagctagcatttacagccacattttctggttgtttttttctttcttttttctttttttccccttgagattgggtctcgccatgttgcccagactggtcttgaactcctgggctcaagcagtcctctcatctcggcttcccaaaatgctgggattacaggcatgagccactgcg

SEQ ID NO: 367595 - DNA, 14465 bp, Homo sapiens
  misc_feature (995)..(995): n is a, c, g, or t
  misc_feature (1066)..(1066): n is a, c, g, or t
  misc_feature (1076)..(1076): n is a, c, g, or t
tcaaaacaccatctattaaagctgacaattgtcacaagcagaattgaatactcaaagggaagttaacttcacacagaaaaacacttcatatttcattcaacttgcaacgtatttactgagcgtctaccgtgtgtaaggcagcctgctaggaaatggggtacgaccctcctcctcacagagcttacattctgacaggggaacccgaagtgaacaagcatgatctgcaacaggtatgagatgtcaagaaagcctattacagaggcacccaggcccagtctacggggtcactaaaggctatgggataaactgatctgaaggatgagcacaaatcaatcatcgagaggctgagagcagctcaagtcgggggaataagatgtgcgagaagcaggagagagcaggatgaaataaaatcaggcccgtgtgatgcgtggtgaacagtgagtacccagagaagcgaagctgggggctgaggggctggtcaggaacacgggcttaattcatcaacccaacagcaaacatcagtgcaacaatgtaagcacatttaccttctgggtcataatgtaatttcttccaaagccagtggtggcactcagatatttgatcagaggattgacagattcaggcttttggtggaaaagccatacctggaaaggaaggatgtgtcaatgatttgtttcttctgcccaaggtgagtgaggctggtggagagtcactatctgcactttatagagctccccagacaaattataaacatcctctcaaatatcatcagtgaatggtttggcaaatatattgagaaccaattaaaatatagtttaaaagcacttgcttctacaaccaatttgtattcccacaataaatgtatttatttctgtaacacttaccaaaacaagagcatcaaagccaattccttcacactgccctccctcccacctgctcttcatgaggagtcctttattcctgcatgtttcctgttctttgggccggaattccgnggcgcgatgtcggctcactacaacctctgcctcctggattcaagcaattctgtacctcagcctcccgagtngctgtgattncagatgaacgggaccgggttcagaagaaaacgttcaccaagtgggtcaacaagcacttaatgaaggtccgcaagcacatcaatgatctttatgaagatctgcgggatggccataacctgatctctctgttggaggtcctctcaggcatcaaactgccccgggagaagggcaggatgcgttttcataggctgcagaatgtgcagattgccctggacttcctaaagcagcgacaggtgaaactagtgaatattcgcaatgatgacatcacagatggcaaccccaagttgaccctgggtctgatctggaccattattttgcatttccagatctctgacatctacattagtggagaatcaggggatatgtcagccaaggagaaactactcctgtggacccagaaggtgacagctggttacacaggaatcaaatgcaccaacttttcctcctgctggagtgatgggaagatgttcaatgcactcattcaccgataccgacccgatctagtagacatggagagggtgcaaatccaaagtaaccgagagaatctggaacaagcttttgaagtggcagaaagactgggggtcactcgcctgctggatgcagaagatgtggatgtgccatctccagatgaaaagtctgtaatcacttatgtgtcttcgatttatgatgccttccctaaagttcctgagggtggagaagggatcagtgctacggaagtggactccaggtggcaagaataccaaagccgagtggactccctcattccctggatcaaacagcatacaatactgatgtcagataaaacttttccccaaaaccctgttgaactaaaggcactttataaccaatatatacacttcaaagaaacagaaattctggccaaggagagagaaaaaggaagaattgaggaattatataaattactagaggtgtggattgaatttggccgaattaaactgcctcaaggttatcaccctaatgatgtggaagaagagtggggaaagctcatcatagagatgctggaacgagagaaatcacttcggccggctgtggagaggctggaattgctgctacagattgcaaacaaaatccagaatggtgctttgaactgtgaagaaaaactgacactagctaagaatacactgcaggctgatgctgctcacctggaatcaggacaaccggtacaatgtgagtcagatgtcattatgtacattcaagagtgtgaaggtctcatcaggcagctgcaggtggatctccagatcctgcgggatgagaattactaccagctagaagagctggcttttagggtcatgcgtcttcaggatgagctggtcaccttgcgtctagagtgtacaaacctgtaccggaagggtcatttcacttcacttgaattggttccaccctctactttaaccaccactcatctgaaagcagaacccttaaccaaggcaacccattcttcttctacctcctggttccgaaagcctatgactcgggctgaacttgggccatcagctcctctgaagatgaaggcaatctccgatttgtgtatgaactactgtctttgggtagaagagatgcagatgaaactggagcgagcagagtggggcaatgacctgcctagtgtggagttgcagctagaaacacagcagcacatccatacgagtgtagaagagctgggctcaagtgtcaaggaggccaggttgtatgagggaaagatgtcccagaatttccataccagctatgctgaaactcttggaaagctggagacacagtattgtaaattgaaggaaacttctagcttccggatgaggcaccttcagagcctgcataaatttgtttccagagctacagctgagttgatctggttgaatgagaaggaggaggaggaactagcatatgactggagtgacaacaattccaatatctcagccaagagaaattacttctctgagttgacaatggaactggaggagaaacaggatgtgtttcgttctctacaagatacagcagaactactttcacttgagaaccacccagccaagcagacagtggaggcttacagtgctgctgtccagtcccagttgcagtggatgaagcagctgtgcctgtgtgttgagcagcatgtgaaagagaatactgcttattttcagttcttcagtgatgcacgagagctggagtcattcttgaggaacctccaagattccattaaacgaaaatattcctgtgaccacaacaccagcttatcccgccttgaagacctgctccaggactccatggatgaaaaggagcagcttatacagtccaagagttccgttgccagtctcgttgggagatcaaaaaccatcgttcagctaaaaccacgcagtccagaccatgtgttaaagaacaccatttctgtcaaggctgtctgtgactacaggcagatcgagattactatttgcaaaaatgatgaatgtgtgctagaagataattctcagcggaccaaatggaaagtgatcagccccacagggaacgaggcaatggtgccgtcagtctgcttcctcatccccccacccaataaggatgccattgagatggccagcagggtcgaacaatcttatcagaaggttatggccctttggcatcagctgcatgttaacaccaaaagccttatctcttggaactatctgcgtaaagaccttgaccttgtacagacctggaacctagaaaagcttcgatcctcagcaccaggggagtgccatcagattatgaagaaccttcaggcccactatgaagactttctgcaggatagtcgtgactctgtgctgttctcagtggctgatcgcttgcgcttggaagaggaggtggaagcttgtaaagcccgcttccagcacctgatgaagtccatggagaatgaggacaaagaggagactgtggccaagatgtacatttcagagttgaagaacatccggctacgcctggaggagtatgaacagagggtggtcaaacgaattcagtctctagccagctctaggactgacagagatgcctggcaggacaatgcattaaggattgcagagcaagagcacacccaggaggatttacagcaattgaggtcagacttggatgcagtttctatgaaatgtgacagctttctccatcagtctccatctagttcaagtgtcccaactctgcgctcagaactgaatctgctggtggagaagatggaccatgtctatggtctctctactgtatatctgaataagttaaagacagttgatgttatagtacgtagcatacaggatgctgaactcttggtcaaaggttatgagattaagctgagtcaagaagaagtagtactggcagatctctcagctctggaggcccattggtcgacattacggcactggcttagtgatgtgaaggacaagaattcagtgttttcagtcctggatgaggaaattgccaaggccaaggtagtggcagagcagatgagtcgtctgacaccagagcgaaatctggatttggagcgctatcaggaaaaaggctcccagctgcaggagcgttggcaccgagtcattgcccagctcgagattcgccaatctgagctagaaagtatccaggaagttctgggagattaccgagcctgccatggaactctcatcaagtggattgaggaaaccactgcccagcaggaaatgatgaagccaggccaggcagaggatagcagagtgctttcggagcagctcagccagcagacggccctatttgcagaaattgagagaaatcagacaaaactggatcaatgtcaaaaattttcccagcagtactctactattgtaaaggactatgaattgcaactgatgacatacaaggcctttgtggaatcgcagcagaaatcccctggcaagcgccgtcgcatgctttcctcttcagatgccatcactcaagagttcatggacttaaggactcgctacacggcattggtgactttaacaactcagcacgtgaaatacatcagtgatgcactccggcgtctggaggaggaggagaaagtggtagaagaggagaaacaagaacatgtggagaaggttaaagaacttttgggctgggtgtctaccctagcgaggaatacacaaggaaaagctacctcatccgagaccaaagaatcaacagacattgaaaaagctattttggaacagcaggttctgtcagaagagctgacaacaaagaaagaacaagtctctgaagctattaaaacatcacagatcttcttggccaagcatggtcataagctctcagaaaaagagaagaaacaaatatctgagcaattgaatgccctaaacaaggcttaccatgacctttgtgatggttctgcaaatcagcttcagcagcttcagagccagttggctcaccagacagaacaaaagaccctgcagaaacaacaaaatacctgtcaccagcaactggaggatctttgcagttgggtaggacaggcagaaagagcactggcaggccaccaaggcagaaccacccagcaggatctctctgctttgcagaagaaccaaagtgacttgaaggatttacaggatgacattcagaatcgtgccacctcatttgccactgttgtcaaggacattgaggggttcatggaagagaatcagaccaagctgagcccacgtgagttgacagctcttcgggaaaagcttcatcaggctaaggagcaatatgaggcgctccaggaagagacacgtgtggcccagaaggaactggaggaagcagtgacctccgccttacagcaggagactgaaaagagtaaagcagcaaaggaactggcagagaacaagaagaagatcgatgctctcctggattgggtaacttcagtaggatcatctggtggacagctgctgaccaaccttccaggaatggagcagctctcgggagctagcttggagaaaggagccttggacaccactgatggttacatgggggtgaatcaagccccagagaaactggacaagcaatgtgagatgatgaaggcccgtcaccaagaattgctgtcccagcagcaaaatttcattctggccacccagtcagctcaggccttcttggatcagcatggccacaatctcacacctgaggagcaacagatgctgcaacagaagctgggagagctaaaggaacaatactctacttccctggcccaatcagaggcagaactgaagcaggtgcagacacttcaggatgagttgcagaaatttctgcaggatcataaagagtttgaaagctggttggaacgatccgagaaagagctggagaacatgcataagggaggcagcagccccgagacccttccctccctgctaaagcggcaaggaagcttctcagaggatgtcatttcccacaaaggagacttgagatttgtgactatctcaggacagaaagtcttggacatggaaaacagttttaaggaaggcaaagaaccatcagaaattggaaacttagtaaaggacaagttgaaggatgcaacagaaagatacactgctctccactcaaagtgtacacgattaggatctcacctgaatatgctgttaggccagtatcatcaattccaaaacagtgctgacagcctgcaggcctggatgcaggcttgtgaggccaacgtggagaagctcctctcagatactgttgcctctgaccctggagttctccaggagcagcttgcaacaacaaagcagttgcaggaggaattggctgagcaccaagtacctgtggaaaaactccaaaaagtagctcgtgacataatggaaattgaaggggagccagccccagaccacaggcatgttcaagaaactacagattccatactcagccacttccaaagcctctcctatagcctggctgagcgatcttctctgctgcagaaagcaattgcccaatctcagagtgtccaggaaagcctggagagcctgttgcagtctattggggaagttgaacaaaacctggaagggaagcaggtgtcatcactctcatcaggagtcatccaggaagccttagccacaaatatgaaattgaagcaggacattgctcggcaaaagagcagcttggaggccacccgtgagatggtgacccgattcatggagacagcagacagtactacagcagcagtgctgcagggcaaactggcagaggtgagccagcggttcgaacagctctgtctacagcagcaagaaaaggagagctccctaaagaagcttctaccccaggcagagatgtttgaacacctctctggtaagctgcagcagttcatggaaaacaaaagtcggatgctggcctctggaaatcagccagatcaagatattacacatttcttccaacagatccaggagctcaatttggaaatggaagaccaacaggagaacctagatactcttgagcacctggtcactgaactgagctcttgtggctttgcgctggacttgtgccagcatcaggacagggtacagaatctaagaaaagacttcacagagctacagaagacagttaaagagagagagaaagatgcatcatcttgccaggaacagttggatgaattccggaagctggtcaggaccttccagaaatggttgaaagaaactgaagggagtattccacctacggaaacttctatgagtgctaaagagttagaaaagcagattgaacacctgaagagtctactagatgactgggcaagtaagggaactctggtggaagaaatcaattgcaaaggtacttctttagaaaatctcatcatggaaatcacagcacctgattcccaaggcaagacagatctgacggagatccagtgtgacatgtcagatgtaaacttgaagtatgagaaactagggggagtacttcatgaacgccaggaaagccttcaggctatcctcaacagaatggaggaggttcacaaggaggcaaactctgtgctgcagtggctggaatcaaaagaggaagtcctgaaatccatggatgccatgtcatctccaaccaagacagaaacagtgaaagcccaagctgaatctaacaaggccttcctggctgagttggaacagaattctccaaaaattcaaaaagtaaaggaagccctggctggattactggtgacatatcccaactcacaggaagcagaaaattggaagaaaattcaggaagaactcaattcccgatgggaaagggccactgaggttactgtggctcggcaaaggcagctagaggaatctgcaagtcatctggcctgcttccaggctgcagaatcccagctccggccgtggctgatggagaaagaactgatgatgggagtgctggggcccctgtctattgaccccaacatgttgaatgcacaaaagcaacaggtccagtttatgctaaaggaatttgaagcacgcaggcaacagcatgagcaactgaatgaggcagctcagggcatcctaacaggccctggagatgtctctctgtccaccagccaagtacagaaagaactccagagcatcaatcagaaatgggttgagctgactgacaaactcaactcccgttccagccaaattgaccaagctattgttaagagcacccagtaccaggaactgctccaggacttatcagagaaggtgagggcagttggacaacggctgagtgtccagtcagctatcagcacccaaccagaggctgtaaagcagcaattggaagagaccagtgaaattcgatctgacttggagcagttagaccacgaggttaaggaggctcagacactgtgcgatgaactctcagtgctcattggtgagcagtacctcaaggatgaactgaagaagcgtttggagacagttgccctgcctctccaaggtttagaagaccttgcagccgatcgcattaacagactccaggcagctcttgccagcacccagcagttccagcaaatgtttgatgagttgaggacctggttggatgataaacaaagccagcaagcaaaaaactgcccaatttctgcaaaattggagcggctacagtctcagctacaggagaatgaagagtttcagaaaagtcttaatcaacacagtggctcctatgaggtgattgtggctgaaggggaatctctacttctttctgtacctcctggagaagagaaaaggactctacaaaaccagttggttgagctcaaaaaccattgggaagagcttagtaaaaaaactgcagacagacaatccaggctcaaggattgtatgcagaaagctcagaaatatcagtggcatgtggaagaccttgtgccatggatagaagattgtaaagctaagatgtctgagttgcgagtcactctggatccagtgcagctagagtccagtctcctaagatcaaaggctatgctgaatgaggtggagaagcgccgctccctgctggaaatattgaatagtgctgctgacattctgatcaattcttcagaagcagatgaggatggaatccgggatgagaaggctgggatcaaccagaacatggatgctgttacagaagagctgcaggccaaaacagggtcactcgaagaaatgactcagaggctcagggagttccaggaaagctttaagaatattgaaaagaaggttgaaggagccaaacaccaacttgagatctttgatgctctgggttctcaagcctgtagcaacaagaacctggagaagctaagagctcaacaggaagtgctgcaggccctagagcctcaggtagactatctgaggaactttactcagggtctggtagaagatgccccagatggatctgatgcttctcaacttctccaccaagctgaggtcgcccagcaagagttcctcgaagttaagcaaagagtgaacagtggttgtgtgatgatggaaaacaagctggaggggattggccagtttcactgccgggtccgagagatgttctctcaattggcagacctggatgatgagctagatggcatgggtgctattggcagagacactgatagcctccagtcccaaatcgaggatgtccggctattccttaacaaaattcacgtcctcaaattagacatagaggcctctgaagcagagtgtcgacatatgctagaagaagaggggactctggatttgttaggtctcaaaagggagctagaagccctgaacaaacagtgtggcaaactgacagagagggggaaagctcgtcaggaacagctggaactgacactaggccgtgtagaggacttctacaggaaattgaaaggactcaatgacgcgaccacagcagcagaggaggcagaggccctccagtgggtagtggggaccgaagtggaaatcatcaaccaacaattagcagattttaaaatgtttcagaaagaacaagtggatcctcttcagatgaaattgcagcaggtgaatggacttggccagggattaattcagagtgcaggaaaagactgtgatgtacagggtttagaacatgacatggaagagatcaatgctcgatggaatacattgaataaaaaggtcgcacaaagaattgcacagctacaggaagctttgttgcattgtgggaagtttcaagatgccttggagccattgctcagctggttggcagataccgaggagctcatagccaatcagaaacctccatctgctgagtataaagtggtgaaagcacagatccaagaacagaagttgctccagcggctcctagatgatcgaaaggccacagtagacatgcttcaagcagaaggaggcagaatagcccagtcagcagagctggctgatagagagaaaatcactggacagctggagagtcttgaaagtagatggactgaactactcagtaaggcagcagccaggcaaaaacagctggaagacatcctggttctggccaaacagttccatgagacagctgagcctatttctgacttcttatctgtcacagagaaaaagcttgctaactcagaacctgttggcactcagactgccaaaatacagcagcagatcattcggcacaaggctctggaagaagacatagaaaaccatgcaacagatgtgcaccaggcagtcaaaattgggcagtccctctcctccctgacatctcctgcagaacagggtgtgctgtcagaaaagatagactcattgcaggcccgatacagtgaaattcaagaccgctgttgtcggaaggcagccctacttgaccaagctctgtctaatgctaggctgtttggggaggatgaggtggaggtgctcaactggctggctgaggttgaggacaagctcagttcagtgttcgtaaaggatttcaaacaggatgtcctgcacaggcagcatgctgaccacctggctttaaatgaagaaattgttaatagaaagaagaatgtagatcaagctattaaaaatggtcaggctcttctaaaacaaaccacaggtgaggaggtgttacttatccaggaaaaactagatggtataaagactcgttacgcagacatcacagttactagctccaaggccctcagaactttagagcaagcccggcagctggccaccaagttccagtctacttatgaggaactgaccgggtggctgagggaggtggaggaggagctggcaaccagtggaggacagtctcccacaggggaacagataccccagtttcagcagagacagaaggaattaaagaaggaggtcatggagcacaggctggtgttggacacagtgaatgaggtgagccgtgctctcttagagctggtgccctggagagccagagaagggctggataaacttgtgtccgatgctaacgagcagtacaaactagtcagtgacactattggacaaagggtggatgaaattgatgctgctattcagagatcacaacagtatgagcaagctgccgatgcagaactagcttgggttgctgaaacaaaacggaaactgatggctctgggtccaattcgcctggaacaggaccagaccacagctcagcttcaggtacagaaggctttctccattgacattattcgacacaaagattcaatggatgaactcttcagtcaccgtagtgaaatctttggcacatgtggggaggagcaaaaaactgtattacaggaaaagacagagtctctaatacagcaatatgaagccattagcctactcaattcagagcgttatgcccgcctagagcgggcccaggtcttagtaaaccagttttgggaaacttatgaagagctcagcccctggattgaggaaactcgggcactaatagcacagttaccctctccagccattgatcatgagcagctcaggcagcaacaagaggaaatgaggcaattaagggaatctattgctgaacacaaacctcatattgacaaactactaaagataggcccacaactaaaggaattaaaccctgaggaaggggaaatggtggaagaaaaataccagaaagcagaaaacatgtatgcccaaataaaggaggaggtgcgccagcgagccctggctctggatgaagccgtgtcccagtccacacagattacagagtttcatgataaaattgagcctatgttggagacactggagaatctttcctctcgcctgcgtatgccaccactgatccctgctgaagtagacaagatcagagagtgcatcagtgacaataagagtgccaccgtggagctagaaaaactgcagccatcctttgaggccttgaagcgccgtggagaggagcttattggacgatctcagggagcagacaaggatctggctgcaaaagaaatccaggataaattggatcaaatggtattcttctgggaggacatcaaagctcgggctgaagaacgagaaatcaaatttcttgatgtccttgaattagcagagaagttctggtatgacatggcagctctcctgaccaccatcaaagacacccaggatattgtccatgacttggaaagcccaggcattgatccttccatcatcaaacaacaggttgaagctgctgagactattaaggaagagacagatggtctgcatgaagagctggagtttattcggatccttggagcagatttgatttttgcctgtggagaaactgagaagcctgaagtgaggaagagcattgatgagatgaataatgcttgggagaacttaaacaaaacatggaaagagaggctagaaaaacttgaggatgctatgcaagctgctgtgcagtatcaggacactcttcaggctatgtttgactggctagataacactgtgattaaactctgcaccatgccccctgttggcactgacctcaatactgttaaagatcagttaaatgaaatgaaggagttcaaagtagaagtttaccaacagcaaattgagatggagaagcttaatcaccagggtgaactgatgttaaagaaagctactgatgagacggacagagacattatacgagaaccactgacagaactcaaacacctctgggagaacctgggtgagaaaattgcccaccgacagcacaaactagaaggggctctgttggcccttggtcagttccagcatgccttagaggaactaatgagttggctgactcataccgaagagttgttagatgctcagagaccaataagtggagacccaaaagtcattgaagttgagctcgcaaagcaccatgtcctaaaaaatgatgttttggctcatcaagccacagtggaaacagtcaacaaagctggcaatgagcttcttgaatccagtgctggagatgatgccagcagcttaaggagccgtttggaagccatgaaccaagactgtacgtcacatttagaggcagcgagagagtagcagaatccaggtctgagctccatatgccacagtgcccagcatcatatgctatgctggtatatagtctagtggctgtcagttcaatggagagccagctttctgcatctaagcccacaggaggacttcctgaaactgctagggaacagcttgatacacatatggaactctattcccagctgaaagccaaggaagagacttataatcaactacttgacaagggcagactcatgcttctaagccgtgacgactctgggtctggctccaagacagaacagagtgtagcacttttggagcagaagtggcatgtggtcagcagtaagatggaagaaagaaaggtacagtgtatgatccccatgtttgagtaatttgctgagtgattgcatgtataataattgccatcttatttatatgaagattttttgaagaccagggtattgtaacagaagttgcagaactgattccatctgtgttgagttgcattgatggtataagtttctgttgttatttgcttttataactaagggttcttcacattccacacacctaagagccacagtccagatcctgagtctgc

SEQ ID NO: 367596 - DNA, 551 bp, Homo sapiens
  misc_feature (7)..(7): n is a, c, g, or t
  misc_feature (9)..(10): n is a, c, g, or t
ccatgtngnngacgtggtcgcagtaagtgttcagaaaacgtcagaacatttggggttttaaactgatttgttgctccctatccagcctagacaccagtaactcttgtgttcaccaggacccagacccttggcaagggataggctcgttggtgacattgtgaatttcagatttgttttatccactttttttgctatttatttaaatggtcgatcaacttcccacaaactgaggaatgaattccacgagcctgttctgaaaatgtggacgtaagacaaacacgtgctcgtcctttaatggagttcaccagcacacttgttaaccagtcctgtttgctttcgtctttttttgtgcgtaataaagtcaactgaccaagtgaccatgaaaaggggctgtctggggctcctgttttttagctgctgttcttcagctccgaccatgttgctgtgtgattatctcaattggttttaattgaggcagaaactgaagctctaccaatgaactgtttagaaacaagacacacttttgtattaaaattgcttgcagtaacaaa

SEQ ID NO: 367597 - DNA, 13223 bp, Homo sapiens
  misc_feature (995)..(995): n is a, c, g, or t
  misc_feature (1066)..(1066): n is a, c, g, or t
  misc_feature (1076)..(1076): n is a, c, g, or t
tcaaaacaccatctattaaagctgacaattgtcacaagcagaattgaatactcaaagggaagttaacttcacacagaaaaacacttcatatttcattcaacttgcaacgtatttactgagcgtctaccgtgtgtaaggcagcctgctaggaaatggggtacgaccctcctcctcacagagcttacattctgacaggggaacccgaagtgaacaagcatgatctgcaacaggtatgagatgtcaagaaagcctattacagaggcacccaggcccagtctacggggtcactaaaggctatgggataaactgatctgaaggatgagcacaaatcaatcatcgagaggctgagagcagctcaagtcgggggaataagatgtgcgagaagcaggagagagcaggatgaaataaaatcaggcccgtgtgatgcgtggtgaacagtgagtacccagagaagcgaagctgggggctgaggggctggtcaggaacacgggcttaattcatcaacccaacagcaaacatcagtgcaacaatgtaagcacatttaccttctgggtcataatgtaatttcttccaaagccagtggtggcactcagatatttgatcagaggattgacagattcaggcttttggtggaaaagccatacctggaaaggaaggatgtgtcaatgatttgtttcttctgcccaaggtgagtgaggctggtggagagtcactatctgcactttatagagctccccagacaaattataaacatcctctcaaatatcatcagtgaatggtttggcaaatatattgagaaccaattaaaatatagtttaaaagcacttgcttctacaaccaatttgtattcccacaataaatgtatttatttctgtaacacttaccaaaacaagagcatcaaagccaattccttcacactgccctccctcccacctgctcttcatgaggagtcctttattcctgcatgtttcctgttctttgggccggaattccgnggcgcgatgtcggctcactacaacctctgcctcctggattcaagcaattctgtacctcagcctcccgagtngctgtgattncagatgaacgggaccgggttcagaagaaaacgttcaccaagtgggtcaacaagcacttaatgaaggtccgcaagcacatcaatgatctttatgaagatctgcgggatggccataacctgatctctctgttggaggtcctctcaggcatcaaactgccccgggagaagggcaggatgcgttttcataggctgcagaatgtgcagattgccctggacttcctaaagcagcgacaggtgaaactagtgaatattcgcaatgatgacatcacagatggcaaccccaagttgaccctgggtctgatctggaccattattttgcatttccagatctctgacatctacattagtggagaatcaggggatatgtcagccaaggagaaactactcctgtggacccagaaggtgacagctggttacacaggaatcaaatgcaccaacttttcctcctgctggagtgatgggaagatgttcaatgcactcattcaccgataccgacccgatctagtagacatggagagggtgcaaatccaaagtaaccgagagaatctggaacaagcttttgaagtggcagaaagactgggggtcactcgcctgctggatgcagaagatgtggatgtgccatctccagatgaaaagtctgtaatcacttatgtgtcttcgatttatgatgccttccctaaagttcctgagggtggagaagggatcagtgctacggaagtggactccaggtggcaagaataccaaagccgagtggactccctcattccctggatcaaacagcatacaatactgatgtcagataaaacttttccccaaaaccctgttgaactaaaggcactttataaccaatatatacacttcaaagaaacagaaattctggccaaggagagagaaaaaggaagaattgaggaattatataaattactagaggtgtggattgaatttggccgaattaaactgcctcaaggttatcaccctaatgatgtggaagaagagtggggaaagctcatcatagagatgctggaacgagagaaatcacttcggccggctgtggagaggctggaattgctgctacagattgcaaacaaaatccagaatggtgctttgaactgtgaagaaaaactgacactagctaagaatacactgcaggctgatgctgctcacctggaatcaggacaaccggtacaatgtgagtcagatgtcattatgtacattcaagagtgtgaaggtctcatcaggcagctgcaggtggatctccagatcctgcgggatgagaattactaccagctagaagagctggcttttagggtcatgcgtcttcaggatgagctggtcaccttgcgtctagagtgtacaaacctgtaccggaagggtcatttcacttcacttgaattggttccaccctctactttaaccaccactcatctgaaagcagaacccttaaccaaggcaacccattcttcttctacctcctggttccgaaagcctatgactcgggctgaacttgggccatcagctcctctgaagatgaaggcaatctccgatttgtgtatgaactactgtctttgggtagaagagatgcagatgaaactggagcgagcagagtggggcaatgacctgcctagtgtggagttgcagctagaaacacagcagcacatccatacgagtgtagaagagctgggctcaagtgtcaaggaggccaggttgtatgagggaaagatgtcccagaatttccataccagctatgctgaaactcttggaaagctggagacacagtattgtaaattgaaggaaacttctagcttccggatgaggcaccttcagagcctgcataaatttgtttccagagctacagctgagttgatctggttgaatgagaaggaggaggaggaactagcatatgactggagtgacaacaattccaatatctcagccaagagaaattacttctctgagttgacaatggaactggaggagaaacaggatgtgtttcgttctctacaagatacagcagaactactttcacttgagaaccacccagccaagcagacagtggaggcttacagtgctgctgtccagtcccagttgcagtggatgaagcagctgtgcctgtgtgttgagcagcatgtgaaagagaatactgcttattttcagttcttcagtgatgcacgagagctggagtcattcttgaggaacctccaagattccattaaacgaaaatattcctgtgaccacaacaccagcttatcccgccttgaagacctgctccaggactccatggatgaaaaggagcagcttatacagtccaagagttccgttgccagtctcgttgggagatcaaaaaccatcgttcagctaaaaccacgcagtccagaccatgtgttaaagaacaccatttctgtcaaggctgtctgtgactacaggcagatcgagattactatttgcaaaaatgatgaatgtgtgctagaagataattctcagcggaccaaatggaaagtgatcagccccacagggaacgaggcaatggtgccgtcagtctgcttcctcatccccccacccaataaggatgccattgagatggccagcagggtcgaacaatcttatcagaaggttatggccctttggcatcagctgcatgttaacaccaaaagccttatctcttggaactatctgcgtaaagaccttgaccttgtacagacctggaacctagaaaagcttcgatcctcagcaccaggggagtgccatcagattatgaagaaccttcaggcccactatgaagactttctgcaggatagtcgtgactctgtgctgttctcagtggctgatcgcttgcgcttggaagaggaggtggaagcttgtaaagcccgcttccagcacctgatgaagtccatggagaatgaggacaaagaggagactgtggccaagatgtacatttcagagttgaagaacatccggctacgcctggaggagtatgaacagagggtggtcaaacgaattcagtctctagccagctctaggactgacagagatgcctggcaggacaatgcattaaggattgcagagcaagagcacacccaggaggatttacagcaattgaggtcagacttggatgcagtttctatgaaatgtgacagctttctccatcagtctccatctagttcaagtgtcccaactctgcgctcagaactgaatctgctggtggagaagatggaccatgtctatggtctctctactgtatatctgaataagttaaagacagttgatgttatagtacgtagcatacaggatgctgaactcttggtcaaaggttatgagattaagctgagtcaagaagaagtagtactggcagatctctcagctctggaggcccattggtcgacattacggcactggcttagtgatgtgaaggacaagaattcagtgttttcagtcctggatgaggaaattgccaaggccaaggtagtggcagagcagatgagtcgtctgacaccagagcgaaatctggatttggagcgctatcaggaaaaaggctcccagctgcaggagcgttggcaccgagtcattgcccagctcgagattcgccaatctgagctagaaagtatccaggaagttctgggagattaccgagcctgccatggaactctcatcaagtggattgaggaaaccactgcccagcaggaaatgatgaagccaggccaggcagaggatagcagagtgctttcggagcagctcagccagcagacggccctatttgcagaaattgagagaaatcagacaaaactggatcaatgtcaaaaattttcccagcagtactctactattgtaaaggactatgaattgcaactgatgacatacaaggcctttgtggaatcgcagcagaaatcccctggcaagcgccgtcgcatgctttcctcttcagatgccatcactcaagagttcatggacttaaggactcgctacacggcattggtgactttaacaactcagcacgtgaaatacatcagtgatgcactccggcgtctggaggaggaggagaaagtggtagaagaggagaaacaagaacatgtggagaaggttaaagaacttttgggctgggtgtctaccctagcgaggaatacacaaggaaaagctacctcatccgagaccaaagaatcaacagacattgaaaaagctattttggaacagcaggttctgtcagaagagctgacaacaaagaaagaacaagtctctgaagctattaaaacatcacagatcttcttggccaagcatggtcataagctctcagaaaaagagaagaaacaaatatctgagcaattgaatgccctaaacaaggcttaccatgacctttgtgatggttctgcaaatcagcttcagcagcttcagagccagttggctcaccagacagaacaaaagaccctgcagaaacaacaaaatacctgtcaccagcaactggaggatctttgcagttgggtaggacaggcagaaagagcactggcaggccaccaaggcagaaccacccagcaggatctctctgctttgcagaagaaccaaagtgacttgaaggatttacaggatgacattcagaatcgtgccacctcatttgccactgttgtcaaggacattgaggggttcatggaagagaatcagaccaagctgagcccacgtgagttgacagctcttcgggaaaagcttcatcaggctaaggagcaatatgaggcgctccaggaagagacacgtgtggcccagaaggaactggaggaagcagtgacctccgccttacagcaggagactgaaaagagtaaagcagcaaaggaactggcagagaacaagaagaagatcgatgctctcctggattgggtaacttcagtaggatcatctggtggacagctgctgaccaaccttccaggaatggagcagctctcgggagctagcttggagaaaggagccttggacaccactgatggttacatgggggtgaatcaagccccagagaaactggacaagcaatgtgagatgatgaaggcccgtcaccaagaattgctgtcccagcagcaaaatttcattctggccacccagtcagctcaggccttcttggatcagcatggccacaatctcacacctgaggagcaacagatgctgcaacagaagctgggagagctaaaggaacaatactctacttccctggcccaatcagaggcagaactgaagcaggtgcagacacttcaggatgagttgcagaaatttctgcaggatcataaagagtttgaaagctggttggaacgatccgagaaagagctggagaacatgcataagggaggcagcagccccgagacccttccctccctgctaaagcggcaaggaagcttctcagaggatgtcatttcccacaaaggagacttgagatttgtgactatctcaggacagaaagtcttggacatggaaaacagttttaaggaaggcaaagaaccatcagaaattggaaacttagtaaaggacaagttgaaggatgcaacagaaagatacactgctctccactcaaagtgtacacgattaggatctcacctgaatatgctgttaggccagtatcatcaattccaaaacagtgctgacagcctgcaggcctggatgcaggcttgtgaggccaacgtggagaagctcctctcagatactgttgcctctgaccctggagttctccaggagcagcttgcaacaacaaagcagttgcaggaggaattggctgagcaccaagtacctgtggaaaaactccaaaaagtagctcgtgacataatggaaattgaaggggagccagccccagaccacaggcatgttcaagaaactacagattccatactcagccacttccaaagcctctcctatagcctggctgagcgatcttctctgctgcagaaagcaattgcccaatctcagagtgtccaggaaagcctggagagcctgttgcagtctattggggaagttgaacaaaacctggaagggaagcaggtgtcatcactctcatcaggagtcatccaggaagccttagccacaaatatgaaattgaagcaggacattgctcggcaaaagagcagcttggaggccacccgtgagatggtgacccgattcatggagacagcagacagtactacagcagcagtgctgcagggcaaactggcagaggtgagccagcggttcgaacagctctgtctacagcagcaagaaaaggagagctccctaaagaagcttctaccccaggcagagatgtttgaacacctctctggtaagctgcagcagttcatggaaaacaaaagtcggatgctggcctctggaaatcagccagatcaagatattacacatttcttccaacagatccaggagctcaatttggaaatggaagaccaacaggagaacctagatactcttgagcacctggtcactgaactgagctcttgtggctttgcgctggacttgtgccagcatcaggacagggtacagaatctaagaaaagacttcacagagctacagaagacagttaaagagagagagaaagatgcatcatcttgccaggaacagttggatgaattccggaagctggtcaggaccttccagaaatggttgaaagaaactgaagggagtattccacctacggaaacttctatgagtgctaaagagttagaaaagcagattgaacacctgaagagtctactagatgactgggcaagtaagggaactctggtggaagaaatcaattgcaaaggtacttctttagaaaatctcatcatggaaatcacagcacctgattcccaaggcaagacagatctgacggagatccagtgtgacatgtcagatgtaaacttgaagtatgagaaactagggggagtacttcatgaacgccaggaaagccttcaggctatcctcaacagaatggaggaggttcacaaggaggcaaactctgtgctgcagtggctggaatcaaaagaggaagtcctgaaatccatggatgccatgtcatctccaaccaagacagaaacagtgaaagcccaagctgaatctaacaaggccttcctggctgagttggaacagaattctccaaaaattcaaaaagtaaaggaagccctggctggattactggtgacatatcccaactcacaggaagcagaaaattggaagaaaattcaggaagaactcaattcccgatgggaaagggccactgaggttactgtggctcggcaaaggcagctagaggaatctgcaagtcatctggcctgcttccaggctgcagaatcccagctccggccgtggctgatggagaaagaactgatgatgggagtgctggggcccctgtctattgaccccaacatgttgaatgcacaaaagcaacaggtccagtttatgctaaaggaatttgaagcacgcaggcaacagcatgagcaactgaatgaggcagctcagggcatcctaacaggccctggagatgtctctctgtccaccagccaagtacagaaagaactccagagcatcaatcagaaatgggttgagctgactgacaaactcaactcccgttccagccaaattgaccaagctattgttaagagcacccagtaccaggaactgctccaggacttatcagagaaggtgagggcagttggacaacggctgagtgtccagtcagctatcagcacccaaccagaggctgtaaagcagcaattggaagagaccagtgaaattcgatctgacttggagcagttagaccacgaggttaaggaggctcagacactgtgcgatgaactctcagtgctcattggtgagcagtacctcaaggatgaactgaagaagcgtttggagacagttgccctgcctctccaaggtttagaagaccttgcagccgatcgcattaacagactccaggcagctcttgccagcacccagcagttccagcaaatgtttgatgagttgaggacctggttggatgataaacaaagccagcaagcaaaaaactgcccaatttctgcaaaattggagcggctacagtctcagctacaggagaatgaagagtttcagaaaagtcttaatcaacacagtggctcctatgaggtgattgtggctgaaggggaatctctacttctttctgtacctcctggagaagagaaaaggactctacaaaaccagttggttgagctcaaaaaccattgggaagagcttagtaaaaaaactgcagacagacaatccaggctcaaggattgtatgcagaaagctcagaaatatcagtggcatgtggaagaccttgtgccatggatagaagattgtaaagctaagatgtctgagttgcgagtcactctggatccagtgcagctagagtccagtctcctaagatcaaaggctatgctgaatgaggtggagaagcgccgctccctgctggaaatattgaatagtgctgctgacattctgatcaattcttcagaagcagatgaggatggaatccgggatgagaaggctgggatcaaccagaacatggatgctgttacagaagagctgcaggccaaaacagggtcactcgaagaaatgactcagaggctcagggagttccaggaaagctttaagaatattgaaaagaaggttgaaggagccaaacaccaacttgagatctttgatgctctgggttctcaagcctgtagcaacaagaacctggagaagctaagagctcaacaggaagtgctgcaggccctagagcctcaggtagactatctgaggaactttactcagggtctggtagaagatgccccagatggatctgatgcttctcaacttctccaccaagctgaggtcgcccagcaagagttcctcgaagttaagcaaagagtgaacagtggttgtgtgatgatggaaaacaagctggaggggattggccagtttcactgccgggtccgagagatgttctctcaattggcagacctggatgatgagctagatggcatgggtgctattggcagagacactgatagcctccagtcccaaatcgaggatgtccggctattccttaacaaaattcacgtcctcaaattagacatagaggcctctgaagcagagtgtcgacatatgctagaagaagaggggactctggatttgttaggtctcaaaagggagctagaagccctgaacaaacagtgtggcaaactgacagagagggggaaagctcgtcaggaacagctggaactgacactaggccgtgtagaggacttctacaggaaattgaaaggactcaatgacgcgaccacagcagcagaggaggcagaggccctccagtgggtagtggggaccgaagtggaaatcatcaaccaacaattagcagattttaaaatgtttcagaaagaacaagtggatcctcttcagatgaaattgcagcaggtgaatggacttggccagggattaattcagagtgcaggaaaagactgtgatgtacagggtttagaacatgacatggaagagatcaatgctcgatggaatacattgaataaaaaggtcgcacaaagaattgcacagctacaggaagctttgttgcattgtgggaagtttcaagatgccttggagccattgctcagctggttggcagataccgaggagctcatagccaatcagaaacctccatctgctgagtataaagtggtgaaagcacagatccaagaacagaagttgctccagcggctcctagatgatcgaaaggccacagtagacatgcttcaagcagaaggaggcagaatagcccagtcagcagagctggctgatagagagaaaatcactggacagctggagagtcttgaaagtagatggactgaactactcagtaaggcagcagccaggcaaaaacagctggaagacatcctggttctggccaaacagttccatgagacagctgagcctatttctgacttcttatctgtcacagagaaaaagcttgctaactcagaacctgttggcactcagactgccaaaatacagcagcagatcattcggcacaaggctctggaagaagacatagaaaaccatgcaacagatgtgcaccaggcagtcaaaattgggcagtccctctcctccctgacatctcctgcagaacagggtgtgctgtcagaaaagatagactcattgcaggcccgatacagtgaaattcaagaccgctgttgtcggaaggcagccctacttgaccaagctctgtctaatgctaggctgtttggggaggatgaggtggaggtgctcaactggctggctgaggttgaggacaagctcagttcagtgttcgtaaaggatttcaaacaggatgtcctgcacaggcagcatgctgaccacctggctttaaatgaagaaattgttaatagaaagaagaatgtagatcaagctattaaaaatggtcaggctcttctaaaacaaaccacaggtgaggaggtgttacttatccaggaaaaactagatggtataaagactcgttacgcagacatcacagttactagctccaaggccctcagaactttagagcaagcccggcagctggccaccaagttccagtctacttatgaggaactgaccgggtggctgagggaggtggaggaggagctggcaaccagtggaggacagtctcccacaggggaacagataccccagtttcagcagagacagaaggaattaaagaaggaggtcatggagcacaggctggtgttggacacagtgaatgaggtgagccgtgctctcttagagctggtgccctggagagccagagaagggctggataaacttgtgtccgatgctaacgagcagtacaaactagtcagtgacactattggacaaagggtggatgaaattgatgctgctattcagagatcacaacagtatgagcaagctgccgatgcagaactagcttgggttgctgaaacaaaacggaaactgatggctctgggtccaattcgcctggaacaggaccagaccacagctcagcttcaggtacagaaggctttctccattgacattattcgacacaaagattcaatggatgaactcttcagtcaccgtagtgaaatctttggcacatgtggggaggagcaaaaaactgtattacaggaaaagacagagtctctaatacagcaatatgaagccattagcctactcaattcagagcgttatgcccgcctagagcgggcccaggtcttagtaaaccagttttgggaaacttatgaagagctcagcccctggattgaggaaactcgggcactaatagcacagttaccctctccagccattgatcatgagcagctcaggcagcaacaagaggaaatgaggcaattaagggaatctattgctgaacacaaacctcatattgacaaactactaaagataggcccacaactaaaggaattaaaccctgaggaaggggaaatggtggaagaaaaataccagaaagcagaaaacatgtatgcccaaataaaggaggaggtgcgccagcgagccctggctctggatgaagccgtgtcccagtccacacagattacagagtttcatgataaaattgagcctatgttggagacactggagaatctttcctctcgcctgcgtatgccaccactgatccctgctgaagtagacaagatcagagagtgcatcagtgacaataagagtgccaccgtggagctagaaaaactgcagccatcctttgaggccttgaagcgccgtggagaggagcttattggacgatctcagggagcagacaaggatctggctgcaaaagaaatccaggataaattggatcaaatggtattcttctgggaggacatcaaagctcgggctgaagaacgagaaatcaaatttcttgatgtccttgaattagcagagaagttctggtatgacatggcagctctcctgaccaccatcaaagacacccaggatattgtccatgacttggaaagcccaggcattgatccttccatcatcaaacaacaggttgaagctgctgagactattaaggaagagacagatggtctgcatgaagagctggagtttattcggatccttggagcagatttgatttttgcctgtggagaaatgaagctctaccaatgaactgtttagaaacaagacacacttttgtattaaaattgcttgcagtaacaaa

SEQ ID NO: 367598 - DNA, 12170 bp, Homo sapiens
  misc_feature (995)..(995): n is a, c, g, or t
  misc_feature (1066)..(1066): n is a, c, g, or t
  misc_feature (1076)..(1076): n is a, c, g, or t
tcaaaacaccatctattaaagctgacaattgtcacaagcagaattgaatactcaaagggaagttaacttcacacagaaaaacacttcatatttcattcaacttgcaacgtatttactgagcgtctaccgtgtgtaaggcagcctgctaggaaatggggtacgaccctcctcctcacagagcttacattctgacaggggaacccgaagtgaacaagcatgatctgcaacaggtatgagatgtcaagaaagcctattacagaggcacccaggcccagtctacggggtcactaaaggctatgggataaactgatctgaaggatgagcacaaatcaatcatcgagaggctgagagcagctcaagtcgggggaataagatgtgcgagaagcaggagagagcaggatgaaataaaatcaggcccgtgtgatgcgtggtgaacagtgagtacccagagaagcgaagctgggggctgaggggctggtcaggaacacgggcttaattcatcaacccaacagcaaacatcagtgcaacaatgtaagcacatttaccttctgggtcataatgtaatttcttccaaagccagtggtggcactcagatatttgatcagaggattgacagattcaggcttttggtggaaaagccatacctggaaaggaaggatgtgtcaatgatttgtttcttctgcccaaggtgagtgaggctggtggagagtcactatctgcactttatagagctccccagacaaattataaacatcctctcaaatatcatcagtgaatggtttggcaaatatattgagaaccaattaaaatatagtttaaaagcacttgcttctacaaccaatttgtattcccacaataaatgtatttatttctgtaacacttaccaaaacaagagcatcaaagccaattccttcacactgccctccctcccacctgctcttcatgaggagtcctttattcctgcatgtttcctgttctttgggccggaattccgnggcgcgatgtcggctcactacaacctctgcctcctggattcaagcaattctgtacctcagcctcccgagtngctgtgattncagatgaacgggaccgggttcagaagaaaacgttcaccaagtgggtcaacaagcacttaatgaaggtccgcaagcacatcaatgatctttatgaagatctgcgggatggccataacctgatctctctgttggaggtcctctcaggcatcaaactgccccgggagaagggcaggatgcgttttcataggctgcagaatgtgcagattgccctggacttcctaaagcagcgacaggtgaaactagtgaatattcgcaatgatgacatcacagatggcaaccccaagttgaccctgggtctgatctggaccattattttgcatttccagatctctgacatctacattagtggagaatcaggggatatgtcagccaaggagaaactactcctgtggacccagaaggtgacagctggttacacaggaatcaaatgcaccaacttttcctcctgctggagtgatgggaagatgttcaatgcactcattcaccgataccgacccgatctagtagacatggagagggtgcaaatccaaagtaaccgagagaatctggaacaagcttttgaagtggcagaaagactgggggtcactcgcctgctggatgcagaagatgtggatgtgccatctccagatgaaaagtctgtaatcacttatgtgtcttcgatttatgatgccttccctaaagttcctgagggtggagaagggatcagtgctacggaagtggactccaggtggcaagaataccaaagccgagtggactccctcattccctggatcaaacagcatacaatactgatgtcagataaaacttttccccaaaaccctgttgaactaaaggcactttataaccaatatatacacttcaaagaaacagaaattctggccaaggagagagaaaaaggaagaattgaggaattatataaattactagaggtgtggattgaatttggccgaattaaactgcctcaaggttatcaccctaatgatgtggaagaagagtggggaaagctcatcatagagatgctggaacgagagaaatcacttcggccggctgtggagaggctggaattgctgctacagattgcaaacaaaatccagaatggtgctttgaactgtgaagaaaaactgacactagctaagaatacactgcaggctgatgctgctcacctggaatcaggacaaccggtacaatgtgagtcagatgtcattatgtacattcaagagtgtgaaggtctcatcaggcagctgcaggtggatctccagatcctgcgggatgagaattactaccagctagaagagctggcttttagggtcatgcgtcttcaggatgagctggtcaccttgcgtctagagtgtacaaacctgtaccggaagggtcatttcacttcacttgaattggttccaccctctactttaaccaccactcatctgaaagcagaacccttaaccaaggcaacccattcttcttctacctcctggttccgaaagcctatgactcgggctgaacttgggccatcagctcctctgaagatgaaggcaatctccgatttgtgtatgaactactgtctttgggtagaagagatgcagatgaaactggagcgagcagagtggggcaatgacctgcctagtgtggagttgcagctagaaacacagcagcacatccatacgagtgtagaagagctgggctcaagtgtcaaggaggccaggttgtatgagggaaagatgtcccagaatttccataccagctatgctgaaactcttggaaagctggagacacagtattgtaaattgaaggaaacttctagcttccggatgaggcaccttcagagcctgcataaatttgtttccagagctacagctgagttgatctggttgaatgagaaggaggaggaggaactagcatatgactggagtgacaacaattccaatatctcagccaagagaaattacttctctgagttgacaatggaactggaggagaaacaggatgtgtttcgttctctacaagatacagcagaactactttcacttgagaaccacccagccaagcagacagtggaggcttacagtgctgctgtccagtcccagttgcagtggatgaagcagctgtgcctgtgtgttgagcagcatgtgaaagagaatactgcttattttcagttcttcagtgatgcacgagagctggagtcattcttgaggaacctccaagattccattaaacgaaaatattcctgtgaccacaacaccagcttatcccgccttgaagacctgctccaggactccatggatgaaaaggagcagcttatacagtccaagagttccgttgccagtctcgttgggagatcaaaaaccatcgttcagctaaaaccacgcagtccagaccatgtgttaaagaacaccatttctgtcaaggctgtctgtgactacaggcagatcgagattactatttgcaaaaatgatgaatgtgtgctagaagataattctcagcggaccaaatggaaagtgatcagccccacagggaacgaggcaatggtgccgtcagtctgcttcctcatccccccacccaataaggatgccattgagatggccagcagggtcgaacaatcttatcagaaggttatggccctttggcatcagctgcatgttaacaccaaaagccttatctcttggaactatctgcgtaaagaccttgaccttgtacagacctggaacctagaaaagcttcgatcctcagcaccaggggagtgccatcagattatgaagaaccttcaggcccactatgaagactttctgcaggatagtcgtgactctgtgctgttctcagtggctgatcgcttgcgcttggaagaggaggtggaagcttgtaaagcccgcttccagcacctgatgaagtccatggagaatgaggacaaagaggagactgtggccaagatgtacatttcagagttgaagaacatccggctacgcctggaggagtatgaacagagggtggtcaaacgaattcagtctctagccagctctaggactgacagagatgcctggcaggacaatgcattaaggattgcagagcaagagcacacccaggaggatttacagcaattgaggtcagacttggatgcagtttctatgaaatgtgacagctttctccatcagtctccatctagttcaagtgtcccaactctgcgctcagaactgaatctgctggtggagaagatggaccatgtctatggtctctctactgtatatctgaataagttaaagacagttgatgttatagtacgtagcatacaggatgctgaactcttggtcaaaggttatgagattaagctgagtcaagaagaagtagtactggcagatctctcagctctggaggcccattggtcgacattacggcactggcttagtgatgtgaaggacaagaattcagtgttttcagtcctggatgaggaaattgccaaggccaaggtagtggcagagcagatgagtcgtctgacaccagagcgaaatctggatttggagcgctatcaggaaaaaggctcccagctgcaggagcgttggcaccgagtcattgcccagctcgagattcgccaatctgagctagaaagtatccaggaagttctgggagattaccgagcctgccatggaactctcatcaagtggattgaggaaaccactgcccagcaggaaatgatgaagccaggccaggcagaggatagcagagtgctttcggagcagctcagccagcagacggccctatttgcagaaattgagagaaatcagacaaaactggatcaatgtcaaaaattttcccagcagtactctactattgtaaaggactatgaattgcaactgatgacatacaaggcctttgtggaatcgcagcagaaatcccctggcaagcgccgtcgcatgctttcctcttcagatgccatcactcaagagttcatggacttaaggactcgctacacggcattggtgactttaacaactcagcacgtgaaatacatcagtgatgcactccggcgtctggaggaggaggagaaagtggtagaagaggagaaacaagaacatgtggagaaggttaaagaacttttgggctgggtgtctaccctagcgaggaatacacaaggaaaagctacctcatccgagaccaaagaatcaacagacattgaaaaagctattttggaacagcaggttctgtcagaagagctgacaacaaagaaagaacaagtctctgaagctattaaaacatcacagatcttcttggccaagcatggtcataagctctcagaaaaagagaagaaacaaatatctgagcaattgaatgccctaaacaaggcttaccatgacctttgtgatggttctgcaaatcagcttcagcagcttcagagccagttggctcaccagacagaacaaaagaccctgcagaaacaacaaaatacctgtcaccagcaactggaggatctttgcagttgggtaggacaggcagaaagagcactggcaggccaccaaggcagaaccacccagcaggatctctctgctttgcagaagaaccaaagtgacttgaaggatttacaggatgacattcagaatcgtgccacctcatttgccactgttgtcaaggacattgaggggttcatggaagagaatcagaccaagctgagcccacgtgagttgacagctcttcgggaaaagcttcatcaggctaaggagcaatatgaggcgctccaggaagagacacgtgtggcccagaaggaactggaggaagcagtgacctccgccttacagcaggagactgaaaagagtaaagcagcaaaggaactggcagagaacaagaagaagatcgatgctctcctggattgggtaacttcagtaggatcatctggtggacagctgctgaccaaccttccaggaatggagcagctctcgggagctagcttggagaaaggagccttggacaccactgatggttacatgggggtgaatcaagccccagagaaactggacaagcaatgtgagatgatgaaggcccgtcaccaagaattgctgtcccagcagcaaaatttcattctggccacccagtcagctcaggccttcttggatcagcatggccacaatctcacacctgaggagcaacagatgctgcaacagaagctgggagagctaaaggaacaatactctacttccctggcccaatcagaggcagaactgaagcaggtgcagacacttcaggatgagttgcagaaatttctgcaggatcataaagagtttgaaagctggttggaacgatccgagaaagagctggagaacatgcataagggaggcagcagccccgagacccttccctccctgctaaagcggcaaggaagcttctcagaggatgtcatttcccacaaaggagacttgagatttgtgactatctcaggacagaaagtcttggacatggaaaacagttttaaggaaggcaaagaaccatcagaaattggaaacttagtaaaggacaagttgaaggatgcaacagaaagatacactgctctccactcaaagtgtacacgattaggatctcacctgaatatgctgttaggccagtatcatcaattccaaaacagtgctgacagcctgcaggcctggatgcaggcttgtgaggccaacgtggagaagctcctctcagatactgttgcctctgaccctggagttctccaggagcagcttgcaacaacaaagcagttgcaggaggaattggctgagcaccaagtacctgtggaaaaactccaaaaagtagctcgtgacataatggaaattgaaggggagccagccccagaccacaggcatgttcaagaaactacagattccatactcagccacttccaaagcctctcctatagcctggctgagcgatcttctctgctgcagaaagcaattgcccaatctcagagtgtccaggaaagcctggagagcctgttgcagtctattggggaagttgaacaaaacctggaagggaagcaggtgtcatcactctcatcaggagtcatccaggaagccttagccacaaatatgaaattgaagcaggacattgctcggcaaaagagcagcttggaggccacccgtgagatggtgacccgattcatggagacagcagacagtactacagcagcagtgctgcagggcaaactggcagaggtgagccagcggttcgaacagctctgtctacagcagcaagaaaaggagagctccctaaagaagcttctaccccaggcagagatgtttgaacacctctctggtaagctgcagcagttcatggaaaacaaaagtcggatgctggcctctggaaatcagccagatcaagatattacacatttcttccaacagatccaggagctcaatttggaaatggaagaccaacaggagaacctagatactcttgagcacctggtcactgaactgagctcttgtggctttgcgctggacttgtgccagcatcaggacagggtacagaatctaagaaaagacttcacagagctacagaagacagttaaagagagagagaaagatgcatcatcttgccaggaacagttggatgaattccggaagctggtcaggaccttccagaaatggttgaaagaaactgaagggagtattccacctacggaaacttctatgagtgctaaagagttagaaaagcagattgaacacctgaagagtctactagatgactgggcaagtaagggaactctggtggaagaaatcaattgcaaaggtacttctttagaaaatctcatcatggaaatcacagcacctgattcccaaggcaagacagatctgacggagatccagtgtgacatgtcagatgtaaacttgaagtatgagaaactagggggagtacttcatgaacgccaggaaagccttcaggctatcctcaacagaatggaggaggttcacaaggaggcaaactctgtgctgcagtggctggaatcaaaagaggaagtcctgaaatccatggatgccatgtcatctccaaccaagacagaaacagtgaaagcccaagctgaatctaacaaggccttcctggctgagttggaacagaattctccaaaaattcaaaaagtaaaggaagccctggctggattactggtgacatatcccaactcacaggaagcagaaaattggaagaaaattcaggaagaactcaattcccgatgggaaagggccactgaggttactgtggctcggcaaaggcagctagaggaatctgcaagtcatctggcctgcttccaggctgcagaatcccagctccggccgtggctgatggagaaagaactgatgatgggagtgctggggcccctgtctattgaccccaacatgttgaatgcacaaaagcaacaggtccagtttatgctaaaggaatttgaagcacgcaggcaacagcatgagcaactgaatgaggcagctcagggcatcctaacaggccctggagatgtctctctgtccaccagccaagtacagaaagaactccagagcatcaatcagaaatgggttgagctgactgacaaactcaactcccgttccagccaaattgaccaagctattgttaagagcacccagtaccaggaactgctccaggacttatcagagaaggtgagggcagttggacaacggctgagtgtccagtcagctatcagcacccaaccagaggctgtaaagcagcaattggaagagaccagtgaaattcgatctgacttggagcagttagaccacgaggttaaggaggctcagacactgtgcgatgaactctcagtgctcattggtgagcagtacctcaaggatgaactgaagaagcgtttggagacagttgccctgcctctccaaggtttagaagaccttgcagccgatcgcattaacagactccaggcagctcttgccagcacccagcagttccagcaaatgtttgatgagttgaggacctggttggatgataaacaaagccagcaagcaaaaaactgcccaatttctgcaaaattggagcggctacagtctcagctacaggagaatgaagagtttcagaaaagtcttaatcaacacagtggctcctatgaggtgattgtggctgaaggggaatctctacttctttctgtacctcctggagaagagaaaaggactctacaaaaccagttggttgagctcaaaaaccattgggaagagcttagtaaaaaaactgcagacagacaatccaggctcaaggattgtatgcagaaagctcagaaatatcagtggcatgtggaagaccttgtgccatggatagaagattgtaaagctaagatgtctgagttgcgagtcactctggatccagtgcagctagagtccagtctcctaagatcaaaggctatgctgaatgaggtggagaagcgccgctccctgctggaaatattgaatagtgctgctgacattctgatcaattcttcagaagcagatgaggatggaatccgggatgagaaggctgggatcaaccagaacatggatgctgttacagaagagctgcaggccaaaacagggtcactcgaagaaatgactcagaggctcagggagttccaggaaagctttaagaatattgaaaagaaggttgaaggagccaaacaccaacttgagatctttgatgctctgggttctcaagcctgtagcaacaagaacctggagaagctaagagctcaacaggaagtgctgcaggccctagagcctcaggtagactatctgaggaactttactcagggtctggtagaagatgccccagatggatctgatgcttctcaacttctccaccaagctgaggtcgcccagcaagagttcctcgaagttaagcaaagagtgaacagtggttgtgtgatgatggaaaacaagctggaggggattggccagtttcactgccgggtccgagagatgttctctcaattggcagacctggatgatgagctagatggcatgggtgctattggcagagacactgatagcctccagtcccaaatcgaggatgtccggctattccttaacaaaattcacgtcctcaaattagacatagaggcctctgaagcagagtgtcgacatatgctagaagaagaggggactctggatttgttaggtctcaaaagggagctagaagccctgaacaaacagtgtggcaaactgacagagagggggaaagctcgtcaggaacagctggaactgacactaggccgtgtagaggacttctacaggaaattgaaaggactcaatgacgcgaccacagcagcagaggaggcagaggccctccagtgggtagtggggaccgaagtggaaatcatcaaccaacaattagcagattttaaaatgtttcagaaagaacaagtggatcctcttcagatgaaattgcagcaggtgaatggacttggccagggattaattcagagtgcaggaaaagactgtgatgtacagggtttagaacatgacatggaagagatcaatgctcgatggaatacattgaataaaaaggtcgcacaaagaattgcacagctacaggaagctttgttgcattgtgggaagtttcaagatgccttggagccattgctcagctggttggcagataccgaggagctcatagccaatcagaaacctccatctgctgagtataaagtggtgaaagcacagatccaagaacagaagttgctccagcggctcctagatgatcgaaaggccacagtagacatgcttcaagcagaaggaggcagaatagcccagtcagcagagctggctgatagagagaaaatcactggacagctggagagtcttgaaagtagatggactgaactactcagtaaggcagcagccaggcaaaaacagctggaagacatcctggttctggccaaacagttccatgagacagctgagcctatttctgacttcttatctgtcacagagaaaaagcttgctaactcagaacctgttggcactcagactgccaaaatacagcagcagatcattcggcacaaggctctggaagaagacatagaaaaccatgcaacagatgtgcaccaggcagtcaaaattgggcagtccctctcctccctgacatctcctgcagaacagggtgtgctgtcagaaaagatagactcattgcaggcccgatacagtgaaattcaagaccgctgttgtcggaaggcagccctacttgaccaagctctgtctaatgctaggctgtttggggaggatgaggtggaggtgctcaactggctggctgaggttgaggacaagctcagttcagtgttcgtaaaggatttcaaacaggatgtcctgcacaggcagcatgctgaccacctggctttaaatgaagaaattgttaatagaaagaagaatgtagatcaagctattaaaaatggtcaggctcttctaaaacaaaccacaggtgaggaggtgttacttatccaggaaaaactagatggtataaagactcgttacgcagacatcacagttactagctccaaggccctcagaactttagagcaagcccggcagctggccaccaagttccagtctacttatgaggaactgaccgggtggctgagggaggtggaggaggagctggcaaccagtggaggacagtctcccacaggggaacagataccccagtttcagcagagacagaaggaattaaagaaggaggtcatggagcacaggctggtgttggacacagtgaatgaggtgagccgtgctctcttagagctggtgccctggagagccagagaagggctggataaacttgtgtccgatgctaacgagcagtacaaactagtcagtgacactattggacaaagggtggatgaaattgatgctgctattcagagatcacaacagagattctcctgtgcctcctgttggctctctttgcatctggcctcatccaccgagtctgtgtcaccacctgcttcatcttctccatggttggtctgtactacatcaacaagatctcctccaccctgtaccaggcagcagctccagtcctcacaccagccaaggtcacaggcaagagcaagaagagaaactgaccctgaatgttcaataaagttgattctttgta

SEQ ID NO: 367599 - DNA, 3744 bp, Homo sapiens
  misc_feature (995)..(995): n is a, c, g, or t
  misc_feature (1066)..(1066): n is a, c, g, or t
  misc_feature (1076)..(1076): n is a, c, g, or t
tcaaaacaccatctattaaagctgacaattgtcacaagcagaattgaatactcaaagggaagttaacttcacacagaaaaacacttcatatttcattcaacttgcaacgtatttactgagcgtctaccgtgtgtaaggcagcctgctaggaaatggggtacgaccctcctcctcacagagcttacattctgacaggggaacccgaagtgaacaagcatgatctgcaacaggtatgagatgtcaagaaagcctattacagaggcacccaggcccagtctacggggtcactaaaggctatgggataaactgatctgaaggatgagcacaaatcaatcatcgagaggctgagagcagctcaagtcgggggaataagatgtgcgagaagcaggagagagcaggatgaaataaaatcaggcccgtgtgatgcgtggtgaacagtgagtacccagagaagcgaagctgggggctgaggggctggtcaggaacacgggcttaattcatcaacccaacagcaaacatcagtgcaacaatgtaagcacatttaccttctgggtcataatgtaatttcttccaaagccagtggtggcactcagatatttgatcagaggattgacagattcaggcttttggtggaaaagccatacctggaaaggaaggatgtgtcaatgatttgtttcttctgcccaaggtgagtgaggctggtggagagtcactatctgcactttatagagctccccagacaaattataaacatcctctcaaatatcatcagtgaatggtttggcaaatatattgagaaccaattaaaatatagtttaaaagcacttgcttctacaaccaatttgtattcccacaataaatgtatttatttctgtaacacttaccaaaacaagagcatcaaagccaattccttcacactgccctccctcccacctgctcttcatgaggagtcctttattcctgcatgtttcctgttctttgggccggaattccgnggcgcgatgtcggctcactacaacctctgcctcctggattcaagcaattctgtacctcagcctcccgagtngctgtgattncagatgaacgggaccgggttcagaagaaaacgttcaccaagtgggtcaacaagcacttaatgaaggtccgcaagcacatcaatgatctttatgaagatctgcgggatggccataacctgatctctctgttggaggtcctctcaggcatcaaactgccccgggagaagggcaggatgcgttttcataggctgcagaatgtgcagattgccctggacttcctaaagcagcgacaggtgaaactagtgaatattcgcaatgatgacatcacagatggcaaccccaagttgaccctgggtctgatctggaccattattttgcatttccagatctctgacatctacattagtggagaatcaggggatatgtcagccaaggagaaactactcctgtggacccagaaggtgacagctggttacacaggaatcaaatgcaccaacttttcctcctgctggagtgatgggaagatgttcaatgcactcattcaccgataccgacccgatctagtagacatggagagggtgcaaatccaaagtaaccgagagaatctggaacaagcttttgaagtggcagaaagactgggggtcactcgcctgctggatgcagaagatgtggatgtgccatctccagatgaaaagtctgtaatcacttatgtgtcttcgatttatgatgccttccctaaagttcctgagggtggagaagggatcagtgctacggaagtggactccaggtggcaagaataccaaagccgagtggactccctcattccctggatcaaacagcatacaatactgatgtcagataaaacttttccccaaaaccctgttgaactaaaggcactttataaccaatatatacacttcaaagaaacagaaattctggccaaggagagagaaaaaggaagaattgaggaattatataaattactagaggtgtggattgaatttggccgaattaaactgcctcaaggttatcaccctaatgatgtggaagaagagtggggaaagctcatcatagagatgctggaacgagagaaatcacttcggccggctgtggagaggctggaattgctgctacagattgcaaacaaaatccagaatggtgctttgaactgtgaagaaaaactgacactagctaagaatacactgcaggctgatgctgctcacctggaatcaggacaaccggtacaatgtgagtcagatgtcattatgtacattcaagagtgtgaaggtctcatcaggcagctgcaggtggatctccagatcctgcgggatgagaattactaccagctagaagagctggcttttagggtcatgcgtcttcaggatgagctggtcaccttgcgtctagagtgtacaaacctgtaccggaagggtcatttcacttcacttgaattggttccaccctctactttaaccaccactcatctgaaagcagaacccttaaccaaggcaacccattcttcttctacctcctggttccgaaagcctatgactcgggctgaacttgggccatcagctcctctgaagatgaaggcaatctccgatttgtgtatgaactactgtctttgggtagaagagatgcagatgaaactggagcgagcagagtggggcaatgacctgcctagtgtggagttgcagctagaaacacagcagcacatccatacgagtgtagaagagctgggctcaagtgtcaaggaggccaggttgtatgagggaaagatgtcccagaatttccataccagctatgctgaaactcttggaaagctggagacacagtattgtaaattgaaggaaacttctagcttccggatgaggcaccttcagagcctgcataaatttgtttccagagctacagctgagttgatctggttgaatgagaaggaggaggaggaactagcatatgactggagtgacaacaattccaatatctcagccaagagaaattacttctctgagttgacaatggaactggaggagaaacaggatgtgtttcgttctctacaagatacagcagaactactttcacttgagaaccacccagccaagcagacagtggaggcttacagtgctgctgtccagtcccagttgcagtggatgaagcagctgtgcctgtgtgttgagcagcatgtgaaagagaatactgcttattttcagttcttcagtgatgcacgagagctggagtcattcttgaggaacctccaagattccattaaacgaaaatattcctgtgaccacaacaccagcttatcccgccttgaagacctgctccaggactccatggtgggtgttgcctcagtggggatgattacttctgagaaagagagtaaaccatatcagctgctgctgtttatatccttgaaagctccagggcaatgggccattgttgtaataaagtttggcttacattcaaatagagtttaatcgatgttgttctgtctctttcctttttttccttttcttttcttaaataagttgctaataagatttctttgggtatgttattgaagtaaaggcctagtcttctcctctgagccactttgagctcattgtactttctttgcatttttcttattttaatgtaatagttggagccaaggatgaggtgttgagcatgaagaaaaggttgaaggggattagttgatatcaaattcttttttactctcttatgc

SEQ ID NO: 367600 - DNA, 369 bp, Homo sapiens
aattaagcaacagattttaaaaaaaagaacaaaggaaagagtcattgggttaaagacctaagtagtgtcataactctctgtaattacatgtccataggagaatgtattgaaatacaaaaccacatgttttcttgatgcttcacgtgcaaatgcttgttctttctttttattcctggtcgtctttcattaagtcataaatgccccaagaataaccagtctctgcgtggtatagagagtctaatagcctttgtattaaatcttctttggcttgtaattatctagatgtttcagaaagaacaagtggatcctcttcagatgaaattgcagcaggtgaatggacttggccagggattaattcagagtgcagga

SEQ ID NO: 367601 - DNA, 132 bp, Homo sapiens
ttttctttctggaaacataggagtttcagaagactcttggtggcaagcagcctgtgtatgataccacaattagaactggcagagcactgaaagaaaagactttgcttcccgaagatactcagaaacttgaca

SEQ ID NO: 367602 - DNA, 341 bp, Homo sapiens
agagtaagattgaagacctctttccccagaaatgtccaaacaagggcaatatattcctgagtttggtacgcttcaatgttatatgcggttgttcagccaaacctgctatggaaaagattatgagaaagaaaggccatgttaggtaactgatgtctggagtcacagaatgaactactcttagctcaagttgactttataaaacttagtctggcaagtaacaaaactgcttcattgacagagagaaagatgcatcatcttgccaggaacagttggatgaattccggaagctggtcaggaccttccagaaatggttgaaagaaactgaagggagtattccacct

SEQ ID NO: 367603 - DNA, 316 bp, Homo sapiens
gtcggggagcctgtctccctgtcccccaggggacaccttgccctggaacctgccactgcatgagcagaaaaagcggaaaagccaggattcggtgctggaccctgcagagcgtgctgtggtcagagtcgctggtaagagaggtcccccagcaggctggacgctgtgggtgtgagggaggaatgggccagggcacagcagctgtgtggggagccgaggggtcctcaccagggcctctgacaaagcagccatcatctgatttgttattattattcttggaaagacgttgaaataacattaacgaaaaactcaaaagagg

SEQ ID NO: 367604 - DNA, 650 bp, Homo sapiens
atctgagcttctggttttagaaattgtatcataattctattttgtaccccagtgtttggcatggtgccagtcatatagtaaatgttcaatagatatttgataaatgaataaataaatcagaaggatggtctcttaatgcttttcaaaacactagggagtatatacagaacagatgtccctacttatgaggaaaaagccccagatactacatttggccattttcttctttaaacagagtctactagatgactgggcaagtaagggaactctggtggaagaaatcaattgcaaaggtacttctttagaaaatctcatcatggaaatcacagcacctgattcccaaggcaagacaggtgagtacaggctcttcaaaatatagtgaataaaaattgctctttgcttttggcctttggagatgcctccttatataattaaagtgaaaatcaaggttggatatgaaaacaaagggcatgcccaaagcagtcttcccctgcaacctgacctgtcaccccttttgctatataacattgctccattttgcaaaattccttcccatgatggaaaaagtaaatgaactagttgtcccacttagaactatcaaatgaacactgaataattaaaatgagattttcatcttgagaatttccctt

SEQ ID NO: 367605 - DNA, 290 bp, Homo sapiens
tggtttatgcactgttttgtatatatgttacttcagtaaaatggaggaaaagaggaagtgttacatttttattctgttgcaatttcttctggctttttctttctagcttcgatcctcagcaccaggggagtgccatcagattatgaagaaccttcaggcccactatgaagactttctgcaggatagtcgtgactctgtgctgttctcagtggctgatcgcttgcgcttggaagaggaggtggaagcttgtaaagcccgcttccagcacctgatgaagtccatggagaatg

SEQ ID NO: 367606 - DNA, 18280 bp, Homo sapiens
  misc_feature (995)..(995): n is a, c, g, or t
  misc_feature (1066)..(1066): n is a, c, g, or t
  misc_feature (1076)..(1076): n is a, c, g, or t
tcaaaacaccatctattaaagctgacaattgtcacaagcagaattgaatactcaaagggaagttaacttcacacagaaaaacacttcatatttcattcaacttgcaacgtatttactgagcgtctaccgtgtgtaaggcagcctgctaggaaatggggtacgaccctcctcctcacagagcttacattctgacaggggaacccgaagtgaacaagcatgatctgcaacaggtatgagatgtcaagaaagcctattacagaggcacccaggcccagtctacggggtcactaaaggctatgggataaactgatctgaaggatgagcacaaatcaatcatcgagaggctgagagcagctcaagtcgggggaataagatgtgcgagaagcaggagagagcaggatgaaataaaatcaggcccgtgtgatgcgtggtgaacagtgagtacccagagaagcgaagctgggggctgaggggctggtcaggaacacgggcttaattcatcaacccaacagcaaacatcagtgcaacaatgtaagcacatttaccttctgggtcataatgtaatttcttccaaagccagtggtggcactcagatatttgatcagaggattgacagattcaggcttttggtggaaaagccatacctggaaaggaaggatgtgtcaatgatttgtttcttctgcccaaggtgagtgaggctggtggagagtcactatctgcactttatagagctccccagacaaattataaacatcctctcaaatatcatcagtgaatggtttggcaaatatattgagaaccaattaaaatatagtttaaaagcacttgcttctacaaccaatttgtattcccacaataaatgtatttatttctgtaacacttaccaaaacaagagcatcaaagccaattccttcacactgccctccctcccacctgctcttcatgaggagtcctttattcctgcatgtttcctgttctttgggccggaattccgnggcgcgatgtcggctcactacaacctctgcctcctggattcaagcaattctgtacctcagcctcccgagtngctgtgattncagatgaacgggaccgggttcagaagaaaacgttcaccaagtgggtcaacaagcacttaatgaaggtccgcaagcacatcaatgatctttatgaagatctgcgggatggccataacctgatctctctgttggaggtcctctcaggcatcaaactgccccgggagaagggcaggatgcgttttcataggctgcagaatgtgcagattgccctggacttcctaaagcagcgacaggtgaaactagtgaatattcgcaatgatgacatcacagatggcaaccccaagttgaccctgggtctgatctggaccattattttgcatttccagatctctgacatctacattagtggagaatcaggggatatgtcagccaaggagaaactactcctgtggacccagaaggtgacagctggttacacaggaatcaaatgcaccaacttttcctcctgctggagtgatgggaagatgttcaatgcactcattcaccgataccgacccgatctagtagacatggagagggtgcaaatccaaagtaaccgagagaatctggaacaagcttttgaagtggcagaaagactgggggtcactcgcctgctggatgcagaagatgtggatgtgccatctccagatgaaaagtctgtaatcacttatgtgtcttcgatttatgatgccttccctaaagttcctgagggtggagaagggatcagtgctacggaagtggactccaggtggcaagaataccaaagccgagtggactccctcattccctggatcaaacagcatacaatactgatgtcagataaaacttttccccaaaaccctgttgaactaaaggcactttataaccaatatatacacttcaaagaaacagaaattctggccaaggagagagaaaaaggaagaattgaggaattatataaattactagaggtgtggattgaatttggccgaattaaactgcctcaaggttatcaccctaatgatgtggaagaagagtggggaaagctcatcatagagatgctggaacgagagaaatcacttcggccggctgtggagaggctggaattgctgctacagattgcaaacaaaatccagaatggtgctttgaactgtgaagaaaaactgacactagctaagaatacactgcaggctgatgctgctcacctggaatcaggacaaccggtacaatgtgagtcagatgtcattatgtacattcaagagtgtgaaggtctcatcaggcagctgcaggtggatctccagatcctgcgggatgagaattactaccagctagaagagctggcttttagggtcatgcgtcttcaggatgagctggtcaccttgcgtctagagtgtacaaacctgtaccggaagggtcatttcacttcacttgaattggttccaccctctactttaaccaccactcatctgaaagcagaacccttaaccaaggcaacccattcttcttctacctcctggttccgaaagcctatgactcgggctgaacttgggccatcagctcctctgaagatgaaggcaatctccgatttgtgtatgaactactgtctttgggtagaagagatgcagatgaaactggagcgagcagagtggggcaatgacctgcctagtgtggagttgcagctagaaacacagcagcacatccatacgagtgtagaagagctgggctcaagtgtcaaggaggccaggttgtatgagggaaagatgtcccagaatttccataccagctatgctgaaactcttggaaagctggagacacagtattgtaaattgaaggaaacttctagcttccggatgaggcaccttcagagcctgcataaatttgtttccagagctacagctgagttgatctggttgaatgagaaggaggaggaggaactagcatatgactggagtgacaacaattccaatatctcagccaagagaaattacttctctgagttgacaatggaactggaggagaaacaggatgtgtttcgttctctacaagatacagcagaactactttcacttgagaaccacccagccaagcagacagtggaggcttacagtgctgctgtccagtcccagttgcagtggatgaagcagctgtgcctgtgtgttgagcagcatgtgaaagagaatactgcttattttcagttcttcagtgatgcacgagagctggagtcattcttgaggaacctccaagattccattaaacgaaaatattcctgtgaccacaacaccagcttatcccgccttgaagacctgctccaggactccatggatgaaaaggagcagcttatacagtccaagagttccgttgccagtctcgttgggagatcaaaaaccatcgttcagctaaaaccacgcagtccagaccatgtgttaaagaacaccatttctgtcaaggctgtctgtgactacaggcagatcgagattactatttgcaaaaatgatgaatgtgtgctagaagataattctcagcggaccaaatggaaagtgatcagccccacagggaacgaggcaatggtgccgtcagtctgcttcctcatccccccacccaataaggatgccattgagatggccagcagggtcgaacaatcttatcagaaggttatggccctttggcatcagctgcatgttaacaccaaaagccttatctcttggaactatctgcgtaaagaccttgaccttgtacagacctggaacctagaaaagcttcgatcctcagcaccaggggagtgccatcagattatgaagaaccttcaggcccactatgaagactttctgcaggatagtcgtgactctgtgctgttctcagtggctgatcgcttgcgcttggaagaggaggtggaagcttgtaaagcccgcttccagcacctgatgaagtccatggagaatgaggacaaagaggagactgtggccaagatgtacatttcagagttgaagaacatccggctacgcctggaggagtatgaacagagggtggtcaaacgaattcagtctctagccagctctaggactgacagagatgcctggcaggacaatgcattaaggattgcagagcaagagcacacccaggaggatttacagcaattgaggtcagacttggatgcagtttctatgaaatgtgacagctttctccatcagtctccatctagttcaagtgtcccaactctgcgctcagaactgaatctgctggtggagaagatggaccatgtctatggtctctctactgtatatctgaataagttaaagacagttgatgttatagtacgtagcatacaggatgctgaactcttggtcaaaggttatgagattaagctgagtcaagaagaagtagtactggcagatctctcagctctggaggcccattggtcgacattacggcactggcttagtgatgtgaaggacaagaattcagtgttttcagtcctggatgaggaaattgccaaggccaaggtagtggcagagcagatgagtcgtctgacaccagagcgaaatctggatttggagcgctatcaggaaaaaggctcccagctgcaggagcgttggcaccgagtcattgcccagctcgagattcgccaatctgagctagaaagtatccaggaagttctgggagattaccgagcctgccatggaactctcatcaagtggattgaggaaaccactgcccagcaggaaatgatgaagccaggccaggcagaggatagcagagtgctttcggagcagctcagccagcagacggccctatttgcagaaattgagagaaatcagacaaaactggatcaatgtcaaaaattttcccagcagtactctactattgtaaaggactatgaattgcaactgatgacatacaaggcctttgtggaatcgcagcagaaatcccctggcaagcgccgtcgcatgctttcctcttcagatgccatcactcaagagttcatggacttaaggactcgctacacggcattggtgactttaacaactcagcacgtgaaatacatcagtgatgcactccggcgtctggaggaggaggagaaagtggtagaagaggagaaacaagaacatgtggagaaggttaaagaacttttgggctgggtgtctaccctagcgaggaatacacaaggaaaagctacctcatccgagaccaaagaatcaacagacattgaaaaagctattttggaacagcaggttctgtcagaagagctgacaacaaagaaagaacaagtctctgaagctattaaaacatcacagatcttcttggccaagcatggtcataagctctcagaaaaagagaagaaacaaatatctgagcaattgaatgccctaaacaaggcttaccatgacctttgtgatggttctgcaaatcagcttcagcagcttcagagccagttggctcaccagacagaacaaaagaccctgcagaaacaacaaaatacctgtcaccagcaactggaggatctttgcagttgggtaggacaggcagaaagagcactggcaggccaccaaggcagaaccacccagcaggatctctctgctttgcagaagaaccaaagtgacttgaaggatttacaggatgacattcagaatcgtgccacctcatttgccactgttgtcaaggacattgaggggttcatggaagagaatcagaccaagctgagcccacgtgagttgacagctcttcgggaaaagcttcatcaggctaaggagcaatatgaggcgctccaggaagagacacgtgtggcccagaaggaactggaggaagcagtgacctccgccttacagcaggagactgaaaagagtaaagcagcaaaggaactggcagagaacaagaagaagatcgatgctctcctggattgggtaacttcagtaggatcatctggtggacagctgctgaccaaccttccaggaatggagcagctctcgggagctagcttggagaaaggagccttggacaccactgatggttacatgggggtgaatcaagccccagagaaactggacaagcaatgtgagatgatgaaggcccgtcaccaagaattgctgtcccagcagcaaaatttcattctggccacccagtcagctcaggccttcttggatcagcatggccacaatctcacacctgaggagcaacagatgctgcaacagaagctgggagagctaaaggaacaatactctacttccctggcccaatcagaggcagaactgaagcaggtgcagacacttcaggatgagttgcagaaatttctgcaggatcataaagagtttgaaagctggttggaacgatccgagaaagagctggagaacatgcataagggaggcagcagccccgagacccttccctccctgctaaagcggcaaggaagcttctcagaggatgtcatttcccacaaaggagacttgagatttgtgactatctcaggacagaaagtcttggacatggaaaacagttttaaggaaggcaaagaaccatcagaaattggaaacttagtaaaggacaagttgaaggatgcaacagaaagatacactgctctccactcaaagtgtacacgattaggatctcacctgaatatgctgttaggccagtatcatcaattccaaaacagtgctgacagcctgcaggcctggatgcaggcttgtgaggccaacgtggagaagctcctctcagatactgttgcctctgaccctggagttctccaggagcagcttgcaacaacaaagcagttgcaggaggaattggctgagcaccaagtacctgtggaaaaactccaaaaagtagctcgtgacataatggaaattgaaggggagccagccccagaccacaggcatgttcaagaaactacagattccatactcagccacttccaaagcctctcctatagcctggctgagcgatcttctctgctgcagaaagcaattgcccaatctcagagtgtccaggaaagcctggagagcctgttgcagtctattggggaagttgaacaaaacctggaagggaagcaggtgtcatcactctcatcaggagtcatccaggaagccttagccacaaatatgaaattgaagcaggacattgctcggcaaaagagcagcttggaggccacccgtgagatggtgacccgattcatggagacagcagacagtactacagcagcagtgctgcagggcaaactggcagaggtgagccagcggttcgaacagctctgtctacagcagcaagaaaaggagagctccctaaagaagcttctaccccaggcagagatgtttgaacacctctctggtaagctgcagcagttcatggaaaacaaaagtcggatgctggcctctggaaatcagccagatcaagatattacacatttcttccaacagatccaggagctcaatttggaaatggaagaccaacaggagaacctagatactcttgagcacctggtcactgaactgagctcttgtggctttgcgctggacttgtgccagcatcaggacagggtacagaatctaagaaaagacttcacagagctacagaagacagttaaagagagagagaaagatgcatcatcttgccaggaacagttggatgaattccggaagctggtcaggaccttccagaaatggttgaaagaaactgaagggagtattccacctacggaaacttctatgagtgctaaagagttagaaaagcagattgaacacctgaagagtctactagatgactgggcaagtaagggaactctggtggaagaaatcaattgcaaaggtacttctttagaaaatctcatcatggaaatcacagcacctgattcccaaggcaagacagatctgacggagatccagtgtgacatgtcagatgtaaacttgaagtatgagaaactagggggagtacttcatgaacgccaggaaagccttcaggctatcctcaacagaatggaggaggttcacaaggaggcaaactctgtgctgcagtggctggaatcaaaagaggaagtcctgaaatccatggatgccatgtcatctccaaccaagacagaaacagtgaaagcccaagctgaatctaacaaggccttcctggctgagttggaacagaattctccaaaaattcaaaaagtaaaggaagccctggctggattactggtgacatatcccaactcacaggaagcagaaaattggaagaaaattcaggaagaactcaattcccgatgggaaagggccactgaggttactgtggctcggcaaaggcagctagaggaatctgcaagtcatctggcctgcttccaggctgcagaatcccagctccggccgtggctgatggagaaagaactgatgatgggagtgctggggcccctgtctattgaccccaacatgttgaatgcacaaaagcaacaggtccagtttatgctaaaggaatttgaagcacgcaggcaacagcatgagcaactgaatgaggcagctcagggcatcctaacaggccctggagatgtctctctgtccaccagccaagtacagaaagaactccagagcatcaatcagaaatgggttgagctgactgacaaactcaactcccgttccagccaaattgaccaagctattgttaagagcacccagtaccaggaactgctccaggacttatcagagaaggtgagggcagttggacaacggctgagtgtccagtcagctatcagcacccaaccagaggctgtaaagcagcaattggaagagaccagtgaaattcgatctgacttggagcagttagaccacgaggttaaggaggctcagacactgtgcgatgaactctcagtgctcattggtgagcagtacctcaaggatgaactgaagaagcgtttggagacagttgccctgcctctccaaggtttagaagaccttgcagccgatcgcattaacagactccaggcagctcttgccagcacccagcagttccagcaaatgtttgatgagttgaggacctggttggatgataaacaaagccagcaagcaaaaaactgcccaatttctgcaaaattggagcggctacagtctcagctacaggagaatgaagagtttcagaaaagtcttaatcaacacagtggctcctatgaggtgattgtggctgaaggggaatctctacttctttctgtacctcctggagaagagaaaaggactctacaaaaccagttggttgagctcaaaaaccattgggaagagcttagtaaaaaaactgcagacagacaatccaggctcaaggattgtatgcagaaagctcagaaatatcagtggcatgtggaagaccttgtgccatggatagaagattgtaaagctaagatgtctgagttgcgagtcactctggatccagtgcagctagagtccagtctcctaagatcaaaggctatgctgaatgaggtggagaagcgccgctccctgctggaaatattgaatagtgctgctgacattctgatcaattcttcagaagcagatgaggatggaatccgggatgagaaggctgggatcaaccagaacatggatgctgttacagaagagctgcaggccaaaacagggtcactcgaagaaatgactcagaggctcagggagttccaggaaagctttaagaatattgaaaagaaggttgaaggagccaaacaccaacttgagatctttgatgctctgggttctcaagcctgtagcaacaagaacctggagaagctaagagctcaacaggaagtgctgcaggccctagagcctcaggtagactatctgaggaactttactcagggtctggtagaagatgccccagatggatctgatgcttctcaacttctccaccaagctgaggtcgcccagcaagagttcctcgaagttaagcaaagagtgaacagtggttgtgtgatgatggaaaacaagctggaggggattggccagtttcactgccgggtccgagagatgttctctcaattggcagacctggatgatgagctagatggcatgggtgctattggcagagacactgatagcctccagtcccaaatcgaggatgtccggctattccttaacaaaattcacgtcctcaaattagacatagaggcctctgaagcagagtgtcgacatatgctagaagaagaggggactctggatttgttaggtctcaaaagggagctagaagccctgaacaaacagtgtggcaaactgacagagagggggaaagctcgtcaggaacagctggaactgacactaggccgtgtagaggacttctacaggaaattgaaaggactcaatgacgcgaccacagcagcagaggaggcagaggccctccagtgggtagtggggaccgaagtggaaatcatcaaccaacaattagcagattttaaaatgtttcagaaagaacaagtggatcctcttcagatgaaattgcagcaggtgaatggacttggccagggattaattcagagtgcaggaaaagactgtgatgtacagggtttagaacatgacatggaagagatcaatgctcgatggaatacattgaataaaaaggtcgcacaaagaattgcacagctacaggaagctttgttgcattgtgggaagtttcaagatgccttggagccattgctcagctggttggcagataccgaggagctcatagccaatcagaaacctccatctgctgagtataaagtggtgaaagcacagatccaagaacagaagttgctccagcggctcctagatgatcgaaaggccacagtagacatgcttcaagcagaaggaggcagaatagcccagtcagcagagctggctgatagagagaaaatcactggacagctggagagtcttgaaagtagatggactgaactactcagtaaggcagcagccaggcaaaaacagctggaagacatcctggttctggccaaacagttccatgagacagctgagcctatttctgacttcttatctgtcacagagaaaaagcttgctaactcagaacctgttggcactcagactgccaaaatacagcagcagatcattcggcacaaggctctggaagaagacatagaaaaccatgcaacagatgtgcaccaggcagtcaaaattgggcagtccctctcctccctgacatctcctgcagaacagggtgtgctgtcagaaaagatagactcattgcaggcccgatacagtgaaattcaagaccgctgttgtcggaaggcagccctacttgaccaagctctgtctaatgctaggctgtttggggaggatgaggtggaggtgctcaactggctggctgaggttgaggacaagctcagttcagtgttcgtaaaggatttcaaacaggatgtcctgcacaggcagcatgctgaccacctggctttaaatgaagaaattgttaatagaaagaagaatgtagatcaagctattaaaaatggtcaggctcttctaaaacaaaccacaggtgaggaggtgttacttatccaggaaaaactagatggtataaagactcgttacgcagacatcacagttactagctccaaggccctcagaactttagagcaagcccggcagctggccaccaagttccagtctacttatgaggaactgaccgggtggctgagggaggtggaggaggagctggcaaccagtggaggacagtctcccacaggggaacagataccccagtttcagcagagacagaaggaattaaagaaggaggtcatggagcacaggctggtgttggacacagtgaatgaggtgagccgtgctctcttagagctggtgccctggagagccagagaagggctggataaacttgtgtccgatgctaacgagcagtacaaactagtcagtgacactattggacaaagggtggatgaaattgatgctgctattcagagatcacaacagtatgagcaagctgccgatgcagaactagcttgggttgctgaaacaaaacggaaactgatggctctgggtccaattcgcctggaacaggaccagaccacagctcagcttcaggtacagaaggctttctccattgacattattcgacacaaagattcaatggatgaactcttcagtcaccgtagtgaaatctttggcacatgtggggaggagcaaaaaactgtattacaggaaaagacagagtctctaatacagcaatatgaagccattagcctactcaattcagagcgttatgcccgcctagagcgggcccaggtcttagtaaaccagttttgggaaacttatgaagagctcagcccctggattgaggaaactcgggcactaatagcacagttaccctctccagccattgatcatgagcagctcaggcagcaacaagaggaaatgaggcaattaagggaatctattgctgaacacaaacctcatattgacaaactactaaagataggcccacaactaaaggaattaaaccctgaggaaggggaaatggtggaagaaaaataccagaaagcagaaaacatgtatgcccaaataaaggaggaggtgcgccagcgagccctggctctggatgaagccgtgtcccagtccacacagattacagagtttcatgataaaattgagcctatgttggagacactggagaatctttcctctcgcctgcgtatgccaccactgatccctgctgaagtagacaagatcagagagtgcatcagtgacaataagagtgccaccgtggagctagaaaaactgcagccatcctttgaggccttgaagcgccgtggagaggagcttattggacgatctcagggagcagacaaggatctggctgcaaaagaaatccaggataaattggatcaaatggtattcttctgggaggacatcaaagctcgggctgaagaacgagaaatcaaatttcttgatgtccttgaattagcagagaagttctggtatgacatggcagctctcctgaccaccatcaaagacacccaggatattgtccatgacttggaaagcccaggcattgatccttccatcatcaaacaacaggttgaagctgctgagactattaaggaagagacagatggtctgcatgaagagctggagtttattcggatccttggagcagatttgatttttgcctgtggagaaactgagaagcctgaagtgaggaagagcattgatgagatgaataatgcttgggagaacttaaacaaaacatggaaagagaggctagaaaaacttgaggatgctatgcaagctgctgtgcagtatcaggacactcttcaggctatgtttgactggctagataacactgtgattaaactctgcaccatgccccctgttggcactgacctcaatactgttaaagatcagttaaatgaaatgaaggagttcaaagtagaagtttaccaacagcaaattgagatggagaagcttaatcaccagggtgaactgatgttaaagaaagctactgatgagacggacagagacattatacgagaaccactgacagaactcaaacacctctgggagaacctgggtgagaaaattgcccaccgacagcacaaactagaaggggctctgttggcccttggtcagttccagcatgccttagaggaactaatgagttggctgactcataccgaagagttgttagatgctcagagaccaataagtggagacccaaaagtcattgaagttgagctcgcaaagcaccatgtcctaaaaaatgatgttttggctcatcaagccacagtggaaacagtcaacaaagctggcaatgagcttcttgaatccagtgctggagatgatgccagcagcttaaggagccgtttggaagccatgaaccaatgctgggagtcagtgttacagaaaacagaggagagggagcagcagcttcagtcaactctgcagcaggcccagggcttccacagtgaaattgaagatttcctcttggaacttactagaatggagagccagctttctgcatctaagcccacaggaggacttcctgaaactgctagggaacagcttgatacacatatggaactctattcccagctgaaagccaaggaagagacttataatcaactacttgacaagggcagactcatgcttctaagccgtgacgactctgggtctggctccaagacagaacagagtgtagcacttttggagcagaagtggcatgtggtcagcagtaagatggaagaaagaaagtcaaagctggaagaggccctcaacttggcaacagaattccagaattccctacaagaatttatcaactggctcactctagcagagcagagtttaaacatcgcttctccaccaagcctgattctaaatactgtcctttcccagatagaagagcacaaggtttttgctaatgaagtaaatgctcatcgagaccagatcattgagctggatcaaactgggaatcaattaaagttccttagccaaaagcaggatgttgttctgatcaagaatttgttggtgagcgtgcagtctcgatgggagaaggttgtccagcgatctattgaaagagggcgatcactagatgatgccaggaagcgggcaaaacaattccatgaagcttggaaaaaactgattgactggctagaagatgcagagagtcacctggactcagaactagagatatccaatgacccagacaaaattaaacttcagctttctaagcataaggagtttcagaagactcttggtggcaagcagcctgtgtatgataccacaattagaactggcagagcactgaaagaaaagactttgcttcccgaagatactcagaaacttgacaatttcctaggagaagtcagagacaaatgggatactgtttgtggcaagtctgtggagcggcagcacaagttggaggaagccctgctcttttcgggtcagttcatggatgctttgcaggcattggttgactggttatacaaggtggagccacagctggctgaggaccagcccgtgcacggggaccttgacctcgtcatgaacctcatggatgcacacaaggttttccagaaggaactgggaaagcgaacaggaaccgttcaggtcctgaagcggtcaggccgagagctgattgagaatagtcgagatgacaccacttgggtaaaaggacagctccaggaactgagcactcgctgggacactgtctgtaaactctctgtttccaaacaaagccggcttgagcaggccttaaaacaagcggaagtgtttcgagacacagtccacatgctgttggagtggctttctgaagcagagcaaacgcttcgctttcggggagcacttcctgatgacacagaggccctgcagtctctcattgacacccataaggaattcatgaagaaagtagaagaaaagcgagtggacgttaactcagcagtagccatgggagaagtcatcctggctgtctgccaccccgattgcatcacaaccatcaaacactggatcaccatcatccgagctcgcttcgaggaggtcctgacatgggctaagcagcaccagcagcgtcttgaaacggccttgtcagaactggtggctaatgctgagctcctggaagaacttctggcatggatccagtgggctgagaccaccctcattcagcgggatcaggagccaatcccgcagaacattgaccgagttaaagcccttatcgctgagcatcagacatttatggaggagatgactcgcaaacagcctgacgtggaccgggtcaccaagacatacaaaaggaaaaacatagagcctactcacgcgcctttcatagagaaatcccgcagcggaggcaggaaatccctaagtcagccaacccctcctcccatgccaatcctttcacagtctgaagcaaaaaacccacggatcaaccagctttctgcccgctggcagcaggtgtggctgttagcactggagcggcaaaggaaactgaatgatgccttggatcggctggaggagttgaaagaatttgccaactttgactttgatgtctggaggaaaaagtatatgcgttggatgaatcacaaaaagtctcgagtgatggatttcttccggcgcattgataaggaccaggatgggaagataacacgtcaggagtttatcgatggcattttagcatccaagttccccaccaccaagttagagatgactgctgtggctgacattttcgaccgagatggggatggttacattgattattatgaatttgtggctgctcttcatcccaacaaggatgcgtatcgaccaacaaccgatgcagataaaatcgaagatgaggttacaagacaagtggctcagtgcaaatgtgcaaaaaggtttcaggtggagcagatcggagagaataaataccggtttggggattctcagcagttgcggctggtccgtattctgcgcagcaccgtgatggttcgcgttggtggaggatggatggccttggatgaatttttagtgaaaaatgatccctgccgagcacgaggtagaactaacattgaacttagagagaaattcatcctaccagagggagcatcccagggaatgacccccttccgctcacggggtcgaaggtccaaaccatcttcccgggcagcttcccctactcgttccagctccagtgctagtcagagtaaccacagctgtacatccatgccatcttctccagccaccccagccagtggaaccaaggttatcccatcatcaggtagcaagttgaaacgaccaacaccaacttttcattctagtcggacatcccttgctggtgataccagcaatagttcttccccggcctccacaggtgccaaaactaatcgggcagaccctaaaaagtctgccagtcgccctgggagtcgggctgggagtcgagccgggagtcgagccagcagccggcgaggaagtgacgcttctgactttgacctcttagagacgcagtctgcttgttccgacacttcagaaagcagcgctgcagggggccaaggcaactccaggagagggctaaacaaaccttccaaaatcccaaccatgtctaagaagaccaccactgcctcccccaggactccaggtcccaagcgataacactgtctaagcacccccaagccactatccactttgaatcctgctccatacattgggtgtatatttattctgaacgggagaagttatattgttaaaagtgtaaaagaataattgtgttatgaagctgccttattttttttctttttgtaagttactattttcatgtgaatatttatgtagataaaatttgcctcctggtaaccctgtaatggatggggcccagaaatgaaatatttgagaaaaacaagtgaaaaggtcaagatacaaatgtgtattaaaaaaaaaaaagcctattaatagggtttctgcgcggtgcagggttgtaaacctgctttatcttttaggattattcctaaatgcatcttctttataaacttgacttgctatctcagcaagataaattatattaaaaaaataagaatcctgcagtgtttaaggaactctttttttgtaaatcacggacacctcaattagcaagaactgaggggagggctttttccattgtttaatgttttgtgatttttagctaaagagagggaacctcatctaagtaacatttgcacatgatacagcaaaaggagttcattgcaatactgtctttggatattgtttcagtactgggtgtttaaaggacaaatagctgctagaattcaggggtaaatgtaagtgttcagaaaacgtcagaacatttggggttttaaactgatttgttgctccctatccagcctagacaccagtaactcttgtgttcaccaggacccagacccttggcaagggataggctcgttggtgacattgtgaatttcagatttgttttatccactttttttgctatttatttaaatggtcgatcaacttcccacaaactgaggaatgaattccacgagcctgttctgaaaatgtggacgtaagacaaacacgtgctcgtcctttaatggagttcaccagcacacttgttaaccagtcctgtttgctttcgtctttttttgtgcgtaataaagtcaactgaccaagtgaccatgaaaaggggctgtctggggctcctgttttttagctgctgttcttcagctccgaccatgttgctgtgtgattatctcaattggttttaattgaggcagaaactgaagctctaccaatgaactgtttagaaacaagacacacttttgtattaaaattgcttgcagtaacaaa

SEQ ID NO: 367607 - DNA, 18489 bp, Homo sapiens
  misc_feature (995)..(995): n is a, c, g, or t
  misc_feature (1066)..(1066): n is a, c, g, or t
  misc_feature (1076)..(1076): n is a, c, g, or t
tcaaaacaccatctattaaagctgacaattgtcacaagcagaattgaatactcaaagggaagttaacttcacacagaaaaacacttcatatttcattcaacttgcaacgtatttactgagcgtctaccgtgtgtaaggcagcctgctaggaaatggggtacgaccctcctcctcacagagcttacattctgacaggggaacccgaagtgaacaagcatgatctgcaacaggtatgagatgtcaagaaagcctattacagaggcacccaggcccagtctacggggtcactaaaggctatgggataaactgatctgaaggatgagcacaaatcaatcatcgagaggctgagagcagctcaagtcgggggaataagatgtgcgagaagcaggagagagcaggatgaaataaaatcaggcccgtgtgatgcgtggtgaacagtgagtacccagagaagcgaagctgggggctgaggggctggtcaggaacacgggcttaattcatcaacccaacagcaaacatcagtgcaacaatgtaagcacatttaccttctgggtcataatgtaatttcttccaaagccagtggtggcactcagatatttgatcagaggattgacagattcaggcttttggtggaaaagccatacctggaaaggaaggatgtgtcaatgatttgtttcttctgcccaaggtgagtgaggctggtggagagtcactatctgcactttatagagctccccagacaaattataaacatcctctcaaatatcatcagtgaatggtttggcaaatatattgagaaccaattaaaatatagtttaaaagcacttgcttctacaaccaatttgtattcccacaataaatgtatttatttctgtaacacttaccaaaacaagagcatcaaagccaattccttcacactgccctccctcccacctgctcttcatgaggagtcctttattcctgcatgtttcctgttctttgggccggaattccgnggcgcgatgtcggctcactacaacctctgcctcctggattcaagcaattctgtacctcagcctcccgagtngctgtgattncagatgaacgggaccgggttcagaagaaaacgttcaccaagtgggtcaacaagcacttaatgaaggtccgcaagcacatcaatgatctttatgaagatctgcgggatggccataacctgatctctctgttggaggtcctctcaggcatcaaactgccccgggagaagggcaggatgcgttttcataggctgcagaatgtgcagattgccctggacttcctaaagcagcgacaggtgaaactagtgaatattcgcaatgatgacatcacagatggcaaccccaagttgaccctgggtctgatctggaccattattttgcatttccagatctctgacatctacattagtggagaatcaggggatatgtcagccaaggagaaactactcctgtggacccagaaggtgacagctggttacacaggaatcaaatgcaccaacttttcctcctgctggagtgatgggaagatgttcaatgcactcattcaccgataccgacccgatctagtagacatggagagggtgcaaatccaaagtaaccgagagaatctggaacaagcttttgaagtggcagaaagactgggggtcactcgcctgctggatgcagaagatgtggatgtgccatctccagatgaaaagtctgtaatcacttatgtgtcttcgatttatgatgccttccctaaagttcctgagggtggagaagggatcagtgctacggaagtggactccaggtggcaagaataccaaagccgagtggactccctcattccctggatcaaacagcatacaatactgatgtcagataaaacttttccccaaaaccctgttgaactaaaggcactttataaccaatatatacacttcaaagaaacagaaattctggccaaggagagagaaaaaggaagaattgaggaattatataaattactagaggtgtggattgaatttggccgaattaaactgcctcaaggttatcaccctaatgatgtggaagaagagtggggaaagctcatcatagagatgctggaacgagagaaatcacttcggccggctgtggagaggctggaattgctgctacagattgcaaacaaaatccagaatggtgctttgaactgtgaagaaaaactgacactagctaagaatacactgcaggctgatgctgctcacctggaatcaggacaaccggtacaatgtgagtcagatgtcattatgtacattcaagagtgtgaaggtctcatcaggcagctgcaggtggatctccagatcctgcgggatgagaattactaccagctagaagagctggcttttagggtcatgcgtcttcaggatgagctggtcaccttgcgtctagagtgtacaaacctgtaccggaagggtcatttcacttcacttgaattggttccaccctctactttaaccaccactcatctgaaagcagaacccttaaccaaggcaacccattcttcttctacctcctggttccgaaagcctatgactcgggctgaacttgggccatcagctcctctgaagatgaaggcaatctccgatttgtgtatgaactactgtctttgggtagaagagatgcagatgaaactggagcgagcagagtggggcaatgacctgcctagtgtggagttgcagctagaaacacagcagcacatccatacgagtgtagaagagctgggctcaagtgtcaaggaggccaggttgtatgagggaaagatgtcccagaatttccataccagctatgctgaaactcttggaaagctggagacacagtattgtaaattgaaggaaacttctagcttccggatgaggcaccttcagagcctgcataaatttgtttccagagctacagctgagttgatctggttgaatgagaaggaggaggaggaactagcatatgactggagtgacaacaattccaatatctcagccaagagaaattacttctctgagttgacaatggaactggaggagaaacaggatgtgtttcgttctctacaagatacagcagaactactttcacttgagaaccacccagccaagcagacagtggaggcttacagtgctgctgtccagtcccagttgcagtggatgaagcagctgtgcctgtgtgttgagcagcatgtgaaagagaatactgcttattttcagttcttcagtgatgcacgagagctggagtcattcttgaggaacctccaagattccattaaacgaaaatattcctgtgaccacaacaccagcttatcccgccttgaagacctgctccaggactccatggatgaaaaggagcagcttatacagtccaagagttccgttgccagtctcgttgggagatcaaaaaccatcgttcagctaaaaccacgcagtccagaccatgtgttaaagaacaccatttctgtcaaggctgtctgtgactacaggcagatcgagattactatttgcaaaaatgatgaatgtgtgctagaagataattctcagcggaccaaatggaaagtgatcagccccacagggaacgaggcaatggtgccgtcagtctgcttcctcatccccccacccaataaggatgccattgagatggccagcagggtcgaacaatcttatcagaaggttatggccctttggcatcagctgcatgttaacaccaaaagccttatctcttggaactatctgcgtaaagaccttgaccttgtacagacctggaacctagaaaagcttcgatcctcagcaccaggggagtgccatcagattatgaagaaccttcaggcccactatgaagactttctgcaggatagtcgtgactctgtgctgttctcagtggctgatcgcttgcgcttggaagaggaggtggaagcttgtaaagcccgcttccagcacctgatgaagtccatggagaatgaggacaaagaggagactgtggccaagatgtacatttcagagttgaagaacatccggctacgcctggaggagtatgaacagagggtggtcaaacgaattcagtctctagccagctctaggactgacagagatgcctggcaggacaatgcattaaggattgcagagcaagagcacacccaggaggatttacagcaattgaggtcagacttggatgcagtttctatgaaatgtgacagctttctccatcagtctccatctagttcaagtgtcccaactctgcgctcagaactgaatctgctggtggagaagatggaccatgtctatggtctctctactgtatatctgaataagttaaagacagttgatgttatagtacgtagcatacaggatgctgaactcttggtcaaaggttatgagattaagctgagtcaagaagaagtagtactggcagatctctcagctctggaggcccattggtcgacattacggcactggcttagtgatgtgaaggacaagaattcagtgttttcagtcctggatgaggaaattgccaaggccaaggtagtggcagagcagatgagtcgtctgacaccagagcgaaatctggatttggagcgctatcaggaaaaaggctcccagctgcaggagcgttggcaccgagtcattgcccagctcgagattcgccaatctgagctagaaagtatccaggaagttctgggagattaccgagcctgccatggaactctcatcaagtggattgaggaaaccactgcccagcaggaaatgatgaagccaggccaggcagaggatagcagagtgctttcggagcagctcagccagcagacggccctatttgcagaaattgagagaaatcagacaaaactggatcaatgtcaaaaattttcccagcagtactctactattgtaaaggactatgaattgcaactgatgacatacaaggcctttgtggaatcgcagcagaaatcccctggcaagcgccgtcgcatgctttcctcttcagatgccatcactcaagagttcatggacttaaggactcgctacacggcattggtgactttaacaactcagcacgtgaaatacatcagtgatgcactccggcgtctggaggaggaggagaaagtggtagaagaggagaaacaagaacatgtggagaaggttaaagaacttttgggctgggtgtctaccctagcgaggaatacacaaggaaaagctacctcatccgagaccaaagaatcaacagacattgaaaaagctattttggaacagcaggttctgtcagaagagctgacaacaaagaaagaacaagtctctgaagctattaaaacatcacagatcttcttggccaagcatggtcataagctctcagaaaaagagaagaaacaaatatctgagcaattgaatgccctaaacaaggcttaccatgacctttgtgatggttctgcaaatcagcttcagcagcttcagagccagttggctcaccagacagaacaaaagaccctgcagaaacaacaaaatacctgtcaccagcaactggaggatctttgcagttgggtaggacaggcagaaagagcactggcaggccaccaaggcagaaccacccagcaggatctctctgctttgcagaagaaccaaagtgacttgaaggatttacaggatgacattcagaatcgtgccacctcatttgccactgttgtcaaggacattgaggggttcatggaagagaatcagaccaagctgagcccacgtgagttgacagctcttcgggaaaagcttcatcaggctaaggagcaatatgaggcgctccaggaagagacacgtgtggcccagaaggaactggaggaagcagtgacctccgccttacagcaggagactgaaaagagtaaagcagcaaaggaactggcagagaacaagaagaagatcgatgctctcctggattgggtaacttcagtaggatcatctggtggacagctgctgaccaaccttccaggaatggagcagctctcgggagctagcttggagaaaggagccttggacaccactgatggttacatgggggtgaatcaagccccagagaaactggacaagcaatgtgagatgatgaaggcccgtcaccaagaattgctgtcccagcagcaaaatttcattctggccacccagtcagctcaggccttcttggatcagcatggccacaatctcacacctgaggagcaacagatgctgcaacagaagctgggagagctaaaggaacaatactctacttccctggcccaatcagaggcagaactgaagcaggtgcagacacttcaggatgagttgcagaaatttctgcaggatcataaagagtttgaaagctggttggaacgatccgagaaagagctggagaacatgcataagggaggcagcagccccgagacccttccctccctgctaaagcggcaaggaagcttctcagaggatgtcatttcccacaaaggagacttgagatttgtgactatctcaggacagaaagtcttggacatggaaaacagttttaaggaaggcaaagaaccatcagaaattggaaacttagtaaaggacaagttgaaggatgcaacagaaagatacactgctctccactcaaagtgtacacgattaggatctcacctgaatatgctgttaggccagtatcatcaattccaaaacagtgctgacagcctgcaggcctggatgcaggcttgtgaggccaacgtggagaagctcctctcagatactgttgcctctgaccctggagttctccaggagcagcttgcaacaacaaagcagttgcaggaggaattggctgagcaccaagtacctgtggaaaaactccaaaaagtagctcgtgacataatggaaattgaaggggagccagccccagaccacaggcatgttcaagaaactacagattccatactcagccacttccaaagcctctcctatagcctggctgagcgatcttctctgctgcagaaagcaattgcccaatctcagagtgtccaggaaagcctggagagcctgttgcagtctattggggaagttgaacaaaacctggaagggaagcaggtgtcatcactctcatcaggagtcatccaggaagccttagccacaaatatgaaattgaagcaggacattgctcggcaaaagagcagcttggaggccacccgtgagatggtgacccgattcatggagacagcagacagtactacagcagcagtgctgcagggcaaactggcagaggtgagccagcggttcgaacagctctgtctacagcagcaagaaaaggagagctccctaaagaagcttctaccccaggcagagatgtttgaacacctctctggtaagctgcagcagttcatggaaaacaaaagtcggatgctggcctctggaaatcagccagatcaagatattacacatttcttccaacagatccaggagctcaatttggaaatggaagaccaacaggagaacctagatactcttgagcacctggtcactgaactgagctcttgtggctttgcgctggacttgtgccagcatcaggacagggtacagaatctaagaaaagacttcacagagctacagaagacagttaaagagagagagaaagatgcatcatcttgccaggaacagttggatgaattccggaagctggtcaggaccttccagaaatggttgaaagaaactgaagggagtattccacctacggaaacttctatgagtgctaaagagttagaaaagcagattgaacacctgaagagtctactagatgactgggcaagtaagggaactctggtggaagaaatcaattgcaaaggtacttctttagaaaatctcatcatggaaatcacagcacctgattcccaaggcaagacagatctgacggagatccagtgtgacatgtcagatgtaaacttgaagtatgagaaactagggggagtacttcatgaacgccaggaaagccttcaggctatcctcaacagaatggaggaggttcacaaggaggcaaactctgtgctgcagtggctggaatcaaaagaggaagtcctgaaatccatggatgccatgtcatctccaaccaagacagaaacagtgaaagcccaagctgaatctaacaaggccttcctggctgagttggaacagaattctccaaaaattcaaaaagtaaaggaagccctggctggattactggtgacatatcccaactcacaggaagcagaaaattggaagaaaattcaggaagaactcaattcccgatgggaaagggccactgaggttactgtggctcggcaaaggcagctagaggaatctgcaagtcatctggcctgcttccaggctgcagaatcccagctccggccgtggctgatggagaaagaactgatgatgggagtgctggggcccctgtctattgaccccaacatgttgaatgcacaaaagcaacaggtccagtttatgctaaaggaatttgaagcacgcaggcaacagcatgagcaactgaatgaggcagctcagggcatcctaacaggccctggagatgtctctctgtccaccagccaagtacagaaagaactccagagcatcaatcagaaatgggttgagctgactgacaaactcaactcccgttccagccaaattgaccaagctattgttaagagcacccagtaccaggaactgctccaggacttatcagagaaggtgagggcagttggacaacggctgagtgtccagtcagctatcagcacccaaccagaggctgtaaagcagcaattggaagagaccagtgaaattcgatctgacttggagcagttagaccacgaggttaaggaggctcagacactgtgcgatgaactctcagtgctcattggtgagcagtacctcaaggatgaactgaagaagcgtttggagacagttgccctgcctctccaaggtttagaagaccttgcagccgatcgcattaacagactccaggcagctcttgccagcacccagcagttccagcaaatgtttgatgagttgaggacctggttggatgataaacaaagccagcaagcaaaaaactgcccaatttctgcaaaattggagcggctacagtctcagctacaggagaatgaagagtttcagaaaagtcttaatcaacacagtggctcctatgaggtgattgtggctgaaggggaatctctacttctttctgtacctcctggagaagagaaaaggactctacaaaaccagttggttgagctcaaaaaccattgggaagagcttagtaaaaaaactgcagacagacaatccaggctcaaggattgtatgcagaaagctcagaaatatcagtggcatgtggaagaccttgtgccatggatagaagattgtaaagctaagatgtctgagttgcgagtcactctggatccagtgcagctagagtccagtctcctaagatcaaaggctatgctgaatgaggtggagaagcgccgctccctgctggaaatattgaatagtgctgctgacattctgatcaattcttcagaagcagatgaggatggaatccgggatgagaaggctgggatcaaccagaacatggatgctgttacagaagagctgcaggccaaaacagggtcactcgaagaaatgactcagaggctcagggagttccaggaaagctttaagaatattgaaaagaaggttgaaggagccaaacaccaacttgagatctttgatgctctgggttctcaagcctgtagcaacaagaacctggagaagctaagagctcaacaggaagtgctgcaggccctagagcctcaggtagactatctgaggaactttactcagggtctggtagaagatgccccagatggatctgatgcttctcaacttctccaccaagctgaggtcgcccagcaagagttcctcgaagttaagcaaagagtgaacagtggttgtgtgatgatggaaaacaagctggaggggattggccagtttcactgccgggtccgagagatgttctctcaattggcagacctggatgatgagctagatggcatgggtgctattggcagagacactgatagcctccagtcccaaatcgaggatgtccggctattccttaacaaaattcacgtcctcaaattagacatagaggcctctgaagcagagtgtcgacatatgctagaagaagaggggactctggatttgttaggtctcaaaagggagctagaagccctgaacaaacagtgtggcaaactgacagagagggggaaagctcgtcaggaacagctggaactgacactaggccgtgtagaggacttctacaggaaattgaaaggactcaatgacgcgaccacagcagcagaggaggcagaggccctccagtgggtagtggggaccgaagtggaaatcatcaaccaacaattagcagattttaaaatgtttcagaaagaacaagtggatcctcttcagatgaaattgcagcaggtgaatggacttggccagggattaattcagagtgcaggaaaagactgtgatgtacagggtttagaacatgacatggaagagatcaatgctcgatggaatacattgaataaaaaggtcgcacaaagaattgcacagctacaggaagctttgttgcattgtgggaagtttcaagatgccttggagccattgctcagctggttggcagataccgaggagctcatagccaatcagaaacctccatctgctgagtataaagtggtgaaagcacagatccaagaacagaagttgctccagcggctcctagatgatcgaaaggccacagtagacatgcttcaagcagaaggaggcagaatagcccagtcagcagagctggctgatagagagaaaatcactggacagctggagagtcttgaaagtagatggactgaactactcagtaaggcagcagccaggcaaaaacagctggaagacatcctggttctggccaaacagttccatgagacagctgagcctatttctgacttcttatctgtcacagagaaaaagcttgctaactcagaacctgttggcactcagactgccaaaatacagcagcagatcattcggcacaaggctctggaagaagacatagaaaaccatgcaacagatgtgcaccaggcagtcaaaattgggcagtccctctcctccctgacatctcctgcagaacagggtgtgctgtcagaaaagatagactcattgcaggcccgatacagtgaaattcaagaccgctgttgtcggaaggcagccctacttgaccaagctctgtctaatgctaggctgtttggggaggatgaggtggaggtgctcaactggctggctgaggttgaggacaagctcagttcagtgttcgtaaaggatttcaaacaggatgtcctgcacaggcagcatgctgaccacctggctttaaatgaagaaattgttaatagaaagaagaatgtagatcaagctattaaaaatggtcaggctcttctaaaacaaaccacaggtgaggaggtgttacttatccaggaaaaactagatggtataaagactcgttacgcagacatcacagttactagctccaaggccctcagaactttagagcaagcccggcagctggccaccaagttccagtctacttatgaggaactgaccgggtggctgagggaggtggaggaggagctggcaaccagtggaggacagtctcccacaggggaacagataccccagtttcagcagagacagaaggaattaaagaaggaggtcatggagcacaggctggtgttggacacagtgaatgaggtgagccgtgctctcttagagctggtgccctggagagccagagaagggctggataaacttgtgtccgatgctaacgagcagtacaaactagtcagtgacactattggacaaagggtggatgaaattgatgctgctattcagagatcacaacagtatgagcaagctgccgatgcagaactagcttgggttgctgaaacaaaacggaaactgatggctctgggtccaattcgcctggaacaggaccagaccacagctcagcttcaggtacagaaggctttctccattgacattattcgacacaaagattcaatggatgaactcttcagtcaccgtagtgaaatctttggcacatgtggggaggagcaaaaaactgtattacaggaaaagacagagtctctaatacagcaatatgaagccattagcctactcaattcagagcgttatgcccgcctagagcgggcccaggtcttagtaaaccagttttgggaaacttatgaagagctcagcccctggattgaggaaactcgggcactaatagcacagttaccctctccagccattgatcatgagcagctcaggcagcaacaagaggaaatgaggcaattaagggaatctattgctgaacacaaacctcatattgacaaactactaaagataggcccacaactaaaggaattaaaccctgaggaaggggaaatggtggaagaaaaataccagaaagcagaaaacatgtatgcccaaataaaggaggaggtgcgccagcgagccctggctctggatgaagccgtgtcccagtccacacagattacagagtttcatgataaaattgagcctatgttggagacactggagaatctttcctctcgcctgcgtatgccaccactgatccctgctgaagtagacaagatcagagagtgcatcagtgacaataagagtgccaccgtggagctagaaaaactgcagccatcctttgaggccttgaagcgccgtggagaggagcttattggacgatctcagggagcagacaaggatctggctgcaaaagaaatccaggataaattggatcaaatggtattcttctgggaggacatcaaagctcgggctgaagaacgagaaatcaaatttcttgatgtccttgaattagcagagaagttctggtatgacatggcagctctcctgaccaccatcaaagacacccaggatattgtccatgacttggaaagcccaggcattgatccttccatcatcaaacaacaggttgaagctgctgagactattaaggaagagacagatggtctgcatgaagagctggagtttattcggatccttggagcagatttgatttttgcctgtggagaaactgagaagcctgaagtgaggaagagcattgatgagatgaataatgcttgggagaacttaaacaaaacatggaaagagaggctagaaaaacttgaggatgctatgcaagctgctgtgcagtatcaggacactcttcaggctatgtttgactggctagataacactgtgattaaactctgcaccatgccccctgttggcactgacctcaatactgttaaagatcagttaaatgaaatgaaggagttcaaagtagaagtttaccaacagcaaattgagatggagaagcttaatcaccagggtgaactgatgttaaagaaagctactgatgagacggacagagacattatacgagaaccactgacagaactcaaacacctctgggagaacctgggtgagaaaattgcccaccgacagcacaaactagaaggggctctgttggcccttggtcagttccagcatgccttagaggaactaatgagttggctgactcataccgaagagttgttagatgctcagagaccaataagtggagacccaaaagtcattgaagttgagctcgcaaagcaccatgtcctaaaaaatgatgttttggctcatcaagccacagtggaaacagtcaacaaagctggcaatgagcttcttgaatccagtgctggagatgatgccagcagcttaaggagccgtttggaagccatgaaccaatgctgggagtcagtgttacagaaaacagaggagagggagcagcagcttcagtcaactctgcagcaggcccagggcttccacagtgaaattgaagatttcctcttggaacttactagaatggagagccagctttctgcatctaagcccacaggaggacttcctgaaactgctagggaacagcttgatacacatatggaactctattcccagctgaaagccaaggaagagacttataatcaactacttgacaagggcagactcatgcttctaagccgtgacgactctgggtctggctccaagacagaacagagtgtagcacttttggagcagaagtggcatgtggtcagcagtaagatggaagaaagaaagtcaaagctggaagaggccctcaacttggcaacagaattccagaattccctacaagaatttatcaactggctcactctagcagagcagagtttaaacatcgcttctccaccaagcctgattctaaatactgtcctttcccagatagaagagcacaaggtttttgctaatgaagtaaatgctcatcgagaccagatcattgagctggatcaaactgggaatcaattaaagttccttagccaaaagcaggatgttgttctgatcaagaatttgttggtgagcgtgcagtctcgatgggagaaggttgtccagcgatctattgaaagagggcgatcactagatgatgccaggaagcgggcaaaacaattccatgaagcttggaaaaaactgattgactggctagaagatgcagagagtcacctggactcagaactagagatatccaatgacccagacaaaattaaacttcagctttctaagcataaggagtttcagaagactcttggtggcaagcagcctgtgtatgataccacaattagaactggcagagcactgaaagaaaagactttgcttcccgaagatactcagaaacttgacaatttcctaggagaagtcagagacaaatgggatactgtttgtggcaagtctgtggagcggcagcacaagttggaggaagccctgctcttttcgggtcagttcatggatgctttgcaggcattggttgactggttatacaaggtggagccacagctggctgaggaccagcccgtgcacggggaccttgacctcgtcatgaacctcatggatgcacacaaggttttccagaaggaactgggaaagcgaacaggaaccgttcaggtcctgaagcggtcaggccgagagctgattgagaatagtcgagatgacaccacttgggtaaaaggacagctccaggaactgagcactcgctgggacactgtctgtaaactctctgtttccaaacaaagccggcttgagcaggccttaaaacaagcggaagtgtttcgagacacagtccacatgctgttggagtggctttctgaagcagagcaaacgcttcgctttcggggagcacttcctgatgacacagaggccctgcagtctctcattgacacccataaggaattcatgaagaaagtagaagaaaagcgagtggacgttaactcagcagtagccatgggagaagtcatcctggctgtctgccaccccgattgcatcacaaccatcaaacactggatcaccatcatccgagctcgcttcgaggaggtcctgacatgggctaagcagcaccagcagcgtcttgaaacggccttgtcagaactggtggctaatgctgagctcctggaagaacttctggcatggatccagtgggctgagaccaccctcattcagcgggatcaggagccaatcccgcagaacattgaccgagttaaagcccttatcgctgagcatcagacatttatggaggagatgactcgcaaacagcctgacgtggaccgggtcaccaagacatacaaaaggaaaaacatagagcctactcacgcgcctttcatagagaaatcccgcagcggaggcaggaaatccctaagtcagccaacccctcctcccatgccaatcctttcacagtctgaagcaaaaaacccacggatcaaccagctttctgcccgctggcagcaggtgtggctgttagcactggagcggcaaaggaaactgaatgatgccttggatcggctggaggagttgaaagaatttgccaactttgactttgatgtctggaggaaaaagtatatgcgttggatgaatcacaaaaagtctcgagtgatggatttcttccggcgcattgataaggaccaggatgggaagataacacgtcaggagtttatcgatggcattttagcatccaagttccccaccaccaagttagagatgactgctgtggctgacattttcgaccgagatggggatggttacattgattattatgaatttgtggctgctcttcatcccaacaaggatgcgtatcgaccaacaaccgatgcagataaaatcgaagatgaggttacaagacaagtggctcagtgcaaatgtgcaaaaaggtttcaggtggagcagatcggagagaataaataccggtttggggattctcagcagttgcggctggtccgtattctgcgcagcaccgtgatggttcgcgttggtggaggatggatggccttggatgaatttttagtgaaaaatgatccctgccgagcacgaggtagaactaacattgaacttagagagaaattcatcctaccagagggagcatcccagggaatgacccccttccgctcacggggtcgaaggtccaaaccatcttcccgggcagcttcccctactcgttccagctccagtgctagtcagagtaaccacagctgtacatccatgccatcttctccagccaccccagccagtggaaccaaggttatcccatcatcaggtagcaagttgaaacgaccaacaccaacttttcattctagtcggacatcccttgctggtgataccagcaatagttcttccccggcctccacaggtgccaaaactaatcgggcagaccctaaaaagtctgccagtcgccctgggagtcgggctgggagtcgagccgggagtcgagccagcagccggcgaggaagtgacgcttctgactttgacctcttagagacgcagtctgcttgttccgacacttcagaaagcagcgctgcagggggccaaggcaactccaggagagggctaaacaaaccttccaaaatcccaaccatgtctaagaagaccaccactgcctcccccaggactccaggtcccaagcgataacactgtctaagcacccccaagccactatccactttgaatcctgctccatacattgggtgtatatttattctgaacgggagaagttatattgttaaaagtgtaaaagaataattgtgttatgaagctgccttattttttttctttttgtaagttactattttcatgtgaatatttatgtagataaaatttgcctcctggtaaccctgtaatggatggggcccagaaatgaaatatttgagaaaaacaagtgaaaaggtcaagatacaaatgtgtattaaaaaaaaaaaagcctattaatagggtttctgcgcggtgcagggttgtaaacctgctttatcttttaggattattcctaaatgcatcttctttataaacttgacttgctatctcagcaagataaattatattaaaaaaataagaatcctgcagtgtttaaggaactctttttttgtaaatcacggacacctcaattagcaagaactgaggggagggctttttccattgtttaatgttttgtgatttttagctaaagagagggaacctcatctaagtaacatttgcacatgatacagcaaaaggagttcattgcaatactgtctttggatattgtttcagtactgggtgtttaaaggacaaatagctgctagaattcaggggtaaatgtaagtgttcagaaaacgtcagaacatttggggttttaaactgatttgttgctccctatccagcctagacaccagtaactcttgtgttcaccaggacccagacccttggcaagggataggctcgttggtgacattgtgaatttcagatttgttttatccactttttttgctatttatttaaatggtcgatcaacttcccacaaactgaggaatgaattccacgagcctgttctgaaaatgtggacgtaagacaaacacgtgctcgtcctttaatggagttcaccagcacacttgttaaccagtcctgtttgctttcgtctttttttgtgcgtaataaagtcaactgaccaagtgaccatgaaaaggggctgtctggggctcctgttttttagctgctgttcttcagctccgaccatgttgctgtgtgattatctcaattggttttaattgaggcagaaactgaagctctaccaatgaactgtttagaaacaagacacacttttgtattaaaattgcttgcagtaacaaatattttgtatttcctgatttccaccttgccaaaggtggcactcaggattctcccagtggatcttttggctttcacccttggtcctctcacagtcggctgcagccagaaagatcctgttacctgtaatccacgtattgtcccttactcttttttgctagaatctccgtggttcccgggactgagctgtcctctcctattcttccatccat

SEQ ID NO: 367608 - DNA, 17826 bp, Homo sapiens
  misc_feature (995)..(995): n is a, c, g, or t
  misc_feature (1066)..(1066): n is a, c, g, or t
  misc_feature (1076)..(1076): n is a, c, g, or t
tcaaaacaccatctattaaagctgacaattgtcacaagcagaattgaatactcaaagggaagttaacttcacacagaaaaacacttcatatttcattcaacttgcaacgtatttactgagcgtctaccgtgtgtaaggcagcctgctaggaaatggggtacgaccctcctcctcacagagcttacattctgacaggggaacccgaagtgaacaagcatgatctgcaacaggtatgagatgtcaagaaagcctattacagaggcacccaggcccagtctacggggtcactaaaggctatgggataaactgatctgaaggatgagcacaaatcaatcatcgagaggctgagagcagctcaagtcgggggaataagatgtgcgagaagcaggagagagcaggatgaaataaaatcaggcccgtgtgatgcgtggtgaacagtgagtacccagagaagcgaagctgggggctgaggggctggtcaggaacacgggcttaattcatcaacccaacagcaaacatcagtgcaacaatgtaagcacatttaccttctgggtcataatgtaatttcttccaaagccagtggtggcactcagatatttgatcagaggattgacagattcaggcttttggtggaaaagccatacctggaaaggaaggatgtgtcaatgatttgtttcttctgcccaaggtgagtgaggctggtggagagtcactatctgcactttatagagctccccagacaaattataaacatcctctcaaatatcatcagtgaatggtttggcaaatatattgagaaccaattaaaatatagtttaaaagcacttgcttctacaaccaatttgtattcccacaataaatgtatttatttctgtaacacttaccaaaacaagagcatcaaagccaattccttcacactgccctccctcccacctgctcttcatgaggagtcctttattcctgcatgtttcctgttctttgggccggaattccgnggcgcgatgtcggctcactacaacctctgcctcctggattcaagcaattctgtacctcagcctcccgagtngctgtgattncagatgaacgggaccgggttcagaagaaaacgttcaccaagtgggtcaacaagcacttaatgaaggtccgcaagcacatcaatgatctttatgaagatctgcgggatggccataacctgatctctctgttggaggtcctctcaggcatcaaactgccccgggagaagggcaggatgcgttttcataggctgcagaatgtgcagattgccctggacttcctaaagcagcgacaggtgaaactagtgaatattcgcaatgatgacatcacagatggcaaccccaagttgaccctgggtctgatctggaccattattttgcatttccagatctctgacatctacattagtggagaatcaggggatatgtcagccaaggagaaactactcctgtggacccagaaggtgacagctggttacacaggaatcaaatgcaccaacttttcctcctgctggagtgatgggaagatgttcaatgcactcattcaccgataccgacccgatctagtagacatggagagggtgcaaatccaaagtaaccgagagaatctggaacaagcttttgaagtggcagaaagactgggggtcactcgcctgctggatgcagaagatgtggatgtgccatctccagatgaaaagtctgtaatcacttatgtgtcttcgatttatgatgccttccctaaagttcctgagggtggagaagggatcagtgctacggaagtggactccaggtggcaagaataccaaagccgagtggactccctcattccctggatcaaacagcatacaatactgatgtcagataaaacttttccccaaaaccctgttgaactaaaggcactttataaccaatatatacacttcaaagaaacagaaattctggccaaggagagagaaaaaggaagaattgaggaattatataaattactagaggtgtggattgaatttggccgaattaaactgcctcaaggttatcaccctaatgatgtggaagaagagtggggaaagctcatcatagagatgctggaacgagagaaatcacttcggccggctgtggagaggctggaattgctgctacagattgcaaacaaaatccagaatggtgctttgaactgtgaagaaaaactgacactagctaagaatacactgcaggctgatgctgctcacctggaatcaggacaaccggtacaatgtgagtcagatgtcattatgtacattcaagagtgtgaaggtctcatcaggcagctgcaggtggatctccagatcctgcgggatgagaattactaccagctagaagagctggcttttagggtcatgcgtcttcaggatgagctggtcaccttgcgtctagagtgtacaaacctgtaccggaagggtcatttcacttcacttgaattggttccaccctctactttaaccaccactcatctgaaagcagaacccttaaccaaggcaacccattcttcttctacctcctggttccgaaagcctatgactcgggctgaacttgggccatcagctcctctgaagatgaaggcaatctccgatttgtgtatgaactactgtctttgggtagaagagatgcagatgaaactggagcgagcagagtggggcaatgacctgcctagtgtggagttgcagctagaaacacagcagcacatccatacgagtgtagaagagctgggctcaagtgtcaaggaggccaggttgtatgagggaaagatgtcccagaatttccataccagctatgctgaaactcttggaaagctggagacacagtattgtaaattgaaggaaacttctagcttccggatgaggcaccttcagagcctgcataaatttgtttccagagctacagctgagttgatctggttgaatgagaaggaggaggaggaactagcatatgactggagtgacaacaattccaatatctcagccaagagaaattacttctctgagttgacaatggaactggaggagaaacaggatgtgtttcgttctctacaagatacagcagaactactttcacttgagaaccacccagccaagcagacagtggaggcttacagtgctgctgtccagtcccagttgcagtggatgaagcagctgtgcctgtgtgttgagcagcatgtgaaagagaatactgcttattttcagttcttcagtgatgcacgagagctggagtcattcttgaggaacctccaagattccattaaacgaaaatattcctgtgaccacaacaccagcttatcccgccttgaagacctgctccaggactccatggatgaaaaggagcagcttatacagtccaagagttccgttgccagtctcgttgggagatcaaaaaccatcgttcagctaaaaccacgcagtccagaccatgtgttaaagaacaccatttctgtcaaggctgtctgtgactacaggcagatcgagattactatttgcaaaaatgatgaatgtgtgctagaagataattctcagcggaccaaatggaaagtgatcagccccacagggaacgaggcaatggtgccgtcagtctgcttcctcatccccccacccaataaggatgccattgagatggccagcagggtcgaacaatcttatcagaaggttatggccctttggcatcagctgcatgttaacaccaaaagccttatctcttggaactatctgcgtaaagaccttgaccttgtacagacctggaacctagaaaagcttcgatcctcagcaccaggggagtgccatcagattatgaagaaccttcaggcccactatgaagactttctgcaggatagtcgtgactctgtgctgttctcagtggctgatcgcttgcgcttggaagaggaggtggaagcttgtaaagcccgcttccagcacctgatgaagtccatggagaatgaggacaaagaggagactgtggccaagatgtacatttcagagttgaagaacatccggctacgcctggaggagtatgaacagagggtggtcaaacgaattcagtctctagccagctctaggactgacagagatgcctggcaggacaatgcattaaggattgcagagcaagagcacacccaggaggatttacagcaattgaggtcagacttggatgcagtttctatgaaatgtgacagctttctccatcagtctccatctagttcaagtgtcccaactctgcgctcagaactgaatctgctggtggagaagatggaccatgtctatggtctctctactgtatatctgaataagttaaagacagttgatgttatagtacgtagcatacaggatgctgaactcttggtcaaaggttatgagattaagctgagtcaagaagaagtagtactggcagatctctcagctctggaggcccattggtcgacattacggcactggcttagtgatgtgaaggacaagaattcagtgttttcagtcctggatgaggaaattgccaaggccaaggtagtggcagagcagatgagtcgtctgacaccagagcgaaatctggatttggagcgctatcaggaaaaaggctcccagctgcaggagcgttggcaccgagtcattgcccagctcgagattcgccaatctgagctagaaagtatccaggaagttctgggagattaccgagcctgccatggaactctcatcaagtggattgaggaaaccactgcccagcaggaaatgatgaagccaggccaggcagaggatagcagagtgctttcggagcagctcagccagcagacggccctatttgcagaaattgagagaaatcagacaaaactggatcaatgtcaaaaattttcccagcagtactctactattgtaaaggactatgaattgcaactgatgacatacaaggcctttgtggaatcgcagcagaaatcccctggcaagcgccgtcgcatgctttcctcttcagatgccatcactcaagagttcatggacttaaggactcgctacacggcattggtgactttaacaactcagcacgtgaaatacatcagtgatgcactccggcgtctggaggaggaggagaaagtggtagaagaggagaaacaagaacatgtggagaaggttaaagaacttttgggctgggtgtctaccctagcgaggaatacacaaggaaaagctacctcatccgagaccaaagaatcaacagacattgaaaaagctattttggaacagcaggttctgtcagaagagctgacaacaaagaaagaacaagtctctgaagctattaaaacatcacagatcttcttggccaagcatggtcataagctctcagaaaaagagaagaaacaaatatctgagcaattgaatgccctaaacaaggcttaccatgacctttgtgatggttctgcaaatcagcttcagcagcttcagagccagttggctcaccagacagaacaaaagaccctgcagaaacaacaaaatacctgtcaccagcaactggaggatctttgcagttgggtaggacaggcagaaagagcactggcaggccaccaaggcagaaccacccagcaggatctctctgctttgcagaagaaccaaagtgacttgaaggatttacaggatgacattcagaatcgtgccacctcatttgccactgttgtcaaggacattgaggggttcatggaagagaatcagaccaagctgagcccacgtgagttgacagctcttcgggaaaagcttcatcaggctaaggagcaatatgaggcgctccaggaagagacacgtgtggcccagaaggaactggaggaagcagtgacctccgccttacagcaggagactgaaaagagtaaagcagcaaaggaactggcagagaacaagaagaagatcgatgctctcctggattgggtaacttcagtaggatcatctggtggacagctgctgaccaaccttccaggaatggagcagctctcgggagctagcttggagaaaggagccttggacaccactgatggttacatgggggtgaatcaagccccagagaaactggacaagcaatgtgagatgatgaaggcccgtcaccaagaattgctgtcccagcagcaaaatttcattctggccacccagtcagctcaggccttcttggatcagcatggccacaatctcacacctgaggagcaacagatgctgcaacagaagctgggagagctaaaggaacaatactctacttccctggcccaatcagaggcagaactgaagcaggtgcagacacttcaggatgagttgcagaaatttctgcaggatcataaagagtttgaaagctggttggaacgatccgagaaagagctggagaacatgcataagggaggcagcagccccgagacccttccctccctgctaaagcggcaaggaagcttctcagaggatgtcatttcccacaaaggagacttgagatttgtgactatctcaggacagaaagtcttggacatggaaaacagttttaaggaaggcaaagaaccatcagaaattggaaacttagtaaaggacaagttgaaggatgcaacagaaagatacactgctctccactcaaagtgtacacgattaggatctcacctgaatatgctgttaggccagtatcatcaattccaaaacagtgctgacagcctgcaggcctggatgcaggcttgtgaggccaacgtggagaagctcctctcagatactgttgcctctgaccctggagttctccaggagcagcttgcaacaacaaagcagttgcaggaggaattggctgagcaccaagtacctgtggaaaaactccaaaaagtagctcgtgacataatggaaattgaaggggagccagccccagaccacaggcatgttcaagaaactacagattccatactcagccacttccaaagcctctcctatagcctggctgagcgatcttctctgctgcagaaagcaattgcccaatctcagagtgtccaggaaagcctggagagcctgttgcagtctattggggaagttgaacaaaacctggaagggaagcaggtgtcatcactctcatcaggagtcatccaggaagccttagccacaaatatgaaattgaagcaggacattgctcggcaaaagagcagcttggaggccacccgtgagatggtgacccgattcatggagacagcagacagtactacagcagcagtgctgcagggcaaactggcagaggtgagccagcggttcgaacagctctgtctacagcagcaagaaaaggagagctccctaaagaagcttctaccccaggcagagatgtttgaacacctctctggtaagctgcagcagttcatggaaaacaaaagtcggatgctggcctctggaaatcagccagatcaagatattacacatttcttccaacagatccaggagctcaatttggaaatggaagaccaacaggagaacctagatactcttgagcacctggtcactgaactgagctcttgtggctttgcgctggacttgtgccagcatcaggacagggtacagaatctaagaaaagacttcacagagctacagaagacagttaaagagagagagaaagatgcatcatcttgccaggaacagttggatgaattccggaagctggtcaggaccttccagaaatggttgaaagaaactgaagggagtattccacctacggaaacttctatgagtgctaaagagttagaaaagcagattgaacacctgaagagtctactagatgactgggcaagtaagggaactctggtggaagaaatcaattgcaaaggtacttctttagaaaatctcatcatggaaatcacagcacctgattcccaaggcaagacagatctgacggagatccagtgtgacatgtcagatgtaaacttgaagtatgagaaactagggggagtacttcatgaacgccaggaaagccttcaggctatcctcaacagaatggaggaggttcacaaggaggcaaactctgtgctgcagtggctggaatcaaaagaggaagtcctgaaatccatggatgccatgtcatctccaaccaagacagaaacagtgaaagcccaagctgaatctaacaaggccttcctggctgagttggaacagaattctccaaaaattcaaaaagtaaaggaagccctggctggattactggtgacatatcccaactcacaggaagcagaaaattggaagaaaattcaggaagaactcaattcccgatgggaaagggccactgaggttactgtggctcggcaaaggcagctagaggaatctgcaagtcatctggcctgcttccaggctgcagaatcccagctccggccgtggctgatggagaaagaactgatgatgggagtgctggggcccctgtctattgaccccaacatgttgaatgcacaaaagcaacaggtccagtttatgctaaaggaatttgaagcacgcaggcaacagcatgagcaactgaatgaggcagctcagggcatcctaacaggccctggagatgtctctctgtccaccagccaagtacagaaagaactccagagcatcaatcagaaatgggttgagctgactgacaaactcaactcccgttccagccaaattgaccaagctattgttaagagcacccagtaccaggaactgctccaggacttatcagagaaggtgagggcagttggacaacggctgagtgtccagtcagctatcagcacccaaccagaggctgtaaagcagcaattggaagagaccagtgaaattcgatctgacttggagcagttagaccacgaggttaaggaggctcagacactgtgcgatgaactctcagtgctcattggtgagcagtacctcaaggatgaactgaagaagcgtttggagacagttgccctgcctctccaaggtttagaagaccttgcagccgatcgcattaacagactccaggcagctcttgccagcacccagcagttccagcaaatgtttgatgagttgaggacctggttggatgataaacaaagccagcaagcaaaaaactgcccaatttctgcaaaattggagcggctacagtctcagctacaggagaatgaagagtttcagaaaagtcttaatcaacacagtggctcctatgaggtgattgtggctgaaggggaatctctacttctttctgtacctcctggagaagagaaaaggactctacaaaaccagttggttgagctcaaaaaccattgggaagagcttagtaaaaaaactgcagacagacaatccaggctcaaggattgtatgcagaaagctcagaaatatcagtggcatgtggaagaccttgtgccatggatagaagattgtaaagctaagatgtctgagttgcgagtcactctggatccagtgcagctagagtccagtctcctaagatcaaaggctatgctgaatgaggtggagaagcgccgctccctgctggaaatattgaatagtgctgctgacattctgatcaattcttcagaagcagatgaggatggaatccgggatgagaaggctgggatcaaccagaacatggatgctgttacagaagagctgcaggccaaaacagggtcactcgaagaaatgactcagaggctcagggagttccaggaaagctttaagaatattgaaaagaaggttgaaggagccaaacaccaacttgagatctttgatgctctgggttctcaagcctgtagcaacaagaacctggagaagctaagagctcaacaggaagtgctgcaggccctagagcctcaggtagactatctgaggaactttactcagggtctggtagaagatgccccagatggatctgatgcttctcaacttctccaccaagctgaggtcgcccagcaagagttcctcgaagttaagcaaagagtgaacagtggttgtgtgatgatggaaaacaagctggaggggattggccagtttcactgccgggtccgagagatgttctctcaattggcagacctggatgatgagctagatggcatgggtgctattggcagagacactgatagcctccagtcccaaatcgaggatgtccggctattccttaacaaaattcacgtcctcaaattagacatagaggcctctgaagcagagtgtcgacatatgctagaagaagaggggactctggatttgttaggtctcaaaagggagctagaagccctgaacaaacagtgtggcaaactgacagagagggggaaagctcgtcaggaacagctggaactgacactaggccgtgtagaggacttctacaggaaattgaaaggactcaatgacgcgaccacagcagcagaggaggcagaggccctccagtgggtagtggggaccgaagtggaaatcatcaaccaacaattagcagattttaaaatgtttcagaaagaacaagtggatcctcttcagatgaaattgcagcaggtgaatggacttggccagggattaattcagagtgcaggaaaagactgtgatgtacagggtttagaacatgacatggaagagatcaatgctcgatggaatacattgaataaaaaggtcgcacaaagaattgcacagctacaggaagctttgttgcattgtgggaagtttcaagatgccttggagccattgctcagctggttggcagataccgaggagctcatagccaatcagaaacctccatctgctgagtataaagtggtgaaagcacagatccaagaacagaagttgctccagcggctcctagatgatcgaaaggccacagtagacatgcttcaagcagaaggaggcagaatagcccagtcagcagagctggctgatagagagaaaatcactggacagctggagagtcttgaaagtagatggactgaactactcagtaaggcagcagccaggcaaaaacagctggaagacatcctggttctggccaaacagttccatgagacagctgagcctatttctgacttcttatctgtcacagagaaaaagcttgctaactcagaacctgttggcactcagactgccaaaatacagcagcagatcattcggcacaaggctctggaagaagacatagaaaaccatgcaacagatgtgcaccaggcagtcaaaattgggcagtccctctcctccctgacatctcctgcagaacagggtgtgctgtcagaaaagatagactcattgcaggcccgatacagtgaaattcaagaccgctgttgtcggaaggcagccctacttgaccaagctctgtctaatgctaggctgtttggggaggatgaggtggaggtgctcaactggctggctgaggttgaggacaagctcagttcagtgttcgtaaaggatttcaaacaggatgtcctgcacaggcagcatgctgaccacctggctttaaatgaagaaattgttaatagaaagaagaatgtagatcaagctattaaaaatggtcaggctcttctaaaacaaaccacaggtgaggaggtgttacttatccaggaaaaactagatggtataaagactcgttacgcagacatcacagttactagctccaaggccctcagaactttagagcaagcccggcagctggccaccaagttccagtctacttatgaggaactgaccgggtggctgagggaggtggaggaggagctggcaaccagtggaggacagtctcccacaggggaacagataccccagtttcagcagagacagaaggaattaaagaaggaggtcatggagcacaggctggtgttggacacagtgaatgaggtgagccgtgctctcttagagctggtgccctggagagccagagaagggctggataaacttgtgtccgatgctaacgagcagtacaaactagtcagtgacactattggacaaagggtggatgaaattgatgctgctattcagagatcacaacagtatgagcaagctgccgatgcagaactagcttgggttgctgaaacaaaacggaaactgatggctctgggtccaattcgcctggaacaggaccagaccacagctcagcttcaggtacagaaggctttctccattgacattattcgacacaaagattcaatggatgaactcttcagtcaccgtagtgaaatctttggcacatgtggggaggagcaaaaaactgtattacaggaaaagacagagtctctaatacagcaatatgaagccattagcctactcaattcagagcgttatgcccgcctagagcgggcccaggtcttagtaaaccagttttgggaaacttatgaagagctcagcccctggattgaggaaactcgggcactaatagcacagttaccctctccagccattgatcatgagcagctcaggcagcaacaagaggaaatgaggcaattaagggaatctattgctgaacacaaacctcatattgacaaactactaaagataggcccacaactaaaggaattaaaccctgaggaaggggaaatggtggaagaaaaataccagaaagcagaaaacatgtatgcccaaataaaggaggaggtgcgccagcgagccctggctctggatgaagccgtgtcccagtccacacagattacagagtttcatgataaaattgagcctatgttggagacactggagaatctttcctctcgcctgcgtatgccaccactgatccctgctgaagtagacaagatcagagagtgcatcagtgacaataagagtgccaccgtggagctagaaaaactgcagccatcctttgaggccttgaagcgccgtggagaggagcttattggacgatctcagggagcagacaaggatctggctgcaaaagaaatccaggataaattggatcaaatggtattcttctgggaggacatcaaagctcgggctgaagaacgagaaatcaaatttcttgatgtccttgaattagcagagaagttctggtatgacatggcagctctcctgaccaccatcaaagacacccaggatattgtccatgacttggaaagcccaggcattgatccttccatcatcaaacaacaggttgaagctgctgagactattaaggaagagacagatggtctgcatgaagagctggagtttattcggatccttggagcagatttgatttttgcctgtggagaaactgagaagcctgaagtgaggaagagcattgatgagatgaataatgcttgggagaacttaaacaaaacatggaaagagaggctagaaaaacttgaggatgctatgcaagctgctgtgcagtatcaggacactcttcaggctatgtttgactggctagataacactgtgattaaactctgcaccatgccccctgttggcactgacctcaatactgttaaagatcagttaaatgaaatgaaggagttcaaagtagaagtttaccaacagcaaattgagatggagaagcttaatcaccagggtgaactgatgttaaagaaagctactgatgagacggacagagacattatacgagaaccactgacagaactcaaacacctctgggagaacctgggtgagaaaattgcccaccgacagcacaaactagaaggggctctgttggcccttggtcagttccagcatgccttagaggaactaatgagttggctgactcataccgaagagttgttagatgctcagagaccaataagtggagacccaaaagtcattgaagttgagctcgcaaagcaccatgtcctaaaaaatgatgttttggctcatcaagccacagtggaaacagtcaacaaagctggcaatgagcttcttgaatccagtgctggagatgatgccagcagcttaaggagccgtttggaagccatgaaccaatgctgggagtcagtgttacagaaaacagaggagagggagcagcagcttcagtcaactctgcagcaggcccagggcttccacagtgaaattgaagatttcctcttggaacttactagaatggagagccagctttctgcatctaagcccacaggaggacttcctgaaactgctagggaacagcttgatacacatatggaactctattcccagctgaaagccaaggaagagacttataatcaactacttgacaagggcagactcatgcttctaagccgtgacgactctgggtctggctccaagacagaacagagtgtagcacttttggagcagaagtggcatgtggtcagcagtaagatggaagaaagaaagtcaaagctggaagaggccctcaacttggcaacagaattccagaattccctacaagaatttatcaactggctcactctagcagagcagagtttaaacatcgcttctccaccaagcctgattctaaatactgtcctttcccagatagaagagcacaaggtttttgctaatgaagtaaatgctcatcgagaccagatcattgagctggatcaaactgggaatcaattaaagttccttagccaaaagcaggatgttgttctgatcaagaatttgttggtgagcgtgcagtctcgatgggagaaggttgtccagcgatctattgaaagagggcgatcactagatgatgccaggaagcgggcaaaacaattccatgaagcttggaaaaaactgattgactggctagaagatgcagagagtcacctggactcagaactagagatatccaatgacccagacaaaattaaacttcagctttctaagcataaggagtttcagaagactcttggtggcaagcagcctgtgtatgataccacaattagaactggcagagcactgaaagaaaagactttgcttcccgaagatactcagaaacttgacaatttcctaggagaagtcagagacaaatgggatactgtttgtggcaagtctgtggagcggcagcacaagttggaggaagccctgctcttttcgggtcagttcatggatgctttgcaggcattggttgactggttatacaaggtggagccacagctggctgaggaccagcccgtgcacggggaccttgacctcgtcatgaacctcatggatgcacacaaggttttccagaaggaactgggaaagcgaacaggaaccgttcaggtcctgaagcggtcaggccgagagctgattgagaatagtcgagatgacaccacttgggtaaaaggacagctccaggaactgagcactcgctgggacactgtctgtaaactctctgtttccaaacaaagccggcttgagcaggccttaaaacaagcggaagtgtttcgagacacagtccacatgctgttggagtggctttctgaagcagagcaaacgcttcgctttcggggagcacttcctgatgacacagaggccctgcagtctctcattgacacccataaggaattcatgaagaaagtagaagaaaagcgagtggacgttaactcagcagtagccatgggagaagtcatcctggctgtctgccaccccgattgcatcacaaccatcaaacactggatcaccatcatccgagctcgcttcgaggaggtcctgacatgggctaagcagcaccagcagcgtcttgaaacggccttgtcagaactggtggctaatgctgagctcctggaagaacttctggcatggatccagtgggctgagaccaccctcattcagcgggatcaggagccaatcccgcagaacattgaccgagttaaagcccttatcgctgagcatcagacatttatggaggagatgactcgcaaacagcctgacgtggaccgggtcaccaagacatacaaaaggaaaaacatagagcctactcacgcgcctttcatagagaaatcccgcagcggaggcaggaaatccctaagtcagccaacccctcctcccatgccaatcctttcacagtctgaagcaaaaaacccacggatcaaccagctttctgcccgctggcagcaggtgtggctgttagcactggagcggcaaaggaaactgaatgatgccttggatcggctggaggagttgaaagaatttgccaactttgactttgatgtctggaggaaaaagtatatgcgttggatgaatcacaaaaagtctcgagtgatggatttcttccggcgcattgataaggaccaggatgggaagataacacgtcaggagtttatcgatggcattttagcatccaagttccccaccaccaagttagagatgactgctgtggctgacattttcgaccgagatggggatggttacattgattattatgaatttgtggctgctcttcatcccaacaaggatgcgtatcgaccaacaaccgatgcagataaaatcgaagatgaggttacaagacaagtggctcagtgcaaatgtgcaaaaaggtttcaggtggagcagatcggagagaataaataccggtttggggattctcagcagttgcggctggtccgtattctgcgcagcaccgtgatggttcgcgttggtggaggatggatggccttggatgaatttttagtgaaaaatgatccctgccgagcacgaggtagaactaacattgaacttagagagaaattcatcctaccagagggagcatcccagggaatgacccccttccgctcacggggtcgaaggtccaaaccatcttcccgggcagcttcccctactcgttccagctccagtgctagtcagagtaaccacagctgtacatccatgccatcttctccagccaccccagccagtggaaccaaggttatcccatcatcaggtagcaagttgaaacgaccaacaccaacttttcattctagtcggacatcccttgctggtgataccagcaatagttcttccccggcctccacaggtgccaaaactaatcgggcagaccctaaaaagtctgccagtcgccctgggagtcgggctgggagtcgagccgggagtcgagccagcagccggcgaggaagtgacgcttctgactttgacctcttagagacgcagtctgcttgttccgacacttcagaaagcagcgctgcagggggccaaggcaactccaggagagggctaaacaaaccttccaaaatcccaaccatgtctaagaagaccaccactgcctcccccaggactccaggtcccaagcgataacactgtctaagcacccccaagccactatccactttgaatcctgctccatacattgggtgtatatttattctgaacgggagaagttatattgttaaaagtgtaaaagaataattgtgttatgaagctgccttattttttttctttttgtaagttactattttcatgtgaatatttatgtagataaaatttgcctcctggtaaccctgtaatggatggggcccagaaatgaaatatttgagaaaaacaagtgaaaaggtcaagatacaaatgtgtattaaaaaaaaaaaagcctattaatagggtttctgcgcggtgcagggttgtaaacctgctttatcttttaggattattcctaaatgcatcttctttataaacttgacttgctatctcagcaagataaattatattaaaaaaataagaatcctgcagtgtttaaggaactctttttttgtaaatcacggacacctcaattagcaagaactgaggggagggctttttccattgtttaatgttttgtgatttttagctaaagagagggaacctcatctaagtaacatttgcacatgatacagcaaaaggagttcattgcaatactgtctttggatattgtttcagtactgggtgtttaaaggacaaatagctgctagaattcaggggtaaataaccgtataactcttggtgttaccaggacccaaaccctttgcaagggattaggctgttggtgaactttggttctt

SEQ ID NO: 367609 - DNA, 7960 bp, Homo sapiens
gcggtgaggtacagctggcatctcacggagagtgcccaggaacgctgctgaacatcctgcagtgcacaggagagtcctccacaaccaacaattagcagattttaaaatgtttcagaaagaacaagtggatcctcttcagatgaaattgcagcaggtgaatggacttggccagggattaattcagagtgcaggaaaagactgtgatgtacagggtttagaacatgacatggaagagatcaatgctcgatggaatacattgaataaaaaggtcgcacaaagaattgcacagctacaggaagctttgttgcattgtgggaagtttcaagatgccttggagccattgctcagctggttggcagataccgaggagctcatagccaatcagaaacctccatctgctgagtataaagtggtgaaagcacagatccaagaacagaagttgctccagcggctcctagatgatcgaaaggccacagtagacatgcttcaagcagaaggaggcagaatagcccagtcagcagagctggctgatagagagaaaatcactggacagctggagagtcttgaaagtagatggactgaactactcagtaaggcagcagccaggcaaaaacagctggaagacatcctggttctggccaaacagttccatgagacagctgagcctatttctgacttcttatctgtcacagagaaaaagcttgctaactcagaacctgttggcactcagactgccaaaatacagcagcagatcattcggcacaaggctctggaagaagacatagaaaaccatgcaacagatgtgcaccaggcagtcaaaattgggcagtccctctcctccctgacatctcctgcagaacagggtgtgctgtcagaaaagatagactcattgcaggcccgatacagtgaaattcaagaccgctgttgtcggaaggcagccctacttgaccaagctctgtctaatgctaggctgtttggggaggatgaggtggaggtgctcaactggctggctgaggttgaggacaagctcagttcagtgttcgtaaaggatttcaaacaggatgtcctgcacaggcagcatgctgaccacctggctttaaatgaagaaattgttaatagaaagaagaatgtagatcaagctattaaaaatggtcaggctcttctaaaacaaaccacaggtgaggaggtgttacttatccaggaaaaactagatggtataaagactcgttacgcagacatcacagttactagctccaaggccctcagaactttagagcaagcccggcagctggccaccaagttccagtctacttatgaggaactgaccgggtggctgagggaggtggaggaggagctggcaaccagtggaggacagtctcccacaggggaacagataccccagtttcagcagagacagaaggaattaaagaaggaggtcatggagcacaggctggtgttggacacagtgaatgaggtgagccgtgctctcttagagctggtgccctggagagccagagaagggctggataaacttgtgtccgatgctaacgagcagtacaaactagtcagtgacactattggacaaagggtggatgaaattgatgctgctattcagagatcacaacagtatgagcaagctgccgatgcagaactagcttgggttgctgaaacaaaacggaaactgatggctctgggtccaattcgcctggaacaggaccagaccacagctcagcttcaggtacagaaggctttctccattgacattattcgacacaaagattcaatggatgaactcttcagtcaccgtagtgaaatctttggcacatgtggggaggagcaaaaaactgtattacaggaaaagacagagtctctaatacagcaatatgaagccattagcctactcaattcagagcgttatgcccgcctagagcgggcccaggtcttagtaaaccagttttgggaaacttatgaagagctcagcccctggattgaggaaactcgggcactaatagcacagttaccctctccagccattgatcatgagcagctcaggcagcaacaagaggaaatgaggcaattaagggaatctattgctgaacacaaacctcatattgacaaactactaaagataggcccacaactaaaggaattaaaccctgaggaaggggaaatggtggaagaaaaataccagaaagcagaaaacatgtatgcccaaataaaggaggaggtgcgccagcgagccctggctctggatgaagccgtgtcccagtccacacagattacagagtttcatgataaaattgagcctatgttggagacactggagaatctttcctctcgcctgcgtatgccaccactgatccctgctgaagtagacaagatcagagagtgcatcagtgacaataagagtgccaccgtggagctagaaaaactgcagccatcctttgaggccttgaagcgccgtggagaggagcttattggacgatctcagggagcagacaaggatctggctgcaaaagaaatccaggataaattggatcaaatggtattcttctgggaggacatcaaagctcgggctgaagaacgagaaatcaaatttcttgatgtccttgaattagcagagaagttctggtatgacatggcagctctcctgaccaccatcaaagacacccaggatattgtccatgacttggaaagcccaggcattgatccttccatcatcaaacaacaggttgaagctgctgagactattaaggaagagacagatggtctgcatgaagagctggagtttattcggatccttggagcagatttgatttttgcctgtggagaaactgagaagcctgaagtgaggaagagcattgatgagatgaataatgcttgggagaacttaaacaaaacatggaaagagaggctagaaaaacttgaggatgctatgcaagctgctgtgcagtatcaggacactcttcaggctatgtttgactggctagataacactgtgattaaactctgcaccatgccccctgttggcactgacctcaatactgttaaagatcagttaaatgaaatgaaggagttcaaagtagaagtttaccaacagcaaattgagatggagaagcttaatcaccagggtgaactgatgttaaagaaagctactgatgagacggacagagacattatacgagaaccactgacagaactcaaacacctctgggagaacctgggtgagaaaattgcccaccgacagcacaaactagaaggggctctgttggcccttggtcagttccagcatgccttagaggaactaatgagttggctgactcataccgaagagttgttagatgctcagagaccaataagtggagacccaaaagtcattgaagttgagctcgcaaagcaccatgtcctaaaaaatgatgttttggctcatcaagccacagtggaaacagtcaacaaagctggcaatgagcttcttgaatccagtgctggagatgatgccagcagcttaaggagccgtttggaagccatgaaccaatgctgggagtcagtgttacagaaaacagaggagagggagcagcagcttcagtcaactctgcagcaggcccagggcttccacagtgaaattgaagatttcctcttggaacttactagaatggagagccagctttctgcatctaagcccacaggaggacttcctgaaactgctagggaacagcttgatacacatatggaactctattcccagctgaaagccaaggaagagacttataatcaactacttgacaagggcagactcatgcttctaagccgtgacgactctgggtctggctccaagacagaacagagtgtagcacttttggagcagaagtggcatgtggtcagcagtaagatggaagaaagaaagtcaaagctggaagaggccctcaacttggcaacagaattccagaattccctacaagaatttatcaactggctcactctagcagagcagagtttaaacatcgcttctccaccaagcctgattctaaatactgtcctttcccagatagaagagcacaaggtttttgctaatgaagtaaatgctcatcgagaccagatcattgagctggatcaaactgggaatcaattaaagttccttagccaaaagcaggatgttgttctgatcaagaatttgttggtgagcgtgcagtctcgatgggagaaggttgtccagcgatctattgaaagagggcgatcactagatgatgccaggaagcgggcaaaacaattccatgaagcttggaaaaaactgattgactggctagaagatgcagagagtcacctggactcagaactagagatatccaatgacccagacaaaattaaacttcagctttctaagcataaggagtttcagaagactcttggtggcaagcagcctgtgtatgataccacaattagaactggcagagcactgaaagaaaagactttgcttcccgaagatactcagaaacttgacaatttcctaggagaagtcagagacaaatgggatactgtttgtggcaagtctgtggagcggcagcacaagttggaggaagccctgctcttttcgggtcagttcatggatgctttgcaggcattggttgactggttatacaaggtggagccacagctggctgaggaccagcccgtgcacggggaccttgacctcgtcatgaacctcatggatgcacacaaggttttccagaaggaactgggaaagcgaacaggaaccgttcaggtcctgaagcggtcaggccgagagctgattgagaatagtcgagatgacaccacttgggtaaaaggacagctccaggaactgagcactcgctgggacactgtctgtaaactctctgtttccaaacaaagccggcttgagcaggccttaaaacaagcggaagtgtttcgagacacagtccacatgctgttggagtggctttctgaagcagagcaaacgcttcgctttcggggagcacttcctgatgacacagaggccctgcagtctctcattgacacccataaggaattcatgaagaaagtagaagaaaagcgagtggacgttaactcagcagtagccatgggagaagtcatcctggctgtctgccaccccgattgcatcacaaccatcaaacactggatcaccatcatccgagctcgcttcgaggaggtcctgacatgggctaagcagcaccagcagcgtcttgaaacggccttgtcagaactggtggctaatgctgagctcctggaagaacttctggcatggatccagtgggctgagaccaccctcattcagcgggatcaggagccaatcccgcagaacattgaccgagttaaagcccttatcgctgagcatcagacatttatggaggagatgactcgcaaacagcctgacgtggaccgggtcaccaagacatacaaaaggaaaaacatagagcctactcacgcgcctttcatagagaaatcccgcagcggaggcaggaaatccctaagtcagccaacccctcctcccatgccaatcctttcacagtctgaagcaaaaaacccacggatcaaccagctttctgcccgctggcagcaggtgtggctgttagcactggagcggcaaaggaaactgaatgatgccttggatcggctggaggagttgaaagaatttgccaactttgactttgatgtctggaggaaaaagtatatgcgttggatgaatcacaaaaagtctcgagtgatggatttcttccggcgcattgataaggaccaggatgggaagataacacgtcaggagtttatcgatggcattttagcatccaagttccccaccaccaagttagagatgactgctgtggctgacattttcgaccgagatggggatggttacattgattattatgaatttgtggctgctcttcatcccaacaaggatgcgtatcgaccaacaaccgatgcagataaaatcgaagatgaggttacaagacaagtggctcagtgcaaatgtgcaaaaaggtttcaggtggagcagatcggagagaataaataccggtttggggattctcagcagttgcggctggtccgtattctgcgcagcaccgtgatggttcgcgttggtggaggatggatggccttggatgaatttttagtgaaaaatgatccctgccgagcacgaggtagaactaacattgaacttagagagaaattcatcctaccagagggagcatcccagggaatgacccccttccgctcacggggtcgaaggtccaaaccatcttcccgggcagcttcccctactcgttccagctccagtgctagtcagagtaaccacagctgtacatccatgccatcttctccagccaccccagccagtggaaccaaggttatcccatcatcaggtagcaagttgaaacgaccaacaccaacttttcattctagtcggacatcccttgctggtgataccagcaatagttcttccccggcctccacaggtgccaaaactaatcgggcagaccctaaaaagtctgccagtcgccctgggagtcgggctgggagtcgagccgggagtcgagccagcagccggcgaggaagtgacgcttctgactttgacctcttagagacgcagtctgcttgttccgacacttcagaaagcagcgctgcagggggccaaggcaactccaggagagggctaaacaaaccttccaaaatcccaaccatgtctaagaagaccaccactgcctcccccaggactccaggtcccaagcgataacactgtctaagcacccccaagccactatccactttgaatcctgctccatacattgggtgtatatttattctgaacgggagaagttatattgttaaaagtgtaaaagaataattgtgttatgaagctgccttattttttttctttttgtaagttactattttcatgtgaatatttatgtagataaaatttgcctcctggtaaccctgtaatggatggggcccagaaatgaaatatttgagaaaaacaagtgaaaaggtcaagatacaaatgtgtattaaaaaaaaaaaagcctattaatagggtttctgcgcggtgcagggttgtaaacctgctttatcttttaggattattcctaaatgcatcttctttataaacttgacttgctatctcagcaagataaattatattaaaaaaataagaatcctgcagtgtttaaggaactctttttttgtaaatcacggacacctcaattagcaagaactgaggggagggctttttccattgtttaatgttttgtgatttttagctaaagagagggaacctcatctaagtaacatttgcacatgatacagcaaaaggagttcattgcaatactgtctttggatattgtttcagtactgggtgtttaaaggacaaatagctgctagaattcaggggtaaatgtaagtgttcagaaaacgtcagaacatttggggttttaaactgatttgttgctccctatccagcctagacaccagtaactcttgtgttcaccaggacccagacccttggcaagggataggctcgttggtgacattgtgaatttcagatttgttttatccactttttttgctatttatttaaatggtcgatcaacttcccacaaactgaggaatgaattccacgagcctgttctgaaaatgtggacgtaagacaaacacgtgctcgtcctttaatggagttcaccagcacacttgttaaccagtcctgtttgctttcgtctttttttgtgcgtaataaagtcaactgaccaagtgaccatgaaaaggggctgtctggggctcctgttttttagctgctgttcttcagctccgaccatgttgctgtgtgattatctcaattggttttaattgaggcagaaactgaagctctaccaatgaactgtttagaaacaagacacacttttgtattaaaattgcttgcagtaacaaa

SEQ ID NO: 367610 - DNA, 18393 bp, Homo sapiens
  misc_feature (995)..(995): n is a, c, g, or t
  misc_feature (1066)..(1066): n is a, c, g, or t
  misc_feature (1076)..(1076): n is a, c, g, or t
tcaaaacaccatctattaaagctgacaattgtcacaagcagaattgaatactcaaagggaagttaacttcacacagaaaaacacttcatatttcattcaacttgcaacgtatttactgagcgtctaccgtgtgtaaggcagcctgctaggaaatggggtacgaccctcctcctcacagagcttacattctgacaggggaacccgaagtgaacaagcatgatctgcaacaggtatgagatgtcaagaaagcctattacagaggcacccaggcccagtctacggggtcactaaaggctatgggataaactgatctgaaggatgagcacaaatcaatcatcgagaggctgagagcagctcaagtcgggggaataagatgtgcgagaagcaggagagagcaggatgaaataaaatcaggcccgtgtgatgcgtggtgaacagtgagtacccagagaagcgaagctgggggctgaggggctggtcaggaacacgggcttaattcatcaacccaacagcaaacatcagtgcaacaatgtaagcacatttaccttctgggtcataatgtaatttcttccaaagccagtggtggcactcagatatttgatcagaggattgacagattcaggcttttggtggaaaagccatacctggaaaggaaggatgtgtcaatgatttgtttcttctgcccaaggtgagtgaggctggtggagagtcactatctgcactttatagagctccccagacaaattataaacatcctctcaaatatcatcagtgaatggtttggcaaatatattgagaaccaattaaaatatagtttaaaagcacttgcttctacaaccaatttgtattcccacaataaatgtatttatttctgtaacacttaccaaaacaagagcatcaaagccaattccttcacactgccctccctcccacctgctcttcatgaggagtcctttattcctgcatgtttcctgttctttgggccggaattccgnggcgcgatgtcggctcactacaacctctgcctcctggattcaagcaattctgtacctcagcctcccgagtngctgtgattncagatgaacgggaccgggttcagaagaaaacgttcaccaagtgggtcaacaagcacttaatgaaggtccgcaagcacatcaatgatctttatgaagatctgcgggatggccataacctgatctctctgttggaggtcctctcaggcatcaaactgccccgggagaagggcaggatgcgttttcataggctgcagaatgtgcagattgccctggacttcctaaagcagcgacaggtgaaactagtgaatattcgcaatgatgacatcacagatggcaaccccaagttgaccctgggtctgatctggaccattattttgcatttccagatctctgacatctacattagtggagaatcaggggatatgtcagccaaggagaaactactcctgtggacccagaaggtgacagctggttacacaggaatcaaatgcaccaacttttcctcctgctggagtgatgggaagatgttcaatgcactcattcaccgataccgacccgatctagtagacatggagagggtgcaaatccaaagtaaccgagagaatctggaacaagcttttgaagtggcagaaagactgggggtcactcgcctgctggatgcagaagatgtggatgtgccatctccagatgaaaagtctgtaatcacttatgtgtcttcgatttatgatgccttccctaaagttcctgagggtggagaagggatcagtgctacggaagtggactccaggtggcaagaataccaaagccgagtggactccctcattccctggatcaaacagcatacaatactgatgtcagataaaacttttccccaaaaccctgttgaactaaaggcactttataaccaatatatacacttcaaagaaacagaaattctggccaaggagagagaaaaaggaagaattgaggaattatataaattactagaggtgtggattgaatttggccgaattaaactgcctcaaggttatcaccctaatgatgtggaagaagagtggggaaagctcatcatagagatgctggaacgagagaaatcacttcggccggctgtggagaggctggaattgctgctacagattgcaaacaaaatccagaatggtgctttgaactgtgaagaaaaactgacactagctaagaatacactgcaggctgatgctgctcacctggaatcaggacaaccggtacaatgtgagtcagatgtcattatgtacattcaagagtgtgaaggtctcatcaggcagctgcaggtggatctccagatcctgcgggatgagaattactaccagctagaagagctggcttttagggtcatgcgtcttcaggatgagctggtcaccttgcgtctagagtgtacaaacctgtaccggaagggtcatttcacttcacttgaattggttccaccctctactttaaccaccactcatctgaaagcagaacccttaaccaaggcaacccattcttcttctacctcctggttccgaaagcctatgactcgggctgaacttgggccatcagctcctctgaagatgaaggcaatctccgatttgtgtatgaactactgtctttgggtagaagagatgcagatgaaactggagcgagcagagtggggcaatgacctgcctagtgtggagttgcagctagaaacacagcagcacatccatacgagtgtagaagagctgggctcaagtgtcaaggaggccaggttgtatgagggaaagatgtcccagaatttccataccagctatgctgaaactcttggaaagctggagacacagtattgtaaattgaaggaaacttctagcttccggatgaggcaccttcagagcctgcataaatttgtttccagagctacagctgagttgatctggttgaatgagaaggaggaggaggaactagcatatgactggagtgacaacaattccaatatctcagccaagagaaattacttctctgagttgacaatggaactggaggagaaacaggatgtgtttcgttctctacaagatacagcagaactactttcacttgagaaccacccagccaagcagacagtggaggcttacagtgctgctgtccagtcccagttgcagtggatgaagcagctgtgcctgtgtgttgagcagcatgtgaaagagaatactgcttattttcagttcttcagtgatgcacgagagctggagtcattcttgaggaacctccaagattccattaaacgaaaatattcctgtgaccacaacaccagcttatcccgccttgaagacctgctccaggactccatggatgaaaaggagcagcttatacagtccaagagttccgttgccagtctcgttgggagatcaaaaaccatcgttcagctaaaaccacgcagtccagaccatgtgttaaagaacaccatttctgtcaaggctgtctgtgactacaggcagatcgagattactatttgcaaaaatgatgaatgtgtgctagaagataattctcagcggaccaaatggaaagtgatcagccccacagggaacgaggcaatggtgccgtcagtctgcttcctcatccccccacccaataaggatgccattgagatggccagcagggtcgaacaatcttatcagaaggttatggccctttggcatcagctgcatgttaacaccaaaagccttatctcttggaactatctgcgtaaagaccttgaccttgtacagacctggaacctagaaaagcttcgatcctcagcaccaggggagtgccatcagattatgaagaaccttcaggcccactatgaagactttctgcaggatagtcgtgactctgtgctgttctcagtggctgatcgcttgcgcttggaagaggaggtggaagcttgtaaagcccgcttccagcacctgatgaagtccatggagaatgaggacaaagaggagactgtggccaagatgtacatttcagagttgaagaacatccggctacgcctggaggagtatgaacagagggtggtcaaacgaattcagtctctagccagctctaggactgacagagatgcctggcaggacaatgcattaaggattgcagagcaagagcacacccaggaggatttacagcaattgaggtcagacttggatgcagtttctatgaaatgtgacagctttctccatcagtctccatctagttcaagtgtcccaactctgcgctcagaactgaatctgctggtggagaagatggaccatgtctatggtctctctactgtatatctgaataagttaaagacagttgatgttatagtacgtagcatacaggatgctgaactcttggtcaaaggttatgagattaagctgagtcaagaagaagtagtactggcagatctctcagctctggaggcccattggtcgacattacggcactggcttagtgatgtgaaggacaagaattcagtgttttcagtcctggatgaggaaattgccaaggccaaggtagtggcagagcagatgagtcgtctgacaccagagcgaaatctggatttggagcgctatcaggaaaaaggctcccagctgcaggagcgttggcaccgagtcattgcccagctcgagattcgccaatctgagctagaaagtatccaggaagttctgggagattaccgagcctgccatggaactctcatcaagtggattgaggaaaccactgcccagcaggaaatgatgaagccaggccaggcagaggatagcagagtgctttcggagcagctcagccagcagacggccctatttgcagaaattgagagaaatcagacaaaactggatcaatgtcaaaaattttcccagcagtactctactattgtaaaggactatgaattgcaactgatgacatacaaggcctttgtggaatcgcagcagaaatcccctggcaagcgccgtcgcatgctttcctcttcagatgccatcactcaagagttcatggacttaaggactcgctacacggcattggtgactttaacaactcagcacgtgaaatacatcagtgatgcactccggcgtctggaggaggaggagaaagtggtagaagaggagaaacaagaacatgtggagaaggttaaagaacttttgggctgggtgtctaccctagcgaggaatacacaaggaaaagctacctcatccgagaccaaagaatcaacagacattgaaaaagctattttggaacagcaggttctgtcagaagagctgacaacaaagaaagaacaagtctctgaagctattaaaacatcacagatcttcttggccaagcatggtcataagctctcagaaaaagagaagaaacaaatatctgagcaattgaatgccctaaacaaggcttaccatgacctttgtgatggttctgcaaatcagcttcagcagcttcagagccagttggctcaccagacagaacaaaagaccctgcagaaacaacaaaatacctgtcaccagcaactggaggatctttgcagttgggtaggacaggcagaaagagcactggcaggccaccaaggcagaaccacccagcaggatctctctgctttgcagaagaaccaaagtgacttgaaggatttacaggatgacattcagaatcgtgccacctcatttgccactgttgtcaaggacattgaggggttcatggaagagaatcagaccaagctgagcccacgtgagttgacagctcttcgggaaaagcttcatcaggctaaggagcaatatgaggcgctccaggaagagacacgtgtggcccagaaggaactggaggaagcagtgacctccgccttacagcaggagactgaaaagagtaaagcagcaaaggaactggcagagaacaagaagaagatcgatgctctcctggattgggtaacttcagtaggatcatctggtggacagctgctgaccaaccttccaggaatggagcagctctcgggagctagcttggagaaaggagccttggacaccactgatggttacatgggggtgaatcaagccccagagaaactggacaagcaatgtgagatgatgaaggcccgtcaccaagaattgctgtcccagcagcaaaatttcattctggccacccagtcagctcaggccttcttggatcagcatggccacaatctcacacctgaggagcaacagatgctgcaacagaagctgggagagctaaaggaacaatactctacttccctggcccaatcagaggcagaactgaagcaggtgcagacacttcaggatgagttgcagaaatttctgcaggatcataaagagtttgaaagctggttggaacgatccgagaaagagctggagaacatgcataagggaggcagcagccccgagacccttccctccctgctaaagcggcaaggaagcttctcagaggatgtcatttcccacaaaggagacttgagatttgtgactatctcaggacagaaagtcttggacatggaaaacagttttaaggaaggcaaagaaccatcagaaattggaaacttagtaaaggacaagttgaaggatgcaacagaaagatacactgctctccactcaaagtgtacacgattaggatctcacctgaatatgctgttaggccagtatcatcaattccaaaacagtgctgacagcctgcaggcctggatgcaggcttgtgaggccaacgtggagaagctcctctcagatactgttgcctctgaccctggagttctccaggagcagcttgcaacaacaaagcagttgcaggaggaattggctgagcaccaagtacctgtggaaaaactccaaaaagtagctcgtgacataatggaaattgaaggggagccagccccagaccacaggcatgttcaagaaactacagattccatactcagccacttccaaagcctctcctatagcctggctgagcgatcttctctgctgcagaaagcaattgcccaatctcagagtgtccaggaaagcctggagagcctgttgcagtctattggggaagttgaacaaaacctggaagggaagcaggtgtcatcactctcatcaggagtcatccaggaagccttagccacaaatatgaaattgaagcaggacattgctcggcaaaagagcagcttggaggccacccgtgagatggtgacccgattcatggagacagcagacagtactacagcagcagtgctgcagggcaaactggcagaggtgagccagcggttcgaacagctctgtctacagcagcaagaaaaggagagctccctaaagaagcttctaccccaggcagagatgtttgaacacctctctggtaagctgcagcagttcatggaaaacaaaagtcggatgctggcctctggaaatcagccagatcaagatattacacatttcttccaacagatccaggagctcaatttggaaatggaagaccaacaggagaacctagatactcttgagcacctggtcactgaactgagctcttgtggctttgcgctggacttgtgccagcatcaggacagggtacagaatctaagaaaagacttcacagagctacagaagacagttaaagagagagagaaagatgcatcatcttgccaggaacagttggatgaattccggaagctggtcaggaccttccagaaatggttgaaagaaactgaagggagtattccacctacggaaacttctatgagtgctaaagagttagaaaagcagattgaacacctgaagagtctactagatgactgggcaagtaagggaactctggtggaagaaatcaattgcaaaggtacttctttagaaaatctcatcatggaaatcacagcacctgattcccaaggcaagacagatctgacggagatccagtgtgacatgtcagatgtaaacttgaagtatgagaaactagggggagtacttcatgaacgccaggaaagccttcaggctatcctcaacagaatggaggaggttcacaaggaggcaaactctgtgctgcagtggctggaatcaaaagaggaagtcctgaaatccatggatgccatgtcatctccaaccaagacagaaacagtgaaagcccaagctgaatctaacaaggccttcctggctgagttggaacagaattctccaaaaattcaaaaagtaaaggaagccctggctggattactggtgacatatcccaactcacaggaagcagaaaattggaagaaaattcaggaagaactcaattcccgatgggaaagggccactgaggttactgtggctcggcaaaggcagctagaggaatctgcaagtcatctggcctgcttccaggctgcagaatcccagctccggccgtggctgatggagaaagaactgatgatgggagtgctggggcccctgtctattgaccccaacatgttgaatgcacaaaagcaacaggtccagtttatgctaaaggaatttgaagcacgcaggcaacagcatgagcaactgaatgaggcagctcagggcatcctaacaggccctggagatgtctctctgtccaccagccaagtacagaaagaactccagagcatcaatcagaaatgggttgagctgactgacaaactcaactcccgttccagccaaattgaccaagctattgttaagagcacccagtaccaggaactgctccaggacttatcagagaaggtgagggcagttggacaacggctgagtgtccagtcagctatcagcacccaaccagaggctgtaaagcagcaattggaagagaccagtgaaattcgatctgacttggagcagttagaccacgaggttaaggaggctcagacactgtgcgatgaactctcagtgctcattggtgagcagtacctcaaggatgaactgaagaagcgtttggagacagttgccctgcctctccaaggtttagaagaccttgcagccgatcgcattaacagactccaggcagctcttgccagcacccagcagttccagcaaatgtttgatgagttgaggacctggttggatgataaacaaagccagcaagcaaaaaactgcccaatttctgcaaaattggagcggctacagtctcagctacaggagaatgaagagtttcagaaaagtcttaatcaacacagtggctcctatgaggtgattgtggctgaaggggaatctctacttctttctgtacctcctggagaagagaaaaggactctacaaaaccagttggttgagctcaaaaaccattgggaagagcttagtaaaaaaactgcagacagacaatccaggctcaaggattgtatgcagaaagctcagaaatatcagtggcatgtggaagaccttgtgccatggatagaagattgtaaagctaagatgtctgagttgcgagtcactctggatccagtgcagctagagtccagtctcctaagatcaaaggctatgctgaatgaggtggagaagcgccgctccctgctggaaatattgaatagtgctgctgacattctgatcaattcttcagaagcagatgaggatggaatccgggatgagaaggctgggatcaaccagaacatggatgctgttacagaagagctgcaggccaaaacagggtcactcgaagaaatgactcagaggctcagggagttccaggaaagctttaagaatattgaaaagaaggttgaaggagccaaacaccaacttgagatctttgatgctctgggttctcaagcctgtagcaacaagaacctggagaagctaagagctcaacaggaagtgctgcaggccctagagcctcaggtagactatctgaggaactttactcagggtctggtagaagatgccccagatggatctgatgcttctcaacttctccaccaagctgaggtcgcccagcaagagttcctcgaagttaagcaaagagtgaacagtggttgtgtgatgatggaaaacaagctggaggggattggccagtttcactgccgggtccgagagatgttctctcaattggcagacctggatgatgagctagatggcatgggtgctattggcagagacactgatagcctccagtcccaaatcgaggatgtccggctattccttaacaaaattcacgtcctcaaattagacatagaggcctctgaagcagagtgtcgacatatgctagaagaagaggggactctggatttgttaggtctcaaaagggagctagaagccctgaacaaacagtgtggcaaactgacagagagggggaaagctcgtcaggaacagctggaactgacactaggccgtgtagaggacttctacaggaaattgaaaggactcaatgacgcgaccacagcagcagaggaggcagaggccctccagtgggtagtggggaccgaagtggaaatcatcaaccaacaattagcagattttaaaatgtttcagaaagaacaagtggatcctcttcagatgaaattgcagcaggtgaatggacttggccagggattaattcagagtgcaggaaaagactgtgatgtacagggtttagaacatgacatggaagagatcaatgctcgatggaatacattgaataaaaaggtcgcacaaagaattgcacagctacaggaagctttgttgcattgtgggaagtttcaagatgccttggagccattgctcagctggttggcagataccgaggagctcatagccaatcagaaacctccatctgctgagtataaagtggtgaaagcacagatccaagaacagaagttgctccagcggctcctagatgatcgaaaggccacagtagacatgcttcaagcagaaggaggcagaatagcccagtcagcagagctggctgatagagagaaaatcactggacagctggagagtcttgaaagtagatggactgaactactcagtaaggcagcagccaggcaaaaacagctggaagacatcctggttctggccaaacagttccatgagacagctgagcctatttctgacttcttatctgtcacagagaaaaagcttgctaactcagaacctgttggcactcagactgccaaaatacagcagcagatcattcggcacaaggctctggaagaagacatagaaaaccatgcaacagatgtgcaccaggcagtcaaaattgggcagtccctctcctccctgacatctcctgcagaacagggtgtgctgtcagaaaagatagactcattgcaggcccgatacagtgaaattcaagaccgctgttgtcggaaggcagccctacttgaccaagctctgtctaatgctaggctgtttggggaggatgaggtggaggtgctcaactggctggctgaggttgaggacaagctcagttcagtgttcgtaaaggatttcaaacaggatgtcctgcacaggcagcatgctgaccacctggctttaaatgaagaaattgttaatagaaagaagaatgtagatcaagctattaaaaatggtcaggctcttctaaaacaaaccacaggtgaggaggtgttacttatccaggaaaaactagatggtataaagactcgttacgcagacatcacagttactagctccaaggccctcagaactttagagcaagcccggcagctggccaccaagttccagtctacttatgaggaactgaccgggtggctgagggaggtggaggaggagctggcaaccagtggaggacagtctcccacaggggaacagataccccagtttcagcagagacagaaggaattaaagaaggaggtcatggagcacaggctggtgttggacacagtgaatgaggtgagccgtgctctcttagagctggtgccctggagagccagagaagggctggataaacttgtgtccgatgctaacgagcagtacaaactagtcagtgacactattggacaaagggtggatgaaattgatgctgctattcagagatcacaacagtatgagcaagctgccgatgcagaactagcttgggttgctgaaacaaaacggaaactgatggctctgggtccaattcgcctggaacaggaccagaccacagctcagcttcaggtacagaaggctttctccattgacattattcgacacaaagattcaatggatgaactcttcagtcaccgtagtgaaatctttggcacatgtggggaggagcaaaaaactgtattacaggaaaagacagagtctctaatacagcaatatgaagccattagcctactcaattcagagcgttatgcccgcctagagcgggcccaggtcttagtaaaccagttttgggaaacttatgaagagctcagcccctggattgaggaaactcgggcactaatagcacagttaccctctccagccattgatcatgagcagctcaggcagcaacaagaggaaatgaggcaattaagggaatctattgctgaacacaaacctcatattgacaaactactaaagataggcccacaactaaaggaattaaaccctgaggaaggggaaatggtggaagaaaaataccagaaagcagaaaacatgtatgcccaaataaaggaggaggtgcgccagcgagccctggctctggatgaagccgtgtcccagtccacacagattacagagtttcatgataaaattgagcctatgttggagacactggagaatctttcctctcgcctgcgtatgccaccactgatccctgctgaagtagacaagatcagagagtgcatcagtgacaataagagtgccaccgtggagctagaaaaactgcagccatcctttgaggccttgaagcgccgtggagaggagcttattggacgatctcagggagcagacaaggatctggctgcaaaagaaatccaggataaattggatcaaatggtattcttctgggaggacatcaaagctcgggctgaagaacgagaaatcaaatttcttgatgtccttgaattagcagagaagttctggtatgacatggcagctctcctgaccaccatcaaagacacccaggatattgtccatgacttggaaagcccaggcattgatccttccatcatcaaacaacaggttgaagctgctgagactattaaggaagagacagatggtctgcatgaagagctggagtttattcggatccttggagcagatttgatttttgcctgtggagaaactgagaagcctgaagtgaggaagagcattgatgagatgaataatgcttgggagaacttaaacaaaacatggaaagagaggctagaaaaacttgaggatgctatgcaagctgctgtgcagtatcaggacactcttcaggctatgtttgactggctagataacactgtgattaaactctgcaccatgccccctgttggcactgacctcaatactgttaaagatcagttaaatgaaatgaaggagttcaaagtagaagtttaccaacagcaaattgagatggagaagcttaatcaccagggtgaactgatgttaaagaaagctactgatgagacggacagagacattatacgagaaccactgacagaactcaaacacctctgggagaacctgggtgagaaaattgcccaccgacagcacaaactagaaggggctctgttggcccttggtcagttccagcatgccttagaggaactaatgagttggctgactcataccgaagagttgttagatgctcagagaccaataagtggagacccaaaagtcattgaagttgagctcgcaaagcaccatgtcctaaaaaatgatgttttggctcatcaagccacagtggaaacagtcaacaaagctggcaatgagcttcttgaatccagtgctggagatgatgccagcagcttaaggagccgtttggaagccatgaaccaagactgtacgtcacatttagaggcagcgagagagtagcagaatccaggtctgagctccatatgccacagtgcccagcatcatatgctatgctggtatatagtctagtggctgtcagttcaatggagagccagctttctgcatctaagcccacaggaggacttcctgaaactgctagggaacagcttgatacacatatggaactctattcccagctgaaagccaaggaagagacttataatcaactacttgacaagggcagactcatgcttctaagccgtgacgactctgggtctggctccaagacagaacagagtgtagcacttttggagcagaagtggcatgtggtcagcagtaagatggaagaaagaaagtcaaagctggaagaggccctcaacttggcaacagaattccagaattccctacaagaatttatcaactggctcactctagcagagcagagtttaaacatcgcttctccaccaagcctgattctaaatactgtcctttcccagatagaagagcacaaggtttttgctaatgaagtaaatgctcatcgagaccagatcattgagctggatcaaactgggaatcaattaaagttccttagccaaaagcaggatgttgttctgatcaagaatttgttggtgagcgtgcagtctcgatgggagaaggttgtccagcgatctattgaaagagggcgatcactagatgatgccaggaagcgggcaaaacaattccatgaagcttggaaaaaactgattgactggctagaagatgcagagagtcacctggactcagaactagagatatccaatgacccagacaaaattaaacttcagctttctaagcataaggagtttcagaagactcttggtggcaagcagcctgtgtatgataccacaattagaactggcagagcactgaaagaaaagactttgcttcccgaagatactcagaaacttgacaatttcctaggagaagtcagagacaaatgggatactgtttgtggcaagtctgtggagcggcagcacaagttggaggaagccctgctcttttcgggtcagttcatggatgctttgcaggcattggttgactggttatacaaggtggagccacagctggctgaggaccagcccgtgcacggggaccttgacctcgtcatgaacctcatggatgcacacaaggttttccagaaggaactgggaaagcgaacaggaaccgttcaggtcctgaagcggtcaggccgagagctgattgagaatagtcgagatgacaccacttgggtaaaaggacagctccaggaactgagcactcgctgggacactgtctgtaaactctctgtttccaaacaaagccggcttgagcaggccttaaaacaagcggaagtgtttcgagacacagtccacatgctgttggagtggctttctgaagcagagcaaacgcttcgctttcggggagcacttcctgatgacacagaggccctgcagtctctcattgacacccataaggaattcatgaagaaagtagaagaaaagcgagtggacgttaactcagcagtagccatgggagaagtcatcctggctgtctgccaccccgattgcatcacaaccatcaaacactggatcaccatcatccgagctcgcttcgaggaggtcctgacatgggctaagcagcaccagcagcgtcttgaaacggccttgtcagaactggtggctaatgctgagctcctggaagaacttctggcatggatccagtgggctgagaccaccctcattcagcgggatcaggagccaatcccgcagaacattgaccgagttaaagcccttatcgctgagcatcagacatttatggaggagatgactcgcaaacagcctgacgtggaccgggtcaccaagacatacaaaaggaaaaacatagagcctactcacgcgcctttcatagagaaatcccgcagcggaggcaggaaatccctaagtcagccaacccctcctcccatgccaatcctttcacagtctgaagcaaaaaacccacggatcaaccagctttctgcccgctggcagcaggtgtggctgttagcactggagcggcaaaggaaactgaatgatgccttggatcggctggaggagttgaaagaatttgccaactttgactttgatgtctggaggaaaaagtatatgcgttggatgaatcacaaaaagtctcgagtgatggatttcttccggcgcattgataaggaccaggatgggaagataacacgtcaggagtttatcgatggcattttagcatccaagttccccaccaccaagttagagatgactgctgtggctgacattttcgaccgagatggggatggttacattgattattatgaatttgtggctgctcttcatcccaacaaggatgcgtatcgaccaacaaccgatgcagataaaatcgaagatgaggttacaagacaagtggctcagtgcaaatgtgcaaaaaggtttcaggtggagcagatcggagagaataaataccggtttggggattctcagcagttgcggctggtccgtattctgcgcagcaccgtgatggttcgcgttggtggaggatggatggccttggatgaatttttagtgaaaaatgatccctgccgagcacgaggtagaactaacattgaacttagagagaaattcatcctaccagagggagcatcccagggaatgacccccttccgctcacggggtcgaaggtccaaaccatcttcccgggcagcttcccctactcgttccagctccagtgctagtcagagtaaccacagctgtacatccatgccatcttctccagccaccccagccagtggaaccaagacttcacttcagttctctcgctgttatgacaaaccctggttggtaaacagtaaagctggcacccctatcagggacagccattctcctgacctccagctgcccacccccgaggttatcccatcatcaggtagcaagttgaaacgaccaacaccaacttttcattctagtcggacatcccttgctggtgataccagcaatagttcttccccggcctccacaggtgccaaaactaatcgggcagaccctaaaaagtctgccagtcgccctgggagtcgggctgggagtcgagccgggagtcgagccagcagccggcgaggaagtgacgcttctgactttgacctcttagagacgcagtctgcttgttccgacacttcagaaagcagcgctgcagggggccaaggcaactccaggagagggctaaacaaaccttccaaaatcccaaccatgtctaagaagaccaccactgcctcccccaggactccaggtcccaagcgataacactgtctaagcacccccaagccactatccactttgaatcctgctccatacattgggtgtatatttattctgaacgggagaagttatattgttaaaagtgtaaaagaataattgtgttatgaagctgccttattttttttctttttgtaagttactattttcatgtgaatatttatgtagataaaatttgcctcctggtaaccctgtaatggatggggcccagaaatgaaatatttgagaaaaacaagtgaaaaggtcaagatacaaatgtgtattaaaaaaaaaaaagcctattaatagggtttctgcgcggtgcagggttgtaaacctgctttatcttttaggattattcctaaatgcatcttctttataaacttgacttgctatctcagcaagataaattatattaaaaaaataagaatcctgcagtgtttaaggaactctttttttgtaaatcacggacacctcaattagcaagaactgaggggagggctttttccattgtttaatgttttgtgatttttagctaaagagagggaacctcatctaagtaacatttgcacatgatacagcaaaaggagttcattgcaatactgtctttggatattgtttcagtactgggtgtttaaaggacaaatagctgctagaattcaggggtaaatgtaagtgttcagaaaacgtcagaacatttggggttttaaactgatttgttgctccctatccagcctagacaccagtaactcttgtgttcaccaggacccagacccttggcaagggataggctcgttggtgacattgtgaatttcagatttgttttatccactttttttgctatttatttaaatggtcgatcaacttcccacaaactgaggaatgaattccacgagcctgttctgaaaatgtggacgtaagacaaacacgtgctcgtcctttaatggagttcaccagcacacttgttaaccagtcctgtttgctttcgtctttttttgtgcgtaataaagtcaactgaccaagtgaccatgaaaaggggctgtctggggctcctgttttttagctgctgttcttcagctccgaccatgttgctgtgtgattatctcaattggttttaattgaggcagaaactgaagctctaccaatgaactgtttagaaacaagacacacttttgtattaaaattgcttgcagtaacaaa

SEQ ID NO: 367611 - DNA, 18988 bp, Homo sapiens
  misc_feature (995)..(995): n is a, c, g, or t
  misc_feature (1066)..(1066): n is a, c, g, or t
  misc_feature (1076)..(1076): n is a, c, g, or t
  misc_feature (15881)..(15881): n is a, c, g, or t
  misc_feature (16056)..(16056): n is a, c, g, or t
  misc_feature (16254)..(16254): n is a, c, g, or t
tcaaaacaccatctattaaagctgacaattgtcacaagcagaattgaatactcaaagggaagttaacttcacacagaaaaacacttcatatttcattcaacttgcaacgtatttactgagcgtctaccgtgtgtaaggcagcctgctaggaaatggggtacgaccctcctcctcacagagcttacattctgacaggggaacccgaagtgaacaagcatgatctgcaacaggtatgagatgtcaagaaagcctattacagaggcacccaggcccagtctacggggtcactaaaggctatgggataaactgatctgaaggatgagcacaaatcaatcatcgagaggctgagagcagctcaagtcgggggaataagatgtgcgagaagcaggagagagcaggatgaaataaaatcaggcccgtgtgatgcgtggtgaacagtgagtacccagagaagcgaagctgggggctgaggggctggtcaggaacacgggcttaattcatcaacccaacagcaaacatcagtgcaacaatgtaagcacatttaccttctgggtcataatgtaatttcttccaaagccagtggtggcactcagatatttgatcagaggattgacagattcaggcttttggtggaaaagccatacctggaaaggaaggatgtgtcaatgatttgtttcttctgcccaaggtgagtgaggctggtggagagtcactatctgcactttatagagctccccagacaaattataaacatcctctcaaatatcatcagtgaatggtttggcaaatatattgagaaccaattaaaatatagtttaaaagcacttgcttctacaaccaatttgtattcccacaataaatgtatttatttctgtaacacttaccaaaacaagagcatcaaagccaattccttcacactgccctccctcccacctgctcttcatgaggagtcctttattcctgcatgtttcctgttctttgggccggaattccgnggcgcgatgtcggctcactacaacctctgcctcctggattcaagcaattctgtacctcagcctcccgagtngctgtgattncagatgaacgggaccgggttcagaagaaaacgttcaccaagtgggtcaacaagcacttaatgaaggtccgcaagcacatcaatgatctttatgaagatctgcgggatggccataacctgatctctctgttggaggtcctctcaggcatcaaactgccccgggagaagggcaggatgcgttttcataggctgcagaatgtgcagattgccctggacttcctaaagcagcgacaggtgaaactagtgaatattcgcaatgatgacatcacagatggcaaccccaagttgaccctgggtctgatctggaccattattttgcatttccagatctctgacatctacattagtggagaatcaggggatatgtcagccaaggagaaactactcctgtggacccagaaggtgacagctggttacacaggaatcaaatgcaccaacttttcctcctgctggagtgatgggaagatgttcaatgcactcattcaccgataccgacccgatctagtagacatggagagggtgcaaatccaaagtaaccgagagaatctggaacaagcttttgaagtggcagaaagactgggggtcactcgcctgctggatgcagaagatgtggatgtgccatctccagatgaaaagtctgtaatcacttatgtgtcttcgatttatgatgccttccctaaagttcctgagggtggagaagggatcagtgctacggaagtggactccaggtggcaagaataccaaagccgagtggactccctcattccctggatcaaacagcatacaatactgatgtcagataaaacttttccccaaaaccctgttgaactaaaggcactttataaccaatatatacacttcaaagaaacagaaattctggccaaggagagagaaaaaggaagaattgaggaattatataaattactagaggtgtggattgaatttggccgaattaaactgcctcaaggttatcaccctaatgatgtggaagaagagtggggaaagctcatcatagagatgctggaacgagagaaatcacttcggccggctgtggagaggctggaattgctgctacagattgcaaacaaaatccagaatggtgctttgaactgtgaagaaaaactgacactagctaagaatacactgcaggctgatgctgctcacctggaatcaggacaaccggtacaatgtgagtcagatgtcattatgtacattcaagagtgtgaaggtctcatcaggcagctgcaggtggatctccagatcctgcgggatgagaattactaccagctagaagagctggcttttagggtcatgcgtcttcaggatgagctggtcaccttgcgtctagagtgtacaaacctgtaccggaagggtcatttcacttcacttgaattggttccaccctctactttaaccaccactcatctgaaagcagaacccttaaccaaggcaacccattcttcttctacctcctggttccgaaagcctatgactcgggctgaacttgggccatcagctcctctgaagatgaaggcaatctccgatttgtgtatgaactactgtctttgggtagaagagatgcagatgaaactggagcgagcagagtggggcaatgacctgcctagtgtggagttgcagctagaaacacagcagcacatccatacgagtgtagaagagctgggctcaagtgtcaaggaggccaggttgtatgagggaaagatgtcccagaatttccataccagctatgctgaaactcttggaaagctggagacacagtattgtaaattgaaggaaacttctagcttccggatgaggcaccttcagagcctgcataaatttgtttccagagctacagctgagttgatctggttgaatgagaaggaggaggaggaactagcatatgactggagtgacaacaattccaatatctcagccaagagaaattacttctctgagttgacaatggaactggaggagaaacaggatgtgtttcgttctctacaagatacagcagaactactttcacttgagaaccacccagccaagcagacagtggaggcttacagtgctgctgtccagtcccagttgcagtggatgaagcagctgtgcctgtgtgttgagcagcatgtgaaagagaatactgcttattttcagttcttcagtgatgcacgagagctggagtcattcttgaggaacctccaagattccattaaacgaaaatattcctgtgaccacaacaccagcttatcccgccttgaagacctgctccaggactccatggatgaaaaggagcagcttatacagtccaagagttccgttgccagtctcgttgggagatcaaaaaccatcgttcagctaaaaccacgcagtccagaccatgtgttaaagaacaccatttctgtcaaggctgtctgtgactacaggcagatcgagattactatttgcaaaaatgatgaatgtgtgctagaagataattctcagcggaccaaatggaaagtgatcagccccacagggaacgaggcaatggtgccgtcagtctgcttcctcatccccccacccaataaggatgccattgagatggccagcagggtcgaacaatcttatcagaaggttatggccctttggcatcagctgcatgttaacaccaaaagccttatctcttggaactatctgcgtaaagaccttgaccttgtacagacctggaacctagaaaagcttcgatcctcagcaccaggggagtgccatcagattatgaagaaccttcaggcccactatgaagactttctgcaggatagtcgtgactctgtgctgttctcagtggctgatcgcttgcgcttggaagaggaggtggaagcttgtaaagcccgcttccagcacctgatgaagtccatggagaatgaggacaaagaggagactgtggccaagatgtacatttcagagttgaagaacatccggctacgcctggaggagtatgaacagagggtggtcaaacgaattcagtctctagccagctctaggactgacagagatgcctggcaggacaatgcattaaggattgcagagcaagagcacacccaggaggatttacagcaattgaggtcagacttggatgcagtttctatgaaatgtgacagctttctccatcagtctccatctagttcaagtgtcccaactctgcgctcagaactgaatctgctggtggagaagatggaccatgtctatggtctctctactgtatatctgaataagttaaagacagttgatgttatagtacgtagcatacaggatgctgaactcttggtcaaaggttatgagattaagctgagtcaagaagaagtagtactggcagatctctcagctctggaggcccattggtcgacattacggcactggcttagtgatgtgaaggacaagaattcagtgttttcagtcctggatgaggaaattgccaaggccaaggtagtggcagagcagatgagtcgtctgacaccagagcgaaatctggatttggagcgctatcaggaaaaaggctcccagctgcaggagcgttggcaccgagtcattgcccagctcgagattcgccaatctgagctagaaagtatccaggaagttctgggagattaccgagcctgccatggaactctcatcaagtggattgaggaaaccactgcccagcaggaaatgatgaagccaggccaggcagaggatagcagagtgctttcggagcagctcagccagcagacggccctatttgcagaaattgagagaaatcagacaaaactggatcaatgtcaaaaattttcccagcagtactctactattgtaaaggactatgaattgcaactgatgacatacaaggcctttgtggaatcgcagcagaaatcccctggcaagcgccgtcgcatgctttcctcttcagatgccatcactcaagagttcatggacttaaggactcgctacacggcattggtgactttaacaactcagcacgtgaaatacatcagtgatgcactccggcgtctggaggaggaggagaaagtggtagaagaggagaaacaagaacatgtggagaaggttaaagaacttttgggctgggtgtctaccctagcgaggaatacacaaggaaaagctacctcatccgagaccaaagaatcaacagacattgaaaaagctattttggaacagcaggttctgtcagaagagctgacaacaaagaaagaacaagtctctgaagctattaaaacatcacagatcttcttggccaagcatggtcataagctctcagaaaaagagaagaaacaaatatctgagcaattgaatgccctaaacaaggcttaccatgacctttgtgatggttctgcaaatcagcttcagcagcttcagagccagttggctcaccagacagaacaaaagaccctgcagaaacaacaaaatacctgtcaccagcaactggaggatctttgcagttgggtaggacaggcagaaagagcactggcaggccaccaaggcagaaccacccagcaggatctctctgctttgcagaagaaccaaagtgacttgaaggatttacaggatgacattcagaatcgtgccacctcatttgccactgttgtcaaggacattgaggggttcatggaagagaatcagaccaagctgagcccacgtgagttgacagctcttcgggaaaagcttcatcaggctaaggagcaatatgaggcgctccaggaagagacacgtgtggcccagaaggaactggaggaagcagtgacctccgccttacagcaggagactgaaaagagtaaagcagcaaaggaactggcagagaacaagaagaagatcgatgctctcctggattgggtaacttcagtaggatcatctggtggacagctgctgaccaaccttccaggaatggagcagctctcgggagctagcttggagaaaggagccttggacaccactgatggttacatgggggtgaatcaagccccagagaaactggacaagcaatgtgagatgatgaaggcccgtcaccaagaattgctgtcccagcagcaaaatttcattctggccacccagtcagctcaggccttcttggatcagcatggccacaatctcacacctgaggagcaacagatgctgcaacagaagctgggagagctaaaggaacaatactctacttccctggcccaatcagaggcagaactgaagcaggtgcagacacttcaggatgagttgcagaaatttctgcaggatcataaagagtttgaaagctggttggaacgatccgagaaagagctggagaacatgcataagggaggcagcagccccgagacccttccctccctgctaaagcggcaaggaagcttctcagaggatgtcatttcccacaaaggagacttgagatttgtgactatctcaggacagaaagtcttggacatggaaaacagttttaaggaaggcaaagaaccatcagaaattggaaacttagtaaaggacaagttgaaggatgcaacagaaagatacactgctctccactcaaagtgtacacgattaggatctcacctgaatatgctgttaggccagtatcatcaattccaaaacagtgctgacagcctgcaggcctggatgcaggcttgtgaggccaacgtggagaagctcctctcagatactgttgcctctgaccctggagttctccaggagcagcttgcaacaacaaagcagttgcaggaggaattggctgagcaccaagtacctgtggaaaaactccaaaaagtagctcgtgacataatggaaattgaaggggagccagccccagaccacaggcatgttcaagaaactacagattccatactcagccacttccaaagcctctcctatagcctggctgagcgatcttctctgctgcagaaagcaattgcccaatctcagagtgtccaggaaagcctggagagcctgttgcagtctattggggaagttgaacaaaacctggaagggaagcaggtgtcatcactctcatcaggagtcatccaggaagccttagccacaaatatgaaattgaagcaggacattgctcggcaaaagagcagcttggaggccacccgtgagatggtgacccgattcatggagacagcagacagtactacagcagcagtgctgcagggcaaactggcagaggtgagccagcggttcgaacagctctgtctacagcagcaagaaaaggagagctccctaaagaagcttctaccccaggcagagatgtttgaacacctctctggtaagctgcagcagttcatggaaaacaaaagtcggatgctggcctctggaaatcagccagatcaagatattacacatttcttccaacagatccaggagctcaatttggaaatggaagaccaacaggagaacctagatactcttgagcacctggtcactgaactgagctcttgtggctttgcgctggacttgtgccagcatcaggacagggtacagaatctaagaaaagacttcacagagctacagaagacagttaaagagagagagaaagatgcatcatcttgccaggaacagttggatgaattccggaagctggtcaggaccttccagaaatggttgaaagaaactgaagggagtattccacctacggaaacttctatgagtgctaaagagttagaaaagcagattgaacacctgaagagtctactagatgactgggcaagtaagggaactctggtggaagaaatcaattgcaaaggtacttctttagaaaatctcatcatggaaatcacagcacctgattcccaaggcaagacagatctgacggagatccagtgtgacatgtcagatgtaaacttgaagtatgagaaactagggggagtacttcatgaacgccaggaaagccttcaggctatcctcaacagaatggaggaggttcacaaggaggcaaactctgtgctgcagtggctggaatcaaaagaggaagtcctgaaatccatggatgccatgtcatctccaaccaagacagaaacagtgaaagcccaagctgaatctaacaaggccttcctggctgagttggaacagaattctccaaaaattcaaaaagtaaaggaagccctggctggattactggtgacatatcccaactcacaggaagcagaaaattggaagaaaattcaggaagaactcaattcccgatgggaaagggccactgaggttactgtggctcggcaaaggcagctagaggaatctgcaagtcatctggcctgcttccaggctgcagaatcccagctccggccgtggctgatggagaaagaactgatgatgggagtgctggggcccctgtctattgaccccaacatgttgaatgcacaaaagcaacaggtccagtttatgctaaaggaatttgaagcacgcaggcaacagcatgagcaactgaatgaggcagctcagggcatcctaacaggccctggagatgtctctctgtccaccagccaagtacagaaagaactccagagcatcaatcagaaatgggttgagctgactgacaaactcaactcccgttccagccaaattgaccaagctattgttaagagcacccagtaccaggaactgctccaggacttatcagagaaggtgagggcagttggacaacggctgagtgtccagtcagctatcagcacccaaccagaggctgtaaagcagcaattggaagagaccagtgaaattcgatctgacttggagcagttagaccacgaggttaaggaggctcagacactgtgcgatgaactctcagtgctcattggtgagcagtacctcaaggatgaactgaagaagcgtttggagacagttgccctgcctctccaaggtttagaagaccttgcagccgatcgcattaacagactccaggcagctcttgccagcacccagcagttccagcaaatgtttgatgagttgaggacctggttggatgataaacaaagccagcaagcaaaaaactgcccaatttctgcaaaattggagcggctacagtctcagctacaggagaatgaagagtttcagaaaagtcttaatcaacacagtggctcctatgaggtgattgtggctgaaggggaatctctacttctttctgtacctcctggagaagagaaaaggactctacaaaaccagttggttgagctcaaaaaccattgggaagagcttagtaaaaaaactgcagacagacaatccaggctcaaggattgtatgcagaaagctcagaaatatcagtggcatgtggaagaccttgtgccatggatagaagattgtaaagctaagatgtctgagttgcgagtcactctggatccagtgcagctagagtccagtctcctaagatcaaaggctatgctgaatgaggtggagaagcgccgctccctgctggaaatattgaatagtgctgctgacattctgatcaattcttcagaagcagatgaggatggaatccgggatgagaaggctgggatcaaccagaacatggatgctgttacagaagagctgcaggccaaaacagggtcactcgaagaaatgactcagaggctcagggagttccaggaaagctttaagaatattgaaaagaaggttgaaggagccaaacaccaacttgagatctttgatgctctgggttctcaagcctgtagcaacaagaacctggagaagctaagagctcaacaggaagtgctgcaggccctagagcctcaggtagactatctgaggaactttactcagggtctggtagaagatgccccagatggatctgatgcttctcaacttctccaccaagctgaggtcgcccagcaagagttcctcgaagttaagcaaagagtgaacagtggttgtgtgatgatggaaaacaagctggaggggattggccagtttcactgccgggtccgagagatgttctctcaattggcagacctggatgatgagctagatggcatgggtgctattggcagagacactgatagcctccagtcccaaatcgaggatgtccggctattccttaacaaaattcacgtcctcaaattagacatagaggcctctgaagcagagtgtcgacatatgctagaagaagaggggactctggatttgttaggtctcaaaagggagctagaagccctgaacaaacagtgtggcaaactgacagagagggggaaagctcgtcaggaacagctggaactgacactaggccgtgtagaggacttctacaggaaattgaaaggactcaatgacgcgaccacagcagcagaggaggcagaggccctccagtgggtagtggggaccgaagtggaaatcatcaaccaacaattagcagattttaaaatgtttcagaaagaacaagtggatcctcttcagatgaaattgcagcaggtgaatggacttggccagggattaattcagagtgcaggaaaagactgtgatgtacagggtttagaacatgacatggaagagatcaatgctcgatggaatacattgaataaaaaggtcgcacaaagaattgcacagctacaggaagctttgttgcattgtgggaagtttcaagatgccttggagccattgctcagctggttggcagataccgaggagctcatagccaatcagaaacctccatctgctgagtataaagtggtgaaagcacagatccaagaacagaagttgctccagcggctcctagatgatcgaaaggccacagtagacatgcttcaagcagaaggaggcagaatagcccagtcagcagagctggctgatagagagaaaatcactggacagctggagagtcttgaaagtagatggactgaactactcagtaaggcagcagccaggcaaaaacagctggaagacatcctggttctggccaaacagttccatgagacagctgagcctatttctgacttcttatctgtcacagagaaaaagcttgctaactcagaacctgttggcactcagactgccaaaatacagcagcagatcattcggcacaaggctctggaagaagacatagaaaaccatgcaacagatgtgcaccaggcagtcaaaattgggcagtccctctcctccctgacatctcctgcagaacagggtgtgctgtcagaaaagatagactcattgcaggcccgatacagtgaaattcaagaccgctgttgtcggaaggcagccctacttgaccaagctctgtctaatgctaggctgtttggggaggatgaggtggaggtgctcaactggctggctgaggttgaggacaagctcagttcagtgttcgtaaaggatttcaaacaggatgtcctgcacaggcagcatgctgaccacctggctttaaatgaagaaattgttaatagaaagaagaatgtagatcaagctattaaaaatggtcaggctcttctaaaacaaaccacaggtgaggaggtgttacttatccaggaaaaactagatggtataaagactcgttacgcagacatcacagttactagctccaaggccctcagaactttagagcaagcccggcagctggccaccaagttccagtctacttatgaggaactgaccgggtggctgagggaggtggaggaggagctggcaaccagtggaggacagtctcccacaggggaacagataccccagtttcagcagagacagaaggaattaaagaaggaggtcatggagcacaggctggtgttggacacagtgaatgaggtgagccgtgctctcttagagctggtgccctggagagccagagaagggctggataaacttgtgtccgatgctaacgagcagtacaaactagtcagtgacactattggacaaagggtggatgaaattgatgctgctattcagagatcacaacagtatgagcaagctgccgatgcagaactagcttgggttgctgaaacaaaacggaaactgatggctctgggtccaattcgcctggaacaggaccagaccacagctcagcttcaggtacagaaggctttctccattgacattattcgacacaaagattcaatggatgaactcttcagtcaccgtagtgaaatctttggcacatgtggggaggagcaaaaaactgtattacaggaaaagacagagtctctaatacagcaatatgaagccattagcctactcaattcagagcgttatgcccgcctagagcgggcccaggtcttagtaaaccagttttgggaaacttatgaagagctcagcccctggattgaggaaactcgggcactaatagcacagttaccctctccagccattgatcatgagcagctcaggcagcaacaagaggaaatgaggcaattaagggaatctattgctgaacacaaacctcatattgacaaactactaaagataggcccacaactaaaggaattaaaccctgaggaaggggaaatggtggaagaaaaataccagaaagcagaaaacatgtatgcccaaataaaggaggaggtgcgccagcgagccctggctctggatgaagccgtgtcccagtccacacagattacagagtttcatgataaaattgagcctatgttggagacactggagaatctttcctctcgcctgcgtatgccaccactgatccctgctgaagtagacaagatcagagagtgcatcagtgacaataagagtgccaccgtggagctagaaaaactgcagccatcctttgaggccttgaagcgccgtggagaggagcttattggacgatctcagggagcagacaaggatctggctgcaaaagaaatccaggataaattggatcaaatggtattcttctgggaggacatcaaagctcgggctgaagaacgagaaatcaaatttcttgatgtccttgaattagcagagaagttctggtatgacatggcagctctcctgaccaccatcaaagacacccaggatattgtccatgacttggaaagcccaggcattgatccttccatcatcaaacaacaggttgaagctgctgagactattaaggaagagacagatggtctgcatgaagagctggagtttattcggatccttggagcagatttgatttttgcctgtggagaaactgagaagcctgaagtgaggaagagcattgatgagatgaataatgcttgggagaacttaaacaaaacatggaaagagaggctagaaaaacttgaggatgctatgcaagctgctgtgcagtatcaggacactcttcaggctatgtttgactggctagataacactgtgattaaactctgcaccatgccccctgttggcactgacctcaatactgttaaagatcagttaaatgaaatgaaggagttcaaagtagaagtttaccaacagcaaattgagatggagaagcttaatcaccagggtgaactgatgttaaagaaagctactgatgagacggacagagacattatacgagaaccactgacagaactcaaacacctctgggagaacctgggtgagaaaattgcccaccgacagcacaaactagaaggggctctgttggcccttggtcagttccagcatgccttagaggaactaatgagttggctgactcataccgaagagttgttagatgctcagagaccaataagtggagacccaaaagtcattgaagttgagctcgcaaagcaccatgtcctaaaaaatgatgttttggctcatcaagccacagtggaaacagtcaacaaagctggcaatgagcttcttgaatccagtgctggagatgatgccagcagcttaaggagccgtttggaagccatgaaccaagactgtacgtcacatttagaggcagcgagagagtagcagaatccaggtctgagctccatatgccacagtgcccagcatcatatgctatgctggtatatagtctagtggctgtcagttcaatggagagccagctttctgcatctaagcccacaggaggacttcctgaaactgctagggaacagcttgatacacatatggaactctattcccagctgaaagccaaggaagagacttataatcaactacttgacaagggcagactcatgcttctaagccgtgacgactctgggtctggctccaagacagaacagagtgtagcacttttggagcagaagtggcatgtggtcagcagtaagatggaagaaagaaagtcaaagctggaagaggccctcaacttggcaacagaattccagaattccctacaagaatttatcaactggctcactctagcagagcagagtttaaacatcgcttctccaccaagcctgattctaaatactgtcctttcccagatagaagagcacaaggtttttgctaatgaagtaaatgctcatcgagaccagatcattgagctggatcaaactgggaatcaattaaagttccttagccaaaagcaggatgttgttctgatcaagaatttgttggtgagcgtgcagtctcgatgggagaaggttgtccagcgatctattgaaagagggcgatcactagatgatgccaggaagcgggcaaaacaattccatgaagcttggaaaaaactgattgactggctagaagatgcagagagtcacctggactcagaactagagatatccaatgacccagacaaaattaaacttcagctttctaagcataaggagtttcagaagactcttggtggcaagcagcctgtgtatgataccacaattagaactggcagagcactgaaagaaaagactttgcttcccgaagatactcagaaacttgacaatttcctaggagaagtcagagacaaatgggatactgtttgtggcaagtctgtggagcggcagcacaagttggaggaagccctgctcttttcgggtcagttcatggatgctttgcaggcattggttgactggttatacaaggtggagccacagctggctgaggaccagcccgtgcacggggaccttgacctcgtcatgaacctcatggatgcacacaaggttttccagaaggaactgggaaagcgaacaggaaccgttcaggtcctgaagcggtcaggccgagagctgattgagaatagtcgagatgacaccacttgggtaaaaggacagctccaggaactgagcactcgctgggacactgtctgtaaactctctgtttccaaacaaagccggcttgagcaggccttaaaacaagcggaagtgtttcgagacacagtccacatgctgttggagtggctttctgaagcagagcaaacgcttcgctttcggggagcacttcctgatgacacagaggccctgcagtctctcattgacacccataaggaattcatgaagaaagtagaagaaaagcgagtggacgttaactcagcagtagccatgggagaagtcatcctggctgtctgccaccccgattgcatcacaaccatcaaacactggatcaccatcatccgagctcgcttcgaggaggtcctgacatgggctaagcagcaccagcagcgtcttgaaacggccttgtcagaactggtggctaatgctgagctcctggaagaacttctggcatggatccagtgggctgagaccaccctcattcagcgggatcaggagccaatcccgcagaacattgaccgagttaaagcccttatcgctgagcatcagacatttatggaggagatgactcgcaaacagcctgacgtggaccgggtcaccaagacatacaaaaggaaaaacatagagcctactcacgcgcctttcatagagaaatcccgcagcggaggcagtatgtttccagccccctgtgttaggatgcttcattcctgctaattgaggatgagcactttccnaatgcctatcaaaaaaaattatattccattttcaaaaaccgtgttggttttgaaccaaaatctctcatttttgaaactcacttttcttacattgacagacagtagctgtactccatattctttggtatgattggtatgaaattacgaggtggttaagcttattttttaacagtgncctttccattgttttggttatcagccctagctgtttacatttggcttgtactaatttaatcaacacaacagcttctacagaatatgttgcttttttagttgagttaacgtgtcatcagctcactaaggtaggacagaattgcttggagatatgtaggcagcaggtaagtatgtgctgggaggatcagtacttttgganttagtacacctccgtatctaaatattgccaagtcccgtatttcttttctcagttattgactggatattattataaagatcttctaggtttatacatacagctatttctctttgtatactaaccagctgttctaatcttgtgattatttttccttttagggaaatccctaagtcagccaacccctcctcccatgccaatcctttcacagtctgaagcaaaaaacccacggatcaaccagctttctgcccgctggcagcaggtgtggctgttagcactggagcggcaaaggaaactgaatgatgccttggatcggctggaggagttgaaagaatttgccaactttgactttgatgtctggaggaaaaagtatatgcgttggatgaatcacaaaaagtctcgagtgatggatttcttccggcgcattgataaggaccaggatgggaagataacacgtcaggagtttatcgatggcattttagcatccaagttccccaccaccaagttagagatgactgctgtggctgacattttcgaccgagatggggatggttacattgattattatgaatttgtggctgctcttcatcccaacaaggatgcgtatcgaccaacaaccgatgcagataaaatcgaagatgaggttacaagacaagtggctcagtgcaaatgtgcaaaaaggtttcaggtggagcagatcggagagaataaataccggtttggggattctcagcagttgcggctggtccgtattctgcgcagcaccgtgatggttcgcgttggtggaggatggatggccttggatgaatttttagtgaaaaatgatccctgccgagcacgaggtagaactaacattgaacttagagagaaattcatcctaccagagggagcatcccagggaatgacccccttccgctcacggggtcgaaggtccaaaccatcttcccgggcagcttcccctactcgttccagctccagtgctagtcagagtaaccacagctgtacatccatgccatcttctccagccaccccagccagtggaaccaagacttcacttcagttctctcgctgttatgacaaaccctggttggtaaacagtaaagctggcacccctatcagggacagccattctcctgacctccagctgcccacccccgaggttatcccatcatcaggtagcaagttgaaacgaccaacaccaacttttcattctagtcggacatcccttgctggtgataccagcaatagttcttccccggcctccacaggtgccaaaactaatcgggcagaccctaaaaagtctgccagtcgccctgggagtcgggctgggagtcgagccgggagtcgagccagcagccggcgaggaagtgacgcttctgactttgacctcttagagacgcagtctgcttgttccgacacttcagaaagcagcgctgcagggggccaaggcaactccaggagagggctaaacaaaccttccaaaatcccaaccatgtctaagaagaccaccactgcctcccccaggactccaggtcccaagcgataacactgtctaagcacccccaagccactatccactttgaatcctgctccatacattgggtgtatatttattctgaacgggagaagttatattgttaaaagtgtaaaagaataattgtgttatgaagctgccttattttttttctttttgtaagttactattttcatgtgaatatttatgtagataaaatttgcctcctggtaaccctgtaatggatggggcccagaaatgaaatatttgagaaaaacaagtgaaaaggtcaagatacaaatgtgtattaaaaaaaaaaaagcctattaatagggtttctgcgcggtgcagggttgtaaacctgctttatcttttaggattattcctaaatgcatcttctttataaacttgacttgctatctcagcaagataaattatattaaaaaaataagaatcctgcagtgtttaaggaactctttttttgtaaatcacggacacctcaattagcaagaactgaggggagggctttttccattgtttaatgttttgtgatttttagctaaagagagggaacctcatctaagtaacatttgcacatgatacagcaaaaggagttcattgcaatactgtctttggatattgtttcagtactgggtgtttaaaggacaaatagctgctagaattcaggggtaaatgtaagtgttcagaaaacgtcagaacatttggggttttaaactgatttgttgctccctatccagcctagacaccagtaactcttgtgttcaccaggacccagacccttggcaagggataggctcgttggtgacattgtgaatttcagatttgttttatccactttttttgctatttatttaaatggtcgatcaacttcccacaaactgaggaatgaattccacgagcctgttctgaaaatgtggacgtaagacaaacacgtgctcgtcctttaatggagttcaccagcacacttgttaaccagtcctgtttgctttcgtctttttttgtgcgtaataaagtcaactgaccaagtgaccatgaaaaggggctgtctggggctcctgttttttagctgctgttcttcagctccgaccatgttgctgtgtgattatctcaattggttttaattgaggcagaaactgaagctctaccaatgaactgtttagaaacaagacacacttttgtattaaaattgcttgcagtaacaaa

SEQ ID NO: 367612 - DNA, 18369 bp, Homo sapiens
  misc_feature (995)..(995): n is a, c, g, or t
  misc_feature (1066)..(1066): n is a, c, g, or t
  misc_feature (1076)..(1076): n is a, c, g, or t
tcaaaacaccatctattaaagctgacaattgtcacaagcagaattgaatactcaaagggaagttaacttcacacagaaaaacacttcatatttcattcaacttgcaacgtatttactgagcgtctaccgtgtgtaaggcagcctgctaggaaatggggtacgaccctcctcctcacagagcttacattctgacaggggaacccgaagtgaacaagcatgatctgcaacaggtatgagatgtcaagaaagcctattacagaggcacccaggcccagtctacggggtcactaaaggctatgggataaactgatctgaaggatgagcacaaatcaatcatcgagaggctgagagcagctcaagtcgggggaataagatgtgcgagaagcaggagagagcaggatgaaataaaatcaggcccgtgtgatgcgtggtgaacagtgagtacccagagaagcgaagctgggggctgaggggctggtcaggaacacgggcttaattcatcaacccaacagcaaacatcagtgcaacaatgtaagcacatttaccttctgggtcataatgtaatttcttccaaagccagtggtggcactcagatatttgatcagaggattgacagattcaggcttttggtggaaaagccatacctggaaaggaaggatgtgtcaatgatttgtttcttctgcccaaggtgagtgaggctggtggagagtcactatctgcactttatagagctccccagacaaattataaacatcctctcaaatatcatcagtgaatggtttggcaaatatattgagaaccaattaaaatatagtttaaaagcacttgcttctacaaccaatttgtattcccacaataaatgtatttatttctgtaacacttaccaaaacaagagcatcaaagccaattccttcacactgccctccctcccacctgctcttcatgaggagtcctttattcctgcatgtttcctgttctttgggccggaattccgnggcgcgatgtcggctcactacaacctctgcctcctggattcaagcaattctgtacctcagcctcccgagtngctgtgattncagatgaacgggaccgggttcagaagaaaacgttcaccaagtgggtcaacaagcacttaatgaaggtccgcaagcacatcaatgatctttatgaagatctgcgggatggccataacctgatctctctgttggaggtcctctcaggcatcaaactgccccgggagaagggcaggatgcgttttcataggctgcagaatgtgcagattgccctggacttcctaaagcagcgacaggtgaaactagtgaatattcgcaatgatgacatcacagatggcaaccccaagttgaccctgggtctgatctggaccattattttgcatttccagatctctgacatctacattagtggagaatcaggggatatgtcagccaaggagaaactactcctgtggacccagaaggtgacagctggttacacaggaatcaaatgcaccaacttttcctcctgctggagtgatgggaagatgttcaatgcactcattcaccgataccgacccgatctagtagacatggagagggtgcaaatccaaagtaaccgagagaatctggaacaagcttttgaagtggcagaaagactgggggtcactcgcctgctggatgcagaagatgtggatgtgccatctccagatgaaaagtctgtaatcacttatgtgtcttcgatttatgatgccttccctaaagttcctgagggtggagaagggatcagtgctacggaagtggactccaggtggcaagaataccaaagccgagtggactccctcattccctggatcaaacagcatacaatactgatgtcagataaaacttttccccaaaaccctgttgaactaaaggcactttataaccaatatatacacttcaaagaaacagaaattctggccaaggagagagaaaaaggaagaattgaggaattatataaattactagaggtgtggattgaatttggccgaattaaactgcctcaaggttatcaccctaatgatgtggaagaagagtggggaaagctcatcatagagatgctggaacgagagaaatcacttcggccggctgtggagaggctggaattgctgctacagattgcaaacaaaatccagaatggtgctttgaactgtgaagaaaaactgacactagctaagaatacactgcaggctgatgctgctcacctggaatcaggacaaccggtacaatgtgagtcagatgtcattatgtacattcaagagtgtgaaggtctcatcaggcagctgcaggtggatctccagatcctgcgggatgagaattactaccagctagaagagctggcttttagggtcatgcgtcttcaggatgagctggtcaccttgcgtctagagtgtacaaacctgtaccggaagggtcatttcacttcacttgaattggttccaccctctactttaaccaccactcatctgaaagcagaacccttaaccaaggcaacccattcttcttctacctcctggttccgaaagcctatgactcgggctgaacttgggccatcagctcctctgaagatgaaggcaatctccgatttgtgtatgaactactgtctttgggtagaagagatgcagatgaaactggagcgagcagagtggggcaatgacctgcctagtgtggagttgcagctagaaacacagcagcacatccatacgagtgtagaagagctgggctcaagtgtcaaggaggccaggttgtatgagggaaagatgtcccagaatttccataccagctatgctgaaactcttggaaagctggagacacagtattgtaaattgaaggaaacttctagcttccggatgaggcaccttcagagcctgcataaatttgtttccagagctacagctgagttgatctggttgaatgagaaggaggaggaggaactagcatatgactggagtgacaacaattccaatatctcagccaagagaaattacttctctgagttgacaatggaactggaggagaaacaggatgtgtttcgttctctacaagatacagcagaactactttcacttgagaaccacccagccaagcagacagtggaggcttacagtgctgctgtccagtcccagttgcagtggatgaagcagctgtgcctgtgtgttgagcagcatgtgaaagagaatactgcttattttcagttcttcagtgatgcacgagagctggagtcattcttgaggaacctccaagattccattaaacgaaaatattcctgtgaccacaacaccagcttatcccgccttgaagacctgctccaggactccatggatgaaaaggagcagcttatacagtccaagagttccgttgccagtctcgttgggagatcaaaaaccatcgttcagctaaaaccacgcagtccagaccatgtgttaaagaacaccatttctgtcaaggctgtctgtgactacaggcagatcgagattactatttgcaaaaatgatgaatgtgtgctagaagataattctcagcggaccaaatggaaagtgatcagccccacagggaacgaggcaatggtgccgtcagtctgcttcctcatccccccacccaataaggatgccattgagatggccagcagggtcgaacaatcttatcagaaggttatggccctttggcatcagctgcatgttaacaccaaaagccttatctcttggaactatctgcgtaaagaccttgaccttgtacagacctggaacctagaaaagcttcgatcctcagcaccaggggagtgccatcagattatgaagaaccttcaggcccactatgaagactttctgcaggatagtcgtgactctgtgctgttctcagtggctgatcgcttgcgcttggaagaggaggtggaagcttgtaaagcccgcttccagcacctgatgaagtccatggagaatgaggacaaagaggagactgtggccaagatgtacatttcagagttgaagaacatccggctacgcctggaggagtatgaacagagggtggtcaaacgaattcagtctctagccagctctaggactgacagagatgcctggcaggacaatgcattaaggattgcagagcaagagcacacccaggaggatttacagcaattgaggtcagacttggatgcagtttctatgaaatgtgacagctttctccatcagtctccatctagttcaagtgtcccaactctgcgctcagaactgaatctgctggtggagaagatggaccatgtctatggtctctctactgtatatctgaataagttaaagacagttgatgttatagtacgtagcatacaggatgctgaactcttggtcaaaggttatgagattaagctgagtcaagaagaagtagtactggcagatctctcagctctggaggcccattggtcgacattacggcactggcttagtgatgtgaaggacaagaattcagtgttttcagtcctggatgaggaaattgccaaggccaaggtagtggcagagcagatgagtcgtctgacaccagagcgaaatctggatttggagcgctatcaggaaaaaggctcccagctgcaggagcgttggcaccgagtcattgcccagctcgagattcgccaatctgagctagaaagtatccaggaagttctgggagattaccgagcctgccatggaactctcatcaagtggattgaggaaaccactgcccagcaggaaatgatgaagccaggccaggcagaggatagcagagtgctttcggagcagctcagccagcagacggccctatttgcagaaattgagagaaatcagacaaaactggatcaatgtcaaaaattttcccagcagtactctactattgtaaaggactatgaattgcaactgatgacatacaaggcctttgtggaatcgcagcagaaatcccctggcaagcgccgtcgcatgctttcctcttcagatgccatcactcaagagttcatggacttaaggactcgctacacggcattggtgactttaacaactcagcacgtgaaatacatcagtgatgcactccggcgtctggaggaggaggagaaagtggtagaagaggagaaacaagaacatgtggagaaggttaaagaacttttgggctgggtgtctaccctagcgaggaatacacaaggaaaagctacctcatccgagaccaaagaatcaacagacattgaaaaagctattttggaacagcaggttctgtcagaagagctgacaacaaagaaagaacaagtctctgaagctattaaaacatcacagatcttcttggccaagcatggtcataagctctcagaaaaagagaagaaacaaatatctgagcaattgaatgccctaaacaaggcttaccatgacctttgtgatggttctgcaaatcagcttcagcagcttcagagccagttggctcaccagacagaacaaaagaccctgcagaaacaacaaaatacctgtcaccagcaactggaggatctttgcagttgggtaggacaggcagaaagagcactggcaggccaccaaggcagaaccacccagcaggatctctctgctttgcagaagaaccaaagtgacttgaaggatttacaggatgacattcagaatcgtgccacctcatttgccactgttgtcaaggacattgaggggttcatggaagagaatcagaccaagctgagcccacgtgagttgacagctcttcgggaaaagcttcatcaggctaaggagcaatatgaggcgctccaggaagagacacgtgtggcccagaaggaactggaggaagcagtgacctccgccttacagcaggagactgaaaagagtaaagcagcaaaggaactggcagagaacaagaagaagatcgatgctctcctggattgggtaacttcagtaggatcatctggtggacagctgctgaccaaccttccaggaatggagcagctctcgggagctagcttggagaaaggagccttggacaccactgatggttacatgggggtgaatcaagccccagagaaactggacaagcaatgtgagatgatgaaggcccgtcaccaagaattgctgtcccagcagcaaaatttcattctggccacccagtcagctcaggccttcttggatcagcatggccacaatctcacacctgaggagcaacagatgctgcaacagaagctgggagagctaaaggaacaatactctacttccctggcccaatcagaggcagaactgaagcaggtgcagacacttcaggatgagttgcagaaatttctgcaggatcataaagagtttgaaagctggttggaacgatccgagaaagagctggagaacatgcataagggaggcagcagccccgagacccttccctccctgctaaagcggcaaggaagcttctcagaggatgtcatttcccacaaaggagacttgagatttgtgactatctcaggacagaaagtcttggacatggaaaacagttttaaggaaggcaaagaaccatcagaaattggaaacttagtaaaggacaagttgaaggatgcaacagaaagatacactgctctccactcaaagtgtacacgattaggatctcacctgaatatgctgttaggccagtatcatcaattccaaaacagtgctgacagcctgcaggcctggatgcaggcttgtgaggccaacgtggagaagctcctctcagatactgttgcctctgaccctggagttctccaggagcagcttgcaacaacaaagcagttgcaggaggaattggctgagcaccaagtacctgtggaaaaactccaaaaagtagctcgtgacataatggaaattgaaggggagccagccccagaccacaggcatgttcaagaaactacagattccatactcagccacttccaaagcctctcctatagcctggctgagcgatcttctctgctgcagaaagcaattgcccaatctcagagtgtccaggaaagcctggagagcctgttgcagtctattggggaagttgaacaaaacctggaagggaagcaggtgtcatcactctcatcaggagtcatccaggaagccttagccacaaatatgaaattgaagcaggacattgctcggcaaaagagcagcttggaggccacccgtgagatggtgacccgattcatggagacagcagacagtactacagcagcagtgctgcagggcaaactggcagaggtgagccagcggttcgaacagctctgtctacagcagcaagaaaaggagagctccctaaagaagcttctaccccaggcagagatgtttgaacacctctctggtaagctgcagcagttcatggaaaacaaaagtcggatgctggcctctggaaatcagccagatcaagatattacacatttcttccaacagatccaggagctcaatttggaaatggaagaccaacaggagaacctagatactcttgagcacctggtcactgaactgagctcttgtggctttgcgctggacttgtgccagcatcaggacagggtacagaatctaagaaaagacttcacagagctacagaagacagttaaagagagagagaaagatgcatcatcttgccaggaacagttggatgaattccggaagctggtcaggaccttccagaaatggttgaaagaaactgaagggagtattccacctacggaaacttctatgagtgctaaagagttagaaaagcagattgaacacctgaagagtctactagatgactgggcaagtaagggaactctggtggaagaaatcaattgcaaaggtacttctttagaaaatctcatcatggaaatcacagcacctgattcccaaggcaagacagatctgacggagatccagtgtgacatgtcagatgtaaacttgaagtatgagaaactagggggagtacttcatgaacgccaggaaagccttcaggctatcctcaacagaatggaggaggttcacaaggaggcaaactctgtgctgcagtggctggaatcaaaagaggaagtcctgaaatccatggatgccatgtcatctccaaccaagacagaaacagtgaaagcccaagctgaatctaacaaggccttcctggctgagttggaacagaattctccaaaaattcaaaaagtaaaggaagccctggctggattactggtgacatatcccaactcacaggaagcagaaaattggaagaaaattcaggaagaactcaattcccgatgggaaagggccactgaggttactgtggctcggcaaaggcagctagaggaatctgcaagtcatctggcctgcttccaggctgcagaatcccagctccggccgtggctgatggagaaagaactgatgatgggagtgctggggcccctgtctattgaccccaacatgttgaatgcacaaaagcaacaggtccagtttatgctaaaggaatttgaagcacgcaggcaacagcatgagcaactgaatgaggcagctcagggcatcctaacaggccctggagatgtctctctgtccaccagccaagtacagaaagaactccagagcatcaatcagaaatgggttgagctgactgacaaactcaactcccgttccagccaaattgaccaagctattgttaagagcacccagtaccaggaactgctccaggacttatcagagaaggtgagggcagttggacaacggctgagtgtccagtcagctatcagcacccaaccagaggctgtaaagcagcaattggaagagaccagtgaaattcgatctgacttggagcagttagaccacgaggttaaggaggctcagacactgtgcgatgaactctcagtgctcattggtgagcagtacctcaaggatgaactgaagaagcgtttggagacagttgccctgcctctccaaggtttagaagaccttgcagccgatcgcattaacagactccaggcagctcttgccagcacccagcagttccagcaaatgtttgatgagttgaggacctggttggatgataaacaaagccagcaagcaaaaaactgcccaatttctgcaaaattggagcggctacagtctcagctacaggagaatgaagagtttcagaaaagtcttaatcaacacagtggctcctatgaggtgattgtggctgaaggggaatctctacttctttctgtacctcctggagaagagaaaaggactctacaaaaccagttggttgagctcaaaaaccattgggaagagcttagtaaaaaaactgcagacagacaatccaggctcaaggattgtatgcagaaagctcagaaatatcagtggcatgtggaagaccttgtgccatggatagaagattgtaaagctaagatgtctgagttgcgagtcactctggatccagtgcagctagagtccagtctcctaagatcaaaggctatgctgaatgaggtggagaagcgccgctccctgctggaaatattgaatagtgctgctgacattctgatcaattcttcagaagcagatgaggatggaatccgggatgagaaggctgggatcaaccagaacatggatgctgttacagaagagctgcaggccaaaacagggtcactcgaagaaatgactcagaggctcagggagttccaggaaagctttaagaatattgaaaagaaggttgaaggagccaaacaccaacttgagatctttgatgctctgggttctcaagcctgtagcaacaagaacctggagaagctaagagctcaacaggaagtgctgcaggccctagagcctcaggtagactatctgaggaactttactcagggtctggtagaagatgccccagatggatctgatgcttctcaacttctccaccaagctgaggtcgcccagcaagagttcctcgaagttaagcaaagagtgaacagtggttgtgtgatgatggaaaacaagctggaggggattggccagtttcactgccgggtccgagagatgttctctcaattggcagacctggatgatgagctagatggcatgggtgctattggcagagacactgatagcctccagtcccaaatcgaggatgtccggctattccttaacaaaattcacgtcctcaaattagacatagaggcctctgaagcagagtgtcgacatatgctagaagaagaggggactctggatttgttaggtctcaaaagggagctagaagccctgaacaaacagtgtggcaaactgacagagagggggaaagctcgtcaggaacagctggaactgacactaggccgtgtagaggacttctacaggaaattgaaaggactcaatgacgcgaccacagcagcagaggaggcagaggccctccagtgggtagtggggaccgaagtggaaatcatcaaccaacaattagcagattttaaaatgtttcagaaagaacaagtggatcctcttcagatgaaattgcagcaggtgaatggacttggccagggattaattcagagtgcaggaaaagactgtgatgtacagggtttagaacatgacatggaagagatcaatgctcgatggaatacattgaataaaaaggtcgcacaaagaattgcacagctacaggaagctttgttgcattgtgggaagtttcaagatgccttggagccattgctcagctggttggcagataccgaggagctcatagccaatcagaaacctccatctgctgagtataaagtggtgaaagcacagatccaagaacagaagttgctccagcggctcctagatgatcgaaaggccacagtagacatgcttcaagcagaaggaggcagaatagcccagtcagcagagctggctgatagagagaaaatcactggacagctggagagtcttgaaagtagatggactgaactactcagtaaggcagcagccaggcaaaaacagctggaagacatcctggttctggccaaacagttccatgagacagctgagcctatttctgacttcttatctgtcacagagaaaaagcttgctaactcagaacctgttggcactcagactgccaaaatacagcagcagatcattcggcacaaggctctggaagaagacatagaaaaccatgcaacagatgtgcaccaggcagtcaaaattgggcagtccctctcctccctgacatctcctgcagaacagggtgtgctgtcagaaaagatagactcattgcaggcccgatacagtgaaattcaagaccgctgttgtcggaaggcagccctacttgaccaagctctgtctaatgctaggctgtttggggaggatgaggtggaggtgctcaactggctggctgaggttgaggacaagctcagttcagtgttcgtaaaggatttcaaacaggatgtcctgcacaggcagcatgctgaccacctggctttaaatgaagaaattgttaatagaaagaagaatgtagatcaagctattaaaaatggtcaggctcttctaaaacaaaccacaggtgaggaggtgttacttatccaggaaaaactagatggtataaagactcgttacgcagacatcacagttactagctccaaggccctcagaactttagagcaagcccggcagctggccaccaagttccagtctacttatgaggaactgaccgggtggctgagggaggtggaggaggagctggcaaccagtggaggacagtctcccacaggggaacagataccccagtttcagcagagacagaaggaattaaagaaggaggtcatggagcacaggctggtgttggacacagtgaatgaggtgagccgtgctctcttagagctggtgccctggagagccagagaagggctggataaacttgtgtccgatgctaacgagcagtacaaactagtcagtgacactattggacaaagggtggatgaaattgatgctgctattcagagatcacaacagtatgagcaagctgccgatgcagaactagcttgggttgctgaaacaaaacggaaactgatggctctgggtccaattcgcctggaacaggaccagaccacagctcagcttcaggtacagaaggctttctccattgacattattcgacacaaagattcaatggatgaactcttcagtcaccgtagtgaaatctttggcacatgtggggaggagcaaaaaactgtattacaggaaaagacagagtctctaatacagcaatatgaagccattagcctactcaattcagagcgttatgcccgcctagagcgggcccaggtcttagtaaaccagttttgggaaacttatgaagagctcagcccctggattgaggaaactcgggcactaatagcacagttaccctctccagccattgatcatgagcagctcaggcagcaacaagaggaaatgaggcaattaagggaatctattgctgaacacaaacctcatattgacaaactactaaagataggcccacaactaaaggaattaaaccctgaggaaggggaaatggtggaagaaaaataccagaaagcagaaaacatgtatgcccaaataaaggaggaggtgcgccagcgagccctggctctggatgaagccgtgtcccagtccacacagattacagagtttcatgataaaattgagcctatgttggagacactggagaatctttcctctcgcctgcgtatgccaccactgatccctgctgaagtagacaagatcagagagtgcatcagtgacaataagagtgccaccgtggagctagaaaaactgcagccatcctttgaggccttgaagcgccgtggagaggagcttattggacgatctcagggagcagacaaggatctggctgcaaaagaaatccaggataaattggatcaaatggtattcttctgggaggacatcaaagctcgggctgaagaacgagaaatcaaatttcttgatgtccttgaattagcagagaagttctggtatgacatggcagctctcctgaccaccatcaaagacacccaggatattgtccatgacttggaaagcccaggcattgatccttccatcatcaaacaacaggttgaagctgctgagactattaaggaagagacagatggtctgcatgaagagctggagtttattcggatccttggagcagatttgatttttgcctgtggagaaactgagaagcctgaagtgaggaagagcattgatgagatgaataatgcttgggagaacttaaacaaaacatggaaagagaggctagaaaaacttgaggatgctatgcaagctgctgtgcagtatcaggacactcttcaggctatgtttgactggctagataacactgtgattaaactctgcaccatgccccctgttggcactgacctcaatactgttaaagatcagttaaatgaaatgaaggagttcaaagtagaagtttaccaacagcaaattgagatggagaagcttaatcaccagggtgaactgatgttaaagaaagctactgatgagacggacagagacattatacgagaaccactgacagaactcaaacacctctgggagaacctgggtgagaaaattgcccaccgacagcacaaactagaaggggctctgttggcccttggtcagttccagcatgccttagaggaactaatgagttggctgactcataccgaagagttgttagatgctcagagaccaataagtggagacccaaaagtcattgaagttgagctcgcaaagcaccatgtcctaaaaaatgatgttttggctcatcaagccacagtggaaacagtcaacaaagctggcaatgagcttcttgaatccagtgctggagatgatgccagcagcttaaggagccgtttggaagccatgaaccaagactgtacgtcacatttagaggcagcgagagagtagcagaatccaggtctgagctccatatgccacagtgcccagcatcatatgctatgctggtatatagtctagtggctgtcagttcaatggagagccagctttctgcatctaagcccacaggaggacttcctgaaactgctagggaacagcttgatacacatatggaactctattcccagctgaaagccaaggaagagacttataatcaactacttgacaagggcagactcatgcttctaagccgtgacgactctgggtctggctccaagacagaacagagtgtagcacttttggagcagaagtggcatgtggtcagcagtaagatggaagaaagaaagtcaaagctggaagaggccctcaacttggcaacagaattccagaattccctacaagaatttatcaactggctcactctagcagagcagagtttaaacatcgcttctccaccaagcctgattctaaatactgtcctttcccagatagaagagcacaaggtttttgctaatgaagtaaatgctcatcgagaccagatcattgagctggatcaaactgggaatcaattaaagttccttagccaaaagcaggatgttgttctgatcaagaatttgttggtgagcgtgcagtctcgatgggagaaggttgtccagcgatctattgaaagagggcgatcactagatgatgccaggaagcgggcaaaacaattccatgaagcttggaaaaaactgattgactggctagaagatgcagagagtcacctggactcagaactagagatatccaatgacccagacaaaattaaacttcagctttctaagcataaggagtttcagaagactcttggtggcaagcagcctgtgtatgataccacaattagaactggcagagcactgaaagaaaagactttgcttcccgaagatactcagaaacttgacaatttcctaggagaagtcagagacaaatgggatactgtttgtggcaagtctgtggagcggcagcacaagttggaggaagccctgctcttttcgggtcagttcatggatgctttgcaggcattggttgactggttatacaaggtggagccacagctggctgaggaccagcccgtgcacggggaccttgacctcgtcatgaacctcatggatgcacacaaggttttccagaaggaactgggaaagcgaacaggaaccgttcaggtcctgaagcggtcaggccgagagctgattgagaatagtcgagatgacaccacttgggtaaaaggacagctccaggaactgagcactcgctgggacactgtctgtaaactctctgtttccaaacaaagccggcttgagcaggccttaaaacaagcggaagtgtttcgagacacagtccacatgctgttggagtggctttctgaagcagagcaaacgcttcgctttcggggagcacttcctgatgacacagaggccctgcagtctctcattgacacccataaggaattcatgaagaaagtagaagaaaagcgagtggacgttaactcagcagtagccatgggagaagtcatcctggctgtctgccaccccgattgcatcacaaccatcaaacactggatcaccatcatccgagctcgcttcgaggaggtcctgacatgggctaagcagcaccagcagcgtcttgaaacggccttgtcagaactggtggctaatgctgagctcctggaagaacttctggcatggatccagtgggctgagaccaccctcattcagcgggatcaggagccaatcccgcagaacattgaccgagttaaagcccttatcgctgagcatcagacatttatggaggagatgactcgcaaacagcctgacgtggaccgggtcaccaagacatacaaaaggaaaaacatagagcctactcacgcgcctttcatagagaaatcccgcagcggaggcaggaaatccctaagtcagccaacccctcctcccatgccaatcctttcacagtctgaagcaaaaaacccacggatcaaccagctttctgcccgctggcagcaggtgtggctgttagcactggagcggcaaaggaaactgaatgatgccttggatcggctggaggagttgaaagaatttgccaactttgactttgatgtctggaggaaaaagtatatgcgttggatgaatcacaaaaagtctcgagtgatggatttcttccggcgcattgataaggaccaggatgggaagataacacgtcaggagtttatcgatggcattttagcatccaagttccccaccaccaagttagagatgactgctgtggctgacattttcgaccgagatggggatggttacattgattattatgaatttgtggctgctcttcatcccaacaaggatgcgtatcgaccaacaaccgatgcagataaaatcgaagatgaggttacaagacaagtggctcagtgcaaatgtgcaaaaaggtttcaggtggagcagatcggagagaataaataccggttcttcctcggcaatcagtttggggattctcagcagttgcggctggtccgtattctgcgcagcaccgtgatggttcgcgttggtggaggatggatggccttggatgaatttttagtgaaaaatgatccctgccgagttcaccatcctgggagtaaaataaagcgctctgattccagctcttcgatttccagtcagtctcccatagcacgaggtagaactaacattgaacttagagagaaattcatcctaccagagggagcatcccagggaatgacccccttccgctcacggggtcgaaggtccaaaccatcttcccgggcagcttcccctactcgttccagctccagtgctagtcagagtaaccacagctgtacatccatgccatcttctccagccaccccagccagtggaaccaaggttatcccatcatcaggtagcaagttgaaacgaccaacaccaacttttcattctagtcggacatcccttgctggtgataccagcaatagttcttccccggcctccacaggtgccaaaactaatcgggcagaccctaaaaagtctgccagtcgccctgggagtcgggctgggagtcgagccgggagtcgagccagcagccggcgaggaagtgacgcttctgactttgacctcttagagacgcagtctgcttgttccgacacttcagaaagcagcgctgcagggggccaaggcaactccaggagagggctaaacaaaccttccaaaatcccaaccatgtctaagaagaccaccactgcctcccccaggactccaggtcccaagcgataacactgtctaagcacccccaagccactatccactttgaatcctgctccatacattgggtgtatatttattctgaacgggagaagttatattgttaaaagtgtaaaagaataattgtgttatgaagctgccttattttttttctttttgtaagttactattttcatgtgaatatttatgtagataaaatttgcctcctggtaaccctgtaatggatggggcccagaaatgaaatatttgagaaaaacaagtgaaaaggtcaagatacaaatgtgtattaaaaaaaaaaaagcctattaatagggtttctgcgcggtgcagggttgtaaacctgctttatcttttaggattattcctaaatgcatcttctttataaacttgacttgctatctcagcaagataaattatattaaaaaaataagaatcctgcagtgtttaaggaactctttttttgtaaatcacggacacctcaattagcaagaactgaggggagggctttttccattgtttaatgttttgtgatttttagctaaagagagggaacctcatctaagtaacatttgcacatgatacagcaaaaggagttcattgcaatactgtctttggatattgtttcagtactgggtgtttaaaggacaaatagctgctagaattcaggggtaaatgtaagtgttcagaaaacgtcagaacatttggggttttaaactgatttgttgctccctatccagcctagacaccagtaactcttgtgttcaccaggacccagacccttggcaagggataggctcgttggtgacattgtgaatttcagatttgttttatccactttttttgctatttatttaaatggtcgatcaacttcccacaaactgaggaatgaattccacgagcctgttctgaaaatgtggacgtaagacaaacacgtgctcgtcctttaatggagttcaccagcacacttgttaaccagtcctgtttgctttcgtctttttttgtgcgtaataaagtcaactgaccaagtgaccatgaaaaggggctgtctggggctcctgttttttagctgctgttcttcagctccgaccatgttgctgtgtgattatctcaattggttttaattgaggcagaaactgaagctctaccaatgaactgtttagaaacaagacacacttttgtattaaaattgcttgcagtaacaaa

SEQ ID NO: 367613 - DNA, 17920 bp, Homo sapiens
  misc_feature (995)..(995): n is a, c, g, or t
  misc_feature (1066)..(1066): n is a, c, g, or t
  misc_feature (1076)..(1076): n is a, c, g, or t
tcaaaacaccatctattaaagctgacaattgtcacaagcagaattgaatactcaaagggaagttaacttcacacagaaaaacacttcatatttcattcaacttgcaacgtatttactgagcgtctaccgtgtgtaaggcagcctgctaggaaatggggtacgaccctcctcctcacagagcttacattctgacaggggaacccgaagtgaacaagcatgatctgcaacaggtatgagatgtcaagaaagcctattacagaggcacccaggcccagtctacggggtcactaaaggctatgggataaactgatctgaaggatgagcacaaatcaatcatcgagaggctgagagcagctcaagtcgggggaataagatgtgcgagaagcaggagagagcaggatgaaataaaatcaggcccgtgtgatgcgtggtgaacagtgagtacccagagaagcgaagctgggggctgaggggctggtcaggaacacgggcttaattcatcaacccaacagcaaacatcagtgcaacaatgtaagcacatttaccttctgggtcataatgtaatttcttccaaagccagtggtggcactcagatatttgatcagaggattgacagattcaggcttttggtggaaaagccatacctggaaaggaaggatgtgtcaatgatttgtttcttctgcccaaggtgagtgaggctggtggagagtcactatctgcactttatagagctccccagacaaattataaacatcctctcaaatatcatcagtgaatggtttggcaaatatattgagaaccaattaaaatatagtttaaaagcacttgcttctacaaccaatttgtattcccacaataaatgtatttatttctgtaacacttaccaaaacaagagcatcaaagccaattccttcacactgccctccctcccacctgctcttcatgaggagtcctttattcctgcatgtttcctgttctttgggccggaattccgnggcgcgatgtcggctcactacaacctctgcctcctggattcaagcaattctgtacctcagcctcccgagtngctgtgattncagatgaacgggaccgggttcagaagaaaacgttcaccaagtgggtcaacaagcacttaatgaaggtccgcaagcacatcaatgatctttatgaagatctgcgggatggccataacctgatctctctgttggaggtcctctcaggcatcaaactgccccgggagaagggcaggatgcgttttcataggctgcagaatgtgcagattgccctggacttcctaaagcagcgacaggtgaaactagtgaatattcgcaatgatgacatcacagatggcaaccccaagttgaccctgggtctgatctggaccattattttgcatttccagatctctgacatctacattagtggagaatcaggggatatgtcagccaaggagaaactactcctgtggacccagaaggtgacagctggttacacaggaatcaaatgcaccaacttttcctcctgctggagtgatgggaagatgttcaatgcactcattcaccgataccgacccgatctagtagacatggagagggtgcaaatccaaagtaaccgagagaatctggaacaagcttttgaagtggcagaaagactgggggtcactcgcctgctggatgcagaagatgtggatgtgccatctccagatgaaaagtctgtaatcacttatgtgtcttcgatttatgatgccttccctaaagttcctgagggtggagaagggatcagtgctacggaagtggactccaggtggcaagaataccaaagccgagtggactccctcattccctggatcaaacagcatacaatactgatgtcagataaaacttttccccaaaaccctgttgaactaaaggcactttataaccaatatatacacttcaaagaaacagaaattctggccaaggagagagaaaaaggaagaattgaggaattatataaattactagaggtgtggattgaatttggccgaattaaactgcctcaaggttatcaccctaatgatgtggaagaagagtggggaaagctcatcatagagatgctggaacgagagaaatcacttcggccggctgtggagaggctggaattgctgctacagattgcaaacaaaatccagaatggtgctttgaactgtgaagaaaaactgacactagctaagaatacactgcaggctgatgctgctcacctggaatcaggacaaccggtacaatgtgagtcagatgtcattatgtacattcaagagtgtgaaggtctcatcaggcagctgcaggtggatctccagatcctgcgggatgagaattactaccagctagaagagctggcttttagggtcatgcgtcttcaggatgagctggtcaccttgcgtctagagtgtacaaacctgtaccggaagggtcatttcacttcacttgaattggttccaccctctactttaaccaccactcatctgaaagcagaacccttaaccaaggcaacccattcttcttctacctcctggttccgaaagcctatgactcgggctgaacttgggccatcagctcctctgaagatgaaggcaatctccgatttgtgtatgaactactgtctttgggtagaagagatgcagatgaaactggagcgagcagagtggggcaatgacctgcctagtgtggagttgcagctagaaacacagcagcacatccatacgagtgtagaagagctgggctcaagtgtcaaggaggccaggttgtatgagggaaagatgtcccagaatttccataccagctatgctgaaactcttggaaagctggagacacagtattgtaaattgaaggaaacttctagcttccggatgaggcaccttcagagcctgcataaatttgtttccagagctacagctgagttgatctggttgaatgagaaggaggaggaggaactagcatatgactggagtgacaacaattccaatatctcagccaagagaaattacttctctgagttgacaatggaactggaggagaaacaggatgtgtttcgttctctacaagatacagcagaactactttcacttgagaaccacccagccaagcagacagtggaggcttacagtgctgctgtccagtcccagttgcagtggatgaagcagctgtgcctgtgtgttgagcagcatgtgaaagagaatactgcttattttcagttcttcagtgatgcacgagagctggagtcattcttgaggaacctccaagattccattaaacgaaaatattcctgtgaccacaacaccagcttatcccgccttgaagacctgctccaggactccatggatgaaaaggagcagcttatacagtccaagagttccgttgccagtctcgttgggagatcaaaaaccatcgttcagctaaaaccacgcagtccagaccatgtgttaaagaacaccatttctgtcaaggctgtctgtgactacaggcagatcgagattactatttgcaaaaatgatgaatgtgtgctagaagataattctcagcggaccaaatggaaagtgatcagccccacagggaacgaggcaatggtgccgtcagtctgcttcctcatccccccacccaataaggatgccattgagatggccagcagggtcgaacaatcttatcagaaggttatggccctttggcatcagctgcatgttaacaccaaaagccttatctcttggaactatctgcgtaaagaccttgaccttgtacagacctggaacctagaaaagcttcgatcctcagcaccaggggagtgccatcagattatgaagaaccttcaggcccactatgaagactttctgcaggatagtcgtgactctgtgctgttctcagtggctgatcgcttgcgcttggaagaggaggtggaagcttgtaaagcccgcttccagcacctgatgaagtccatggagaatgaggacaaagaggagactgtggccaagatgtacatttcagagttgaagaacatccggctacgcctggaggagtatgaacagagggtggtcaaacgaattcagtctctagccagctctaggactgacagagatgcctggcaggacaatgcattaaggattgcagagcaagagcacacccaggaggatttacagcaattgaggtcagacttggatgcagtttctatgaaatgtgacagctttctccatcagtctccatctagttcaagtgtcccaactctgcgctcagaactgaatctgctggtggagaagatggaccatgtctatggtctctctactgtatatctgaataagttaaagacagttgatgttatagtacgtagcatacaggatgctgaactcttggtcaaaggttatgagattaagctgagtcaagaagaagtagtactggcagatctctcagctctggaggcccattggtcgacattacggcactggcttagtgatgtgaaggacaagaattcagtgttttcagtcctggatgaggaaattgccaaggccaaggtagtggcagagcagatgagtcgtctgacaccagagcgaaatctggatttggagcgctatcaggaaaaaggctcccagctgcaggagcgttggcaccgagtcattgcccagctcgagattcgccaatctgagctagaaagtatccaggaagttctgggagattaccgagcctgccatggaactctcatcaagtggattgaggaaaccactgcccagcaggaaatgatgaagccaggccaggcagaggatagcagagtgctttcggagcagctcagccagcagacggccctatttgcagaaattgagagaaatcagacaaaactggatcaatgtcaaaaattttcccagcagtactctactattgtaaaggactatgaattgcaactgatgacatacaaggcctttgtggaatcgcagcagaaatcccctggcaagcgccgtcgcatgctttcctcttcagatgccatcactcaagagttcatggacttaaggactcgctacacggcattggtgactttaacaactcagcacgtgaaatacatcagtgatgcactccggcgtctggaggaggaggagaaagtggtagaagaggagaaacaagaacatgtggagaaggttaaagaacttttgggctgggtgtctaccctagcgaggaatacacaaggaaaagctacctcatccgagaccaaagaatcaacagacattgaaaaagctattttggaacagcaggttctgtcagaagagctgacaacaaagaaagaacaagtctctgaagctattaaaacatcacagatcttcttggccaagcatggtcataagctctcagaaaaagagaagaaacaaatatctgagcaattgaatgccctaaacaaggcttaccatgacctttgtgatggttctgcaaatcagcttcagcagcttcagagccagttggctcaccagacagaacaaaagaccctgcagaaacaacaaaatacctgtcaccagcaactggaggatctttgcagttgggtaggacaggcagaaagagcactggcaggccaccaaggcagaaccacccagcaggatctctctgctttgcagaagaaccaaagtgacttgaaggatttacaggatgacattcagaatcgtgccacctcatttgccactgttgtcaaggacattgaggggttcatggaagagaatcagaccaagctgagcccacgtgagttgacagctcttcgggaaaagcttcatcaggctaaggagcaatatgaggcgctccaggaagagacacgtgtggcccagaaggaactggaggaagcagtgacctccgccttacagcaggagactgaaaagagtaaagcagcaaaggaactggcagagaacaagaagaagatcgatgctctcctggattgggtaacttcagtaggatcatctggtggacagctgctgaccaaccttccaggaatggagcagctctcgggagctagcttggagaaaggagccttggacaccactgatggttacatgggggtgaatcaagccccagagaaactggacaagcaatgtgagatgatgaaggcccgtcaccaagaattgctgtcccagcagcaaaatttcattctggccacccagtcagctcaggccttcttggatcagcatggccacaatctcacacctgaggagcaacagatgctgcaacagaagctgggagagctaaaggaacaatactctacttccctggcccaatcagaggcagaactgaagcaggtgcagacacttcaggatgagttgcagaaatttctgcaggatcataaagagtttgaaagctggttggaacgatccgagaaagagctggagaacatgcataagggaggcagcagccccgagacccttccctccctgctaaagcggcaaggaagcttctcagaggatgtcatttcccacaaaggagacttgagatttgtgactatctcaggacagaaagtcttggacatggaaaacagttttaaggaaggcaaagaaccatcagaaattggaaacttagtaaaggacaagttgaaggatgcaacagaaagatacactgctctccactcaaagtgtacacgattaggatctcacctgaatatgctgttaggccagtatcatcaattccaaaacagtgctgacagcctgcaggcctggatgcaggcttgtgaggccaacgtggagaagctcctctcagatactgttgcctctgaccctggagttctccaggagcagcttgcaacaacaaagcagttgcaggaggaattggctgagcaccaagtacctgtggaaaaactccaaaaagtagctcgtgacataatggaaattgaaggggagccagccccagaccacaggcatgttcaagaaactacagattccatactcagccacttccaaagcctctcctatagcctggctgagcgatcttctctgctgcagaaagcaattgcccaatctcagagtgtccaggaaagcctggagagcctgttgcagtctattggggaagttgaacaaaacctggaagggaagcaggtgtcatcactctcatcaggagtcatccaggaagccttagccacaaatatgaaattgaagcaggacattgctcggcaaaagagcagcttggaggccacccgtgagatggtgacccgattcatggagacagcagacagtactacagcagcagtgctgcagggcaaactggcagaggtgagccagcggttcgaacagctctgtctacagcagcaagaaaaggagagctccctaaagaagcttctaccccaggcagagatgtttgaacacctctctggtaagctgcagcagttcatggaaaacaaaagtcggatgctggcctctggaaatcagccagatcaagatattacacatttcttccaacagatccaggagctcaatttggaaatggaagaccaacaggagaacctagatactcttgagcacctggtcactgaactgagctcttgtggctttgcgctggacttgtgccagcatcaggacagggtacagaatctaagaaaagacttcacagagctacagaagacagttaaagagagagagaaagatgcatcatcttgccaggaacagttggatgaattccggaagctggtcaggaccttccagaaatggttgaaagaaactgaagggagtattccacctacggaaacttctatgagtgctaaagagttagaaaagcagattgaacacctgaagagtctactagatgactgggcaagtaagggaactctggtggaagaaatcaattgcaaaggtacttctttagaaaatctcatcatggaaatcacagcacctgattcccaaggcaagacagatctgacggagatccagtgtgacatgtcagatgtaaacttgaagtatgagaaactagggggagtacttcatgaacgccaggaaagccttcaggctatcctcaacagaatggaggaggttcacaaggaggcaaactctgtgctgcagtggctggaatcaaaagaggaagtcctgaaatccatggatgccatgtcatctccaaccaagacagaaacagtgaaagcccaagctgaatctaacaaggccttcctggctgagttggaacagaattctccaaaaattcaaaaagtaaaggaagccctggctggattactggtgacatatcccaactcacaggaagcagaaaattggaagaaaattcaggaagaactcaattcccgatgggaaagggccactgaggttactgtggctcggcaaaggcagctagaggaatctgcaagtcatctggcctgcttccaggctgcagaatcccagctccggccgtggctgatggagaaagaactgatgatgggagtgctggggcccctgtctattgaccccaacatgttgaatgcacaaaagcaacaggtccagtttatgctaaaggaatttgaagcacgcaggcaacagcatgagcaactgaatgaggcagctcagggcatcctaacaggccctggagatgtctctctgtccaccagccaagtacagaaagaactccagagcatcaatcagaaatgggttgagctgactgacaaactcaactcccgttccagccaaattgaccaagctattgttaagagcacccagtaccaggaactgctccaggacttatcagagaaggtgagggcagttggacaacggctgagtgtccagtcagctatcagcacccaaccagaggctgtaaagcagcaattggaagagaccagtgaaattcgatctgacttggagcagttagaccacgaggttaaggaggctcagacactgtgcgatgaactctcagtgctcattggtgagcagtacctcaaggatgaactgaagaagcgtttggagacagttgccctgcctctccaaggtttagaagaccttgcagccgatcgcattaacagactccaggcagctcttgccagcacccagcagttccagcaaatgtttgatgagttgaggacctggttggatgataaacaaagccagcaagcaaaaaactgcccaatttctgcaaaattggagcggctacagtctcagctacaggagaatgaagagtttcagaaaagtcttaatcaacacagtggctcctatgaggtgattgtggctgaaggggaatctctacttctttctgtacctcctggagaagagaaaaggactctacaaaaccagttggttgagctcaaaaaccattgggaagagcttagtaaaaaaactgcagacagacaatccaggctcaaggattgtatgcagaaagctcagaaatatcagtggcatgtggaagaccttgtgccatggatagaagattgtaaagctaagatgtctgagttgcgagtcactctggatccagtgcagctagagtccagtctcctaagatcaaaggctatgctgaatgaggtggagaagcgccgctccctgctggaaatattgaatagtgctgctgacattctgatcaattcttcagaagcagatgaggatggaatccgggatgagaaggctgggatcaaccagaacatggatgctgttacagaagagctgcaggccaaaacagggtcactcgaagaaatgactcagaggctcagggagttccaggaaagctttaagaatattgaaaagaaggttgaaggagccaaacaccaacttgagatctttgatgctctgggttctcaagcctgtagcaacaagaacctggagaagctaagagctcaacaggaagtgctgcaggccctagagcctcaggtagactatctgaggaactttactcagggtctggtagaagatgccccagatggatctgatgcttctcaacttctccaccaagctgaggtcgcccagcaagagttcctcgaagttaagcaaagagtgaacagtggttgtgtgatgatggaaaacaagctggaggggattggccagtttcactgccgggtccgagagatgttctctcaattggcagacctggatgatgagctagatggcatgggtgctattggcagagacactgatagcctccagtcccaaatcgaggatgtccggctattccttaacaaaattcacgtcctcaaattagacatagaggcctctgaagcagagtgtcgacatatgctagaagaagaggggactctggatttgttaggtctcaaaagggagctagaagccctgaacaaacagtgtggcaaactgacagagagggggaaagctcgtcaggaacagctggaactgacactaggccgtgtagaggacttctacaggaaattgaaaggactcaatgacgcgaccacagcagcagaggaggcagaggccctccagtgggtagtggggaccgaagtggaaatcatcaaccaacaattagcagattttaaaatgtttcagaaagaacaagtggatcctcttcagatgaaattgcagcaggtgaatggacttggccagggattaattcagagtgcaggaaaagactgtgatgtacagggtttagaacatgacatggaagagatcaatgctcgatggaatacattgaataaaaaggtcgcacaaagaattgcacagctacaggaagctttgttgcattgtgggaagtttcaagatgccttggagccattgctcagctggttggcagataccgaggagctcatagccaatcagaaacctccatctgctgagtataaagtggtgaaagcacagatccaagaacagaagttgctccagcggctcctagatgatcgaaaggccacagtagacatgcttcaagcagaaggaggcagaatagcccagtcagcagagctggctgatagagagaaaatcactggacagctggagagtcttgaaagtagatggactgaactactcagtaaggcagcagccaggcaaaaacagctggaagacatcctggttctggccaaacagttccatgagacagctgagcctatttctgacttcttatctgtcacagagaaaaagcttgctaactcagaacctgttggcactcagactgccaaaatacagcagcagatcattcggcacaaggctctggaagaagacatagaaaaccatgcaacagatgtgcaccaggcagtcaaaattgggcagtccctctcctccctgacatctcctgcagaacagggtgtgctgtcagaaaagatagactcattgcaggcccgatacagtgaaattcaagaccgctgttgtcggaaggcagccctacttgaccaagctctgtctaatgctaggctgtttggggaggatgaggtggaggtgctcaactggctggctgaggttgaggacaagctcagttcagtgttcgtaaaggatttcaaacaggatgtcctgcacaggcagcatgctgaccacctggctttaaatgaagaaattgttaatagaaagaagaatgtagatcaagctattaaaaatggtcaggctcttctaaaacaaaccacaggtgaggaggtgttacttatccaggaaaaactagatggtataaagactcgttacgcagacatcacagttactagctccaaggccctcagaactttagagcaagcccggcagctggccaccaagttccagtctacttatgaggaactgaccgggtggctgagggaggtggaggaggagctggcaaccagtggaggacagtctcccacaggggaacagataccccagtttcagcagagacagaaggaattaaagaaggaggtcatggagcacaggctggtgttggacacagtgaatgaggtgagccgtgctctcttagagctggtgccctggagagccagagaagggctggataaacttgtgtccgatgctaacgagcagtacaaactagtcagtgacactattggacaaagggtggatgaaattgatgctgctattcagagatcacaacagtatgagcaagctgccgatgcagaactagcttgggttgctgaaacaaaacggaaactgatggctctgggtccaattcgcctggaacaggaccagaccacagctcagcttcaggtacagaaggctttctccattgacattattcgacacaaagattcaatggatgaactcttcagtcaccgtagtgaaatctttggcacatgtggggaggagcaaaaaactgtattacaggaaaagacagagtctctaatacagcaatatgaagccattagcctactcaattcagagcgttatgcccgcctagagcgggcccaggtcttagtaaaccagttttgggaaacttatgaagagctcagcccctggattgaggaaactcgggcactaatagcacagttaccctctccagccattgatcatgagcagctcaggcagcaacaagaggaaatgaggcaattaagggaatctattgctgaacacaaacctcatattgacaaactactaaagataggcccacaactaaaggaattaaaccctgaggaaggggaaatggtggaagaaaaataccagaaagcagaaaacatgtatgcccaaataaaggaggaggtgcgccagcgagccctggctctggatgaagccgtgtcccagtccacacagattacagagtttcatgataaaattgagcctatgttggagacactggagaatctttcctctcgcctgcgtatgccaccactgatccctgctgaagtagacaagatcagagagtgcatcagtgacaataagagtgccaccgtggagctagaaaaactgcagccatcctttgaggccttgaagcgccgtggagaggagcttattggacgatctcagggagcagacaaggatctggctgcaaaagaaatccaggataaattggatcaaatggtattcttctgggaggacatcaaagctcgggctgaagaacgagaaatcaaatttcttgatgtccttgaattagcagagaagttctggtatgacatggcagctctcctgaccaccatcaaagacacccaggatattgtccatgacttggaaagcccaggcattgatccttccatcatcaaacaacaggttgaagctgctgagactattaaggaagagacagatggtctgcatgaagagctggagtttattcggatccttggagcagatttgatttttgcctgtggagaaactgagaagcctgaagtgaggaagagcattgatgagatgaataatgcttgggagaacttaaacaaaacatggaaagagaggctagaaaaacttgaggatgctatgcaagctgctgtgcagtatcaggacactcttcaggctatgtttgactggctagataacactgtgattaaactctgcaccatgccccctgttggcactgacctcaatactgttaaagatcagttaaatgaaatgaaggagttcaaagtagaagtttaccaacagcaaattgagatggagaagcttaatcaccagggtgaactgatgttaaagaaagctactgatgagacggacagagacattatacgagaaccactgacagaactcaaacacctctgggagaacctgggtgagaaaattgcccaccgacagcacaaactagaaggggctctgttggcccttggtcagttccagcatgccttagaggaactaatgagttggctgactcataccgaagagttgttagatgctcagagaccaataagtggagacccaaaagtcattgaagttgagctcgcaaagcaccatgtcctaaaaaatgatgttttggctcatcaagccacagtggaaacagtcaacaaagctggcaatgagcttcttgaatccagtgctggagatgatgccagcagcttaaggagccgtttggaagccatgaaccaagactgtacgtcacatttagaggcagcgagagagtagcagaatccaggtctgagctccatatgccacagtgcccagcatcatatgctatgctggtatatagtctagtggctgtcagttcaatggagagccagctttctgcatctaagcccacaggaggacttcctgaaactgctagggaacagcttgatacacatatggaactctattcccagctgaaagccaaggaagagacttataatcaactacttgacaagggcagactcatgcttctaagccgtgacgactctgggtctggctccaagacagaacagagtgtagcacttttggagcagaagtggcatgtggtcagcagtaagatggaagaaagaaagtcaaagctggaagaggccctcaacttggcaacagaattccagaattccctacaagaatttatcaactggctcactctagcagagcagagtttaaacatcgcttctccaccaagcctgattctaaatactgtcctttcccagatagaagagcacaaggtttttgctaatgaagtaaatgctcatcgagaccagatcattgagctggatcaaactgggaatcaattaaagttccttagccaaaagcaggatgttgttctgatcaagaatttgttggtgagcgtgcagtctcgatgggagaaggttgtccagcgatctattgaaagagggcgatcactagatgatgccaggaagcgggcaaaacaattccatgaagcttggaaaaaactgattgactggctagaagatgcagagagtcacctggactcagaactagagatatccaatgacccagacaaaattaaacttcagctttctaagcataaggagtttcagaagactcttggtggcaagcagcctgtgtatgataccacaattagaactggcagagcactgaaagaaaagactttgcttcccgaagatactcagaaacttgacaatttcctaggagaagtcagagacaaatgggatactgtttgtggcaagtctgtggagcggcagcacaagttggaggaagccctgctcttttcgggtcagttcatggatgctttgcaggcattggttgactggttatacaaggtggagccacagctggctgaggaccagcccgtgcacggggaccttgacctcgtcatgaacctcatggatgcacacaaggttttccagaaggaactgggaaagcgaacaggaaccgttcaggtcctgaagcggtcaggccgagagctgattgagaatagtcgagatgacaccacttgggtaaaaggacagctccaggaactgagcactcgctgggacactgtctgtaaactctctgtttccaaacaaagccggcttgagcaggccttaaaacaagcggaagtgtttcgagacacagtccacatgctgttggagtggctttctgaagcagagcaaacgcttcgctttcggggagcacttcctgatgacacagaggccctgcagtctctcattgacacccataaggaattcatgaagaaagtagaagaaaagcgagtggacgttaactcagcagtagccatgggagaagtcatcctggctgtctgccaccccgattgcatcacaaccatcaaacactggatcaccatcatccgagctcgcttcgaggaggtcctgacatgggctaagcagcaccagcagcgtcttgaaacggccttgtcagaactggtggctaatgctgagctcctggaagaacttctggcatggatccagtgggctgagaccaccctcattcagcgggatcaggagccaatcccgcagaacattgaccgagttaaagcccttatcgctgagcatcagacatttatggaggagatgactcgcaaacagcctgacgtggaccgggtcaccaagacatacaaaaggaaaaacatagagcctactcacgcgcctttcatagagaaatcccgcagcggaggcaggaaatccctaagtcagccaacccctcctcccatgccaatcctttcacagtctgaagcaaaaaacccacggatcaaccagctttctgcccgctggcagcaggtgtggctgttagcactggagcggcaaaggaaactgaatgatgccttggatcggctggaggagcttggatgaatttttagtgaaaaatgatccctgccgagcacgaggtagaactaacattgaacttagagagaaattcatcctaccagagggagcatcccagggaatgacccccttccgctcacggggtcgaaggtccaaaccatcttcccgggcagcttcccctactcgttccagctccagtgctagtcagagtaaccacagctgtacatccatgccatcttctccagccaccccagccagtggaaccaagacttcacttcagttctctcgctgttatgacaaaccctggttggtaaacagtaaagctggcacccctatcagggacagccattctcctgacctccagctgcccacccccgaggttatcccatcatcaggtagcaagttgaaacgaccaacaccaacttttcattctagtcggacatcccttgctggtgataccagcaatagttcttccccggcctccacaggtgccaaaactaatcgggcagaccctaaaaagtctgccagtcgccctgggagtcgggctgggagtcgagccgggagtcgagccagcagccggcgaggaagtgacgcttctgactttgacctcttagagacgcagtctgcttgttccgacacttcagaaagcagcgctgcagggggccaaggcaactccaggagagggctaaacaaaccttccaaaatcccaaccatgtctaagaagaccaccactgcctcccccaggactccaggtcccaagcgataacactgtctaagcacccccaagccactatccactttgaatcctgctccatacattgggtgtatatttattctgaacgggagaagttatattgttaaaagtgtaaaagaataattgtgttatgaagctgccttattttttttctttttgtaagttactattttcatgtgaatatttatgtagataaaatttgcctcctggtaaccctgtaatggatggggcccagaaatgaaatatttgagaaaaacaagtgaaaaggtcaagatacaaatgtgtattaaaaaaaaaaaagcctattaatagggtttctgcgcggtgcagggttgtaaacctgctttatcttttaggattattcctaaatgcatcttctttataaacttgacttgctatctcagcaagataaattatattaaaaaaataagaatcctgcagtgtttaaggaactctttttttgtaaatcacggacacctcaattagcaagaactgaggggagggctttttccattgtttaatgttttgtgatttttagctaaagagagggaacctcatctaagtaacatttgcacatgatacagcaaaaggagttcattgcaatactgtctttggatattgtttcagtactgggtgtttaaaggacaaatagctgctagaattcaggggtaaatgtaagtgttcagaaaacgtcagaacatttggggttttaaactgatttgttgctccctatccagcctagacaccagtaactcttgtgttcaccaggacccagacccttggcaagggataggctcgttggtgacattgtgaatttcagatttgttttatccactttttttgctatttatttaaatggtcgatcaacttcccacaaactgaggaatgaattccacgagcctgttctgaaaatgtggacgtaagacaaacacgtgctcgtcctttaatggagttcaccagcacacttgttaaccagtcctgtttgctttcgtctttttttgtgcgtaataaagtcaactgaccaagtgaccatgaaaaggggctgtctggggctcctgttttttagctgctgttcttcagctccgaccatgttgctgtgtgattatctcaattggttttaattgaggcagaaactgaagctctaccaatgaactgtttagaaacaagacacacttttgtattaaaattgcttgcagtaacaaa

SEQ ID NO: 367614 - DNA, 17576 bp, Homo sapiens
  misc_feature (995)..(995): n is a, c, g, or t
  misc_feature (1066)..(1066): n is a, c, g, or t
  misc_feature (1076)..(1076): n is a, c, g, or t
tcaaaacaccatctattaaagctgacaattgtcacaagcagaattgaatactcaaagggaagttaacttcacacagaaaaacacttcatatttcattcaacttgcaacgtatttactgagcgtctaccgtgtgtaaggcagcctgctaggaaatggggtacgaccctcctcctcacagagcttacattctgacaggggaacccgaagtgaacaagcatgatctgcaacaggtatgagatgtcaagaaagcctattacagaggcacccaggcccagtctacggggtcactaaaggctatgggataaactgatctgaaggatgagcacaaatcaatcatcgagaggctgagagcagctcaagtcgggggaataagatgtgcgagaagcaggagagagcaggatgaaataaaatcaggcccgtgtgatgcgtggtgaacagtgagtacccagagaagcgaagctgggggctgaggggctggtcaggaacacgggcttaattcatcaacccaacagcaaacatcagtgcaacaatgtaagcacatttaccttctgggtcataatgtaatttcttccaaagccagtggtggcactcagatatttgatcagaggattgacagattcaggcttttggtggaaaagccatacctggaaaggaaggatgtgtcaatgatttgtttcttctgcccaaggtgagtgaggctggtggagagtcactatctgcactttatagagctccccagacaaattataaacatcctctcaaatatcatcagtgaatggtttggcaaatatattgagaaccaattaaaatatagtttaaaagcacttgcttctacaaccaatttgtattcccacaataaatgtatttatttctgtaacacttaccaaaacaagagcatcaaagccaattccttcacactgccctccctcccacctgctcttcatgaggagtcctttattcctgcatgtttcctgttctttgggccggaattccgnggcgcgatgtcggctcactacaacctctgcctcctggattcaagcaattctgtacctcagcctcccgagtngctgtgattncagatgaacgggaccgggttcagaagaaaacgttcaccaagtgggtcaacaagcacttaatgaaggtccgcaagcacatcaatgatctttatgaagatctgcgggatggccataacctgatctctctgttggaggtcctctcaggcatcaaactgccccgggagaagggcaggatgcgttttcataggctgcagaatgtgcagattgccctggacttcctaaagcagcgacaggtgaaactagtgaatattcgcaatgatgacatcacagatggcaaccccaagttgaccctgggtctgatctggaccattattttgcatttccagatctctgacatctacattagtggagaatcaggggatatgtcagccaaggagaaactactcctgtggacccagaaggtgacagctggttacacaggaatcaaatgcaccaacttttcctcctgctggagtgatgggaagatgttcaatgcactcattcaccgataccgacccgatctagtagacatggagagggtgcaaatccaaagtaaccgagagaatctggaacaagcttttgaagtggcagaaagactgggggtcactcgcctgctggatgcagaagatgtggatgtgccatctccagatgaaaagtctgtaatcacttatgtgtcttcgatttatgatgccttccctaaagttcctgagggtggagaagggatcagtgctacggaagtggactccaggtggcaagaataccaaagccgagtggactccctcattccctggatcaaacagcatacaatactgatgtcagataaaacttttccccaaaaccctgttgaactaaaggcactttataaccaatatatacacttcaaagaaacagaaattctggccaaggagagagaaaaaggaagaattgaggaattatataaattactagaggtgtggattgaatttggccgaattaaactgcctcaaggttatcaccctaatgatgtggaagaagagtggggaaagctcatcatagagatgctggaacgagagaaatcacttcggccggctgtggagaggctggaattgctgctacagattgcaaacaaaatccagaatggtgctttgaactgtgaagaaaaactgacactagctaagaatacactgcaggctgatgctgctcacctggaatcaggacaaccggtacaatgtgagtcagatgtcattatgtacattcaagagtgtgaaggtctcatcaggcagctgcaggtggatctccagatcctgcgggatgagaattactaccagctagaagagctggcttttagggtcatgcgtcttcaggatgagctggtcaccttgcgtctagagtgtacaaacctgtaccggaagggtcatttcacttcacttgaattggttccaccctctactttaaccaccactcatctgaaagcagaacccttaaccaaggcaacccattcttcttctacctcctggttccgaaagcctatgactcgggctgaacttgggccatcagctcctctgaagatgaaggcaatctccgatttgtgtatgaactactgtctttgggtagaagagatgcagatgaaactggagcgagcagagtggggcaatgacctgcctagtgtggagttgcagctagaaacacagcagcacatccatacgagtgtagaagagctgggctcaagtgtcaaggaggccaggttgtatgagggaaagatgtcccagaatttccataccagctatgctgaaactcttggaaagctggagacacagtattgtaaattgaaggaaacttctagcttccggatgaggcaccttcagagcctgcataaatttgtttccagagctacagctgagttgatctggttgaatgagaaggaggaggaggaactagcatatgactggagtgacaacaattccaatatctcagccaagagaaattacttctctgagttgacaatggaactggaggagaaacaggatgtgtttcgttctctacaagatacagcagaactactttcacttgagaaccacccagccaagcagacagtggaggcttacagtgctgctgtccagtcccagttgcagtggatgaagcagctgtgcctgtgtgttgagcagcatgtgaaagagaatactgcttattttcagttcttcagtgatgcacgagagctggagtcattcttgaggaacctccaagattccattaaacgaaaatattcctgtgaccacaacaccagcttatcccgccttgaagacctgctccaggactccatggatgaaaaggagcagcttatacagtccaagagttccgttgccagtctcgttgggagatcaaaaaccatcgttcagctaaaaccacgcagtccagaccatgtgttaaagaacaccatttctgtcaaggctgtctgtgactacaggcagatcgagattactatttgcaaaaatgatgaatgtgtgctagaagataattctcagcggaccaaatggaaagtgatcagccccacagggaacgaggcaatggtgccgtcagtctgcttcctcatccccccacccaataaggatgccattgagatggccagcagggtcgaacaatcttatcagaaggttatggccctttggcatcagctgcatgttaacaccaaaagccttatctcttggaactatctgcgtaaagaccttgaccttgtacagacctggaacctagaaaagcttcgatcctcagcaccaggggagtgccatcagattatgaagaaccttcaggcccactatgaagactttctgcaggatagtcgtgactctgtgctgttctcagtggctgatcgcttgcgcttggaagaggaggtggaagcttgtaaagcccgcttccagcacctgatgaagtccatggagaatgaggacaaagaggagactgtggccaagatgtacatttcagagttgaagaacatccggctacgcctggaggagtatgaacagagggtggtcaaacgaattcagtctctagccagctctaggactgacagagatgcctggcaggacaatgcattaaggattgcagagcaagagcacacccaggaggatttacagcaattgaggtcagacttggatgcagtttctatgaaatgtgacagctttctccatcagtctccatctagttcaagtgtcccaactctgcgctcagaactgaatctgctggtggagaagatggaccatgtctatggtctctctactgtatatctgaataagttaaagacagttgatgttatagtacgtagcatacaggatgctgaactcttggtcaaaggttatgagattaagctgagtcaagaagaagtagtactggcagatctctcagctctggaggcccattggtcgacattacggcactggcttagtgatgtgaaggacaagaattcagtgttttcagtcctggatgaggaaattgccaaggccaaggtagtggcagagcagatgagtcgtctgacaccagagcgaaatctggatttggagcgctatcaggaaaaaggctcccagctgcaggagcgttggcaccgagtcattgcccagctcgagattcgccaatctgagctagaaagtatccaggaagttctgggagattaccgagcctgccatggaactctcatcaagtggattgaggaaaccactgcccagcaggaaatgatgaagccaggccaggcagaggatagcagagtgctttcggagcagctcagccagcagacggccctatttgcagaaattgagagaaatcagacaaaactggatcaatgtcaaaaattttcccagcagtactctactattgtaaaggactatgaattgcaactgatgacatacaaggcctttgtggaatcgcagcagaaatcccctggcaagcgccgtcgcatgctttcctcttcagatgccatcactcaagagttcatggacttaaggactcgctacacggcattggtgactttaacaactcagcacgtgaaatacatcagtgatgcactccggcgtctggaggaggaggagaaagtggtagaagaggagaaacaagaacatgtggagaaggttaaagaacttttgggctgggtgtctaccctagcgaggaatacacaaggaaaagctacctcatccgagaccaaagaatcaacagacattgaaaaagctattttggaacagcaggttctgtcagaagagctgacaacaaagaaagaacaagtctctgaagctattaaaacatcacagatcttcttggccaagcatggtcataagctctcagaaaaagagaagaaacaaatatctgagcaattgaatgccctaaacaaggcttaccatgacctttgtgatggttctgcaaatcagcttcagcagcttcagagccagttggctcaccagacagaacaaaagaccctgcagaaacaacaaaatacctgtcaccagcaactggaggatctttgcagttgggtaggacaggcagaaagagcactggcaggccaccaaggcagaaccacccagcaggatctctctgctttgcagaagaaccaaagtgacttgaaggatttacaggatgacattcagaatcgtgccacctcatttgccactgttgtcaaggacattgaggggttcatggaagagaatcagaccaagctgagcccacgtgagttgacagctcttcgggaaaagcttcatcaggctaaggagcaatatgaggcgctccaggaagagacacgtgtggcccagaaggaactggaggaagcagtgacctccgccttacagcaggagactgaaaagagtaaagcagcaaaggaactggcagagaacaagaagaagatcgatgctctcctggattgggtaacttcagtaggatcatctggtggacagctgctgaccaaccttccaggaatggagcagctctcgggagctagcttggagaaaggagccttggacaccactgatggttacatgggggtgaatcaagccccagagaaactggacaagcaatgtgagatgatgaaggcccgtcaccaagaattgctgtcccagcagcaaaatttcattctggccacccagtcagctcaggccttcttggatcagcatggccacaatctcacacctgaggagcaacagatgctgcaacagaagctgggagagctaaaggaacaatactctacttccctggcccaatcagaggcagaactgaagcaggtgcagacacttcaggatgagttgcagaaatttctgcaggatcataaagagtttgaaagctggttggaacgatccgagaaagagctggagaacatgcataagggaggcagcagccccgagacccttccctccctgctaaagcggcaaggaagcttctcagaggatgtcatttcccacaaaggagacttgagatttgtgactatctcaggacagaaagtcttggacatggaaaacagttttaaggaaggcaaagaaccatcagaaattggaaacttagtaaaggacaagttgaaggatgcaacagaaagatacactgctctccactcaaagtgtacacgattaggatctcacctgaatatgctgttaggccagtatcatcaattccaaaacagtgctgacagcctgcaggcctggatgcaggcttgtgaggccaacgtggagaagctcctctcagatactgttgcctctgaccctggagttctccaggagcagcttgcaacaacaaagcagttgcaggaggaattggctgagcaccaagtacctgtggaaaaactccaaaaagtagctcgtgacataatggaaattgaaggggagccagccccagaccacaggcatgttcaagaaactacagattccatactcagccacttccaaagcctctcctatagcctggctgagcgatcttctctgctgcagaaagcaattgcccaatctcagagtgtccaggaaagcctggagagcctgttgcagtctattggggaagttgaacaaaacctggaagggaagcaggtgtcatcactctcatcaggagtcatccaggaagccttagccacaaatatgaaattgaagcaggacattgctcggcaaaagagcagcttggaggccacccgtgagatggtgacccgattcatggagacagcagacagtactacagcagcagtgctgcagggcaaactggcagaggtgagccagcggttcgaacagctctgtctacagcagcaagaaaaggagagctccctaaagaagcttctaccccaggcagagatgtttgaacacctctctggtaagctgcagcagttcatggaaaacaaaagtcggatgctggcctctggaaatcagccagatcaagatattacacatttcttccaacagatccaggagctcaatttggaaatggaagaccaacaggagaacctagatactcttgagcacctggtcactgaactgagctcttgtggctttgcgctggacttgtgccagcatcaggacagggtacagaatctaagaaaagacttcacagagctacagaagacagttaaagagagagagaaagatgcatcatcttgccaggaacagttggatgaattccggaagctggtcaggaccttccagaaatggttgaaagaaactgaagggagtattccacctacggaaacttctatgagtgctaaagagttagaaaagcagattgaacacctgaagagtctactagatgactgggcaagtaagggaactctggtggaagaaatcaattgcaaaggtacttctttagaaaatctcatcatggaaatcacagcacctgattcccaaggcaagacagatctgacggagatccagtgtgacatgtcagatgtaaacttgaagtatgagaaactagggggagtacttcatgaacgccaggaaagccttcaggctatcctcaacagaatggaggaggttcacaaggaggcaaactctgtgctgcagtggctggaatcaaaagaggaagtcctgaaatccatggatgccatgtcatctccaaccaagacagaaacagtgaaagcccaagctgaatctaacaaggccttcctggctgagttggaacagaattctccaaaaattcaaaaagtaaaggaagccctggctggattactggtgacatatcccaactcacaggaagcagaaaattggaagaaaattcaggaagaactcaattcccgatgggaaagggccactgaggttactgtggctcggcaaaggcagctagaggaatctgcaagtcatctggcctgcttccaggctgcagaatcccagctccggccgtggctgatggagaaagaactgatgatgggagtgctggggcccctgtctattgaccccaacatgttgaatgcacaaaagcaacaggtccagtttatgctaaaggaatttgaagcacgcaggcaacagcatgagcaactgaatgaggcagctcagggcatcctaacaggccctggagatgtctctctgtccaccagccaagtacagaaagaactccagagcatcaatcagaaatgggttgagctgactgacaaactcaactcccgttccagccaaattgaccaagctattgttaagagcacccagtaccaggaactgctccaggacttatcagagaaggtgagggcagttggacaacggctgagtgtccagtcagctatcagcacccaaccagaggctgtaaagcagcaattggaagagaccagtgaaattcgatctgacttggagcagttagaccacgaggttaaggaggctcagacactgtgcgatgaactctcagtgctcattggtgagcagtacctcaaggatgaactgaagaagcgtttggagacagttgccctgcctctccaaggtttagaagaccttgcagccgatcgcattaacagactccaggcagctcttgccagcacccagcagttccagcaaatgtttgatgagttgaggacctggttggatgataaacaaagccagcaagcaaaaaactgcccaatttctgcaaaattggagcggctacagtctcagctacaggagaatgaagagtttcagaaaagtcttaatcaacacagtggctcctatgaggtgattgtggctgaaggggaatctctacttctttctgtacctcctggagaagagaaaaggactctacaaaaccagttggttgagctcaaaaaccattgggaagagcttagtaaaaaaactgcagacagacaatccaggctcaaggattgtatgcagaaagctcagaaatatcagtggcatgtggaagaccttgtgccatggatagaagattgtaaagctaagatgtctgagttgcgagtcactctggatccagtgcagctagagtccagtctcctaagatcaaaggctatgctgaatgaggtggagaagcgccgctccctgctggaaatattgaatagtgctgctgacattctgatcaattcttcagaagcagatgaggatggaatccgggatgagaaggctgggatcaaccagaacatggatgctgttacagaagagctgcaggccaaaacagggtcactcgaagaaatgactcagaggctcagggagttccaggaaagctttaagaatattgaaaagaaggttgaaggagccaaacaccaacttgagatctttgatgctctgggttctcaagcctgtagcaacaagaacctggagaagctaagagctcaacaggaagtgctgcaggccctagagcctcaggtagactatctgaggaactttactcagggtctggtagaagatgccccagatggatctgatgcttctcaacttctccaccaagctgaggtcgcccagcaagagttcctcgaagttaagcaaagagtgaacagtggttgtgtgatgatggaaaacaagctggaggggattggccagtttcactgccgggtccgagagatgttctctcaattggcagacctggatgatgagctagatggcatgggtgctattggcagagacactgatagcctccagtcccaaatcgaggatgtccggctattccttaacaaaattcacgtcctcaaattagacatagaggcctctgaagcagagtgtcgacatatgctagaagaagaggggactctggatttgttaggtctcaaaagggagctagaagccctgaacaaacagtgtggcaaactgacagagagggggaaagctcgtcaggaacagctggaactgacactaggccgtgtagaggacttctacaggaaattgaaaggactcaatgacgcgaccacagcagcagaggaggcagaggccctccagtgggtagtggggaccgaagtggaaatcatcaaccaacaattagcagattttaaaatgtttcagaaagaacaagtggatcctcttcagatgaaattgcagcaggtgaatggacttggccagggattaattcagagtgcaggaaaagactgtgatgtacagggtttagaacatgacatggaagagatcaatgctcgatggaatacattgaataaaaaggtcgcacaaagaattgcacagctacaggaagctttgttgcattgtgggaagtttcaagatgccttggagccattgctcagctggttggcagataccgaggagctcatagccaatcagaaacctccatctgctgagtataaagtggtgaaagcacagatccaagaacagaagttgctccagcggctcctagatgatcgaaaggccacagtagacatgcttcaagcagaaggaggcagaatagcccagtcagcagagctggctgatagagagaaaatcactggacagctggagagtcttgaaagtagatggactgaactactcagtaaggcagcagccaggcaaaaacagctggaagacatcctggttctggccaaacagttccatgagacagctgagcctatttctgacttcttatctgtcacagagaaaaagcttgctaactcagaacctgttggcactcagactgccaaaatacagcagcagatcattcggcacaaggctctggaagaagacatagaaaaccatgcaacagatgtgcaccaggcagtcaaaattgggcagtccctctcctccctgacatctcctgcagaacagggtgtgctgtcagaaaagatagactcattgcaggcccgatacagtgaaattcaagaccgctgttgtcggaaggcagccctacttgaccaagctctgtctaatgctaggctgtttggggaggatgaggtggaggtgctcaactggctggctgaggttgaggacaagctcagttcagtgttcgtaaaggatttcaaacaggatgtcctgcacaggcagcatgctgaccacctggctttaaatgaagaaattgttaatagaaagaagaatgtagatcaagctattaaaaatggtcaggctcttctaaaacaaaccacaggtgaggaggtgttacttatccaggaaaaactagatggtataaagactcgttacgcagacatcacagttactagctccaaggccctcagaactttagagcaagcccggcagctggccaccaagttccagtctacttatgaggaactgaccgggtggctgagggaggtggaggaggagctggcaaccagtggaggacagtctcccacaggggaacagataccccagtttcagcagagacagaaggaattaaagaaggaggtcatggagcacaggctggtgttggacacagtgaatgaggtgagccgtgctctcttagagctggtgccctggagagccagagaagggctggataaacttgtgtccgatgctaacgagcagtacaaactagtcagtgacactattggacaaagggtggatgaaattgatgctgctattcagagatcacaacagtatgagcaagctgccgatgcagaactagcttgggttgctgaaacaaaacggaaactgatggctctgggtccaattcgcctggaacaggaccagaccacagctcagcttcaggtacagaaggctttctccattgacattattcgacacaaagattcaatggatgaactcttcagtcaccgtagtgaaatctttggcacatgtggggaggagcaaaaaactgtattacaggaaaagacagagtctctaatacagcaatatgaagccattagcctactcaattcagagcgttatgcccgcctagagcgggcccaggtcttagtaaaccagttttgggaaacttatgaagagctcagcccctggattgaggaaactcgggcactaatagcacagttaccctctccagccattgatcatgagcagctcaggcagcaacaagaggaaatgaggcaattaagggaatctattgctgaacacaaacctcatattgacaaactactaaagataggcccacaactaaaggaattaaaccctgaggaaggggaaatggtggaagaaaaataccagaaagcagaaaacatgtatgcccaaataaaggaggaggtgcgccagcgagccctggctctggatgaagccgtgtcccagtccacacagattacagagtttcatgataaaattgagcctatgttggagacactggagaatctttcctctcgcctgcgtatgccaccactgatccctgctgaagtagacaagatcagagagtgcatcagtgacaataagagtgccaccgtggagctagaaaaactgcagccatcctttgaggccttgaagcgccgtggagaggagcttattggacgatctcagggagcagacaaggatctggctgcaaaagaaatccaggataaattggatcaaatggtattcttctgggaggacatcaaagctcgggctgaagaacgagaaatcaaatttcttgatgtccttgaattagcagagaagttctggtatgacatggcagctctcctgaccaccatcaaagacacccaggatattgtccatgacttggaaagcccaggcattgatccttccatcatcaaacaacaggttgaagctgctgagactattaaggaagagacagatggtctgcatgaagagctggagtttattcggatccttggagcagatttgatttttgcctgtggagaaactgagaagcctgaagtgaggaagagcattgatgagatgaataatgcttgggagaacttaaacaaaacatggaaagagaggctagaaaaacttgaggatgctatgcaagctgctgtgcagtatcaggacactcttcaggctatgtttgactggctagataacactgtgattaaactctgcaccatgccccctgttggcactgacctcaatactgttaaagatcagttaaatgaaatgaaggagttcaaagtagaagtttaccaacagcaaattgagatggagaagcttaatcaccagggtgaactgatgttaaagaaagctactgatgagacggacagagacattatacgagaaccactgacagaactcaaacacctctgggagaacctgggtgagaaaattgcccaccgacagcacaaactagaaggggctctgttggcccttggtcagttccagcatgccttagaggaactaatgagttggctgactcataccgaagagttgttagatgctcagagaccaataagtggagacccaaaagtcattgaagttgagctcgcaaagcaccatgtcctaaaaaatgatgttttggctcatcaagccacagtggaaacagtcaacaaagctggcaatgagcttcttgaatccagtgctggagatgatgccagcagcttaaggagccgtttggaagccatgaaccaagactgtacgtcacatttagaggcagcgagagagtagcagaatccaggtctgagctccatatgccacagtgcccagcatcatatgctatgctggtatatagtctagtggctgtcagttcaatggagagccagctttctgcatctaagcccacaggaggacttcctgaaactgctagggaacagcttgatacacatatggaactctattcccagctgaaagccaaggaagagacttataatcaactacttgacaagggcagactcatgcttctaagccgtgacgactctgggtctggctccaagacagaacagagtgtagcacttttggagcagaagtggcatgtggtcagcagtaagatggaagaaagaaagtcaaagctggaagaggccctcaacttggcaacagaattccagaattccctacaagaatttatcaactggctcactctagcagagcagagtttaaacatcgcttctccaccaagcctgattctaaatactgtcctttcccagatagaagagcacaaggtttttgctaatgaagtaaatgctcatcgagaccagatcattgagctggatcaaactgggaatcaattaaagttccttagccaaaagcaggatgttgttctgatcaagaatttgttggtgagcgtgcagtctcgatgggagaaggttgtccagcgatctattgaaagagggcgatcactagatgatgccaggaagcgggcaaaacaattccatgaagcttggaaaaaactgattgactggctagaagatgcagagagtcacctggactcagaactagagatatccaatgacccagacaaaattaaacttcagctttctaagcataaggagtttcagaagactcttggtggcaagcagcctgtgtatgataccacaattagaactggcagagcactgaaagaaaagactttgcttcccgaagatactcagaaacttgacaatttcctaggagaagtcagagacaaatgggatactgtttgtggcaagtctgtggagcggcagcacaagttggaggaagccctgctcttttcgggtcagttcatggatgctttgcaggcattggttgactggttatacaaggtggagccacagctggctgaggaccagcccgtgcacggggaccttgacctcgtcatgaacctcatggatgcacacaaggttttccagaaggaactgggaaagcgaacaggaaccgttcaggtcctgaagcggtcaggccgagagctgattgagaatagtcgagatgacaccacttgggtaaaaggacagctccaggaactgagcactcgctgggacactgtctgtaaactctctgtttccaaacaaagccggcttgagcaggccttaaaacaagcggaagtgtttcgagacacagtccacatgctgttggagtggctttctgaagcagagcaaacgcttcgctttcggggagcacttcctgatgacacagaggccctgcagtctctcattgacacccataaggaattcatgaagaaagtagaagaaaagcgagtggacgttaactcagcagtagccatgggagaagtcatcctggctgtctgccaccccgattgcatcacaaccatcaaacactggatcaccatcatccgagctcgcttcgaggaggtcctgacatgggctaagcagcaccagcagcgtcttgaaacggccttgtcagaactggtggctaatgctgagctcctggaagaacttctggcatggatccagtgggctgagaccaccctcattcagcgggatcaggagccaatcccgcagaacattgaccgagttaaagcccttatcgctgagcatcagacatttatggaggagatgactcgcaaacagcctgacgtggaccgggtcaccaagacatacaaaaggaaaaacatagagcctactcacgcgcctttcatagagaaatcccgcagcggaggcaggaaatccctaagtcagccaacccctcctcccatgccaatcctttcacagtctgaagcaaaaaacccacggatcaaccagctttctgcccgctggcagcaggtgtggctgttagcactggagcggcaaaggaaactgaatgatgccttggatcggctggaggagttgaaagaatttgccaactttgactttgatgtctggaggaaaaagtatatgcgttggatgaatcacaaaaagtctcgagtgatggatttcttccggcgcattgataaggaccaggatgggaagataacacgtcaggagtttatcgatggcattttagcatccaagttccccaccaccaagttagagatgactgctgtggctgacattttcgaccgagatggggatggttacattgattattatgaatttgtggctgctcttcatcccaacaaggatgcgtatcgaccaacaaccgatgcagataaaatcgaagatgaggttacaagacaagtggctcagtgcaaatgtgcaaaaaggtttcaggtggagcagatcggagagaataaataccggttcttcctcggcaatcagtttggggattctcagcagttgcggctggtccgtattctgcgcagcaccgtgatggttcgcgttggtggaggatggatggccttggatgaatttttagtgaaaaatgatccctgccgagcacgaggtagaactaacattgaacttagagagaaattcatcctaccagagggagcatcccagggaatgacccccttccgctcacggggtcgaaggtccaaaccatcttcccgggcagcttcccctactcgttccagctccagtgctagtcagagtaaccacagctgtacatccatgccatcttctccagccaccccagccagtggaaccaaggttatcccatcatcaggtagcaagttgaaacgaccaacaccaacttttcattctagtcggacatcccttgctggtgataccagcaatagttcttccccggcctccacaggtgccaaaactaatcgggcagaccctaaaaagtctgccagtcgccctgggagtcgggctgggagtcgagccgggagtcgagccagcagccggcgaggaagtgacgcttctgactttgacctcttagagacgcagtctgcttgttccgacacttcagaaagcagcgctgcagggggccaaggcaactccaggagagggctaaacaaaccttccaaaatcccaaccatgtctaagaagaccaccactgcctcccccaggactccaggtcccaagcgataacactgtctaagcacccccaagccactatccactttgaatcctgctccatacattgggtgtatatttattctgaacgggagaagttatattgttaaaagtgtaaaagaataattgtgttatgaagctgccttattttttttctttttgtaagttactattttcatgtgaatatttatgtagataaaatttgcctcctggtaaccctgtaatggatggggcccagaaatgaaatatttgagaaaaacaagtgaaaaggtcaagatacaaatgtgtattaaaaaaaaaaaagcctattaatagggtttctgcgcggtgcagggttgtaaacctgctttatcttttaggattattcctaaatgcatcttctttataaacttgacttgctatctcagcaagataaattatattaaaaaaaaagtcgacgcggccgcgaatttagtagtagtaggcggccgctctagaggatc

SEQ ID NO: 367615 - DNA, 17487 bp, Homo sapiens
  misc_feature (995)..(995): n is a, c, g, or t
  misc_feature (1066)..(1066): n is a, c, g, or t
  misc_feature (1076)..(1076): n is a, c, g, or t
tcaaaacaccatctattaaagctgacaattgtcacaagcagaattgaatactcaaagggaagttaacttcacacagaaaaacacttcatatttcattcaacttgcaacgtatttactgagcgtctaccgtgtgtaaggcagcctgctaggaaatggggtacgaccctcctcctcacagagcttacattctgacaggggaacccgaagtgaacaagcatgatctgcaacaggtatgagatgtcaagaaagcctattacagaggcacccaggcccagtctacggggtcactaaaggctatgggataaactgatctgaaggatgagcacaaatcaatcatcgagaggctgagagcagctcaagtcgggggaataagatgtgcgagaagcaggagagagcaggatgaaataaaatcaggcccgtgtgatgcgtggtgaacagtgagtacccagagaagcgaagctgggggctgaggggctggtcaggaacacgggcttaattcatcaacccaacagcaaacatcagtgcaacaatgtaagcacatttaccttctgggtcataatgtaatttcttccaaagccagtggtggcactcagatatttgatcagaggattgacagattcaggcttttggtggaaaagccatacctggaaaggaaggatgtgtcaatgatttgtttcttctgcccaaggtgagtgaggctggtggagagtcactatctgcactttatagagctccccagacaaattataaacatcctctcaaatatcatcagtgaatggtttggcaaatatattgagaaccaattaaaatatagtttaaaagcacttgcttctacaaccaatttgtattcccacaataaatgtatttatttctgtaacacttaccaaaacaagagcatcaaagccaattccttcacactgccctccctcccacctgctcttcatgaggagtcctttattcctgcatgtttcctgttctttgggccggaattccgnggcgcgatgtcggctcactacaacctctgcctcctggattcaagcaattctgtacctcagcctcccgagtngctgtgattncagatgaacgggaccgggttcagaagaaaacgttcaccaagtgggtcaacaagcacttaatgaaggtccgcaagcacatcaatgatctttatgaagatctgcgggatggccataacctgatctctctgttggaggtcctctcaggcatcaaactgccccgggagaagggcaggatgcgttttcataggctgcagaatgtgcagattgccctggacttcctaaagcagcgacaggtgaaactagtgaatattcgcaatgatgacatcacagatggcaaccccaagttgaccctgggtctgatctggaccattattttgcatttccagatctctgacatctacattagtggagaatcaggggatatgtcagccaaggagaaactactcctgtggacccagaaggtgacagctggttacacaggaatcaaatgcaccaacttttcctcctgctggagtgatgggaagatgttcaatgcactcattcaccgataccgacccgatctagtagacatggagagggtgcaaatccaaagtaaccgagagaatctggaacaagcttttgaagtggcagaaagactgggggtcactcgcctgctggatgcagaagatgtggatgtgccatctccagatgaaaagtctgtaatcacttatgtgtcttcgatttatgatgccttccctaaagttcctgagggtggagaagggatcagtgctacggaagtggactccaggtggcaagaataccaaagccgagtggactccctcattccctggatcaaacagcatacaatactgatgtcagataaaacttttccccaaaaccctgttgaactaaaggcactttataaccaatatatacacttcaaagaaacagaaattctggccaaggagagagaaaaaggaagaattgaggaattatataaattactagaggtgtggattgaatttggccgaattaaactgcctcaaggttatcaccctaatgatgtggaagaagagtggggaaagctcatcatagagatgctggaacgagagaaatcacttcggccggctgtggagaggctggaattgctgctacagattgcaaacaaaatccagaatggtgctttgaactgtgaagaaaaactgacactagctaagaatacactgcaggctgatgctgctcacctggaatcaggacaaccggtacaatgtgagtcagatgtcattatgtacattcaagagtgtgaaggtctcatcaggcagctgcaggtggatctccagatcctgcgggatgagaattactaccagctagaagagctggcttttagggtcatgcgtcttcaggatgagctggtcaccttgcgtctagagtgtacaaacctgtaccggaagggtcatttcacttcacttgaattggttccaccctctactttaaccaccactcatctgaaagcagaacccttaaccaaggcaacccattcttcttctacctcctggttccgaaagcctatgactcgggctgaacttgggccatcagctcctctgaagatgaaggcaatctccgatttgtgtatgaactactgtctttgggtagaagagatgcagatgaaactggagcgagcagagtggggcaatgacctgcctagtgtggagttgcagctagaaacacagcagcacatccatacgagtgtagaagagctgggctcaagtgtcaaggaggccaggttgtatgagggaaagatgtcccagaatttccataccagctatgctgaaactcttggaaagctggagacacagtattgtaaattgaaggaaacttctagcttccggatgaggcaccttcagagcctgcataaatttgtttccagagctacagctgagttgatctggttgaatgagaaggaggaggaggaactagcatatgactggagtgacaacaattccaatatctcagccaagagaaattacttctctgagttgacaatggaactggaggagaaacaggatgtgtttcgttctctacaagatacagcagaactactttcacttgagaaccacccagccaagcagacagtggaggcttacagtgctgctgtccagtcccagttgcagtggatgaagcagctgtgcctgtgtgttgagcagcatgtgaaagagaatactgcttattttcagttcttcagtgatgcacgagagctggagtcattcttgaggaacctccaagattccattaaacgaaaatattcctgtgaccacaacaccagcttatcccgccttgaagacctgctccaggactccatggatgaaaaggagcagcttatacagtccaagagttccgttgccagtctcgttgggagatcaaaaaccatcgttcagctaaaaccacgcagtccagaccatgtgttaaagaacaccatttctgtcaaggctgtctgtgactacaggcagatcgagattactatttgcaaaaatgatgaatgtgtgctagaagataattctcagcggaccaaatggaaagtgatcagccccacagggaacgaggcaatggtgccgtcagtctgcttcctcatccccccacccaataaggatgccattgagatggccagcagggtcgaacaatcttatcagaaggttatggccctttggcatcagctgcatgttaacaccaaaagccttatctcttggaactatctgcgtaaagaccttgaccttgtacagacctggaacctagaaaagcttcgatcctcagcaccaggggagtgccatcagattatgaagaaccttcaggcccactatgaagactttctgcaggatagtcgtgactctgtgctgttctcagtggctgatcgcttgcgcttggaagaggaggtggaagcttgtaaagcccgcttccagcacctgatgaagtccatggagaatgaggacaaagaggagactgtggccaagatgtacatttcagagttgaagaacatccggctacgcctggaggagtatgaacagagggtggtcaaacgaattcagtctctagccagctctaggactgacagagatgcctggcaggacaatgcattaaggattgcagagcaagagcacacccaggaggatttacagcaattgaggtcagacttggatgcagtttctatgaaatgtgacagctttctccatcagtctccatctagttcaagtgtcccaactctgcgctcagaactgaatctgctggtggagaagatggaccatgtctatggtctctctactgtatatctgaataagttaaagacagttgatgttatagtacgtagcatacaggatgctgaactcttggtcaaaggttatgagattaagctgagtcaagaagaagtagtactggcagatctctcagctctggaggcccattggtcgacattacggcactggcttagtgatgtgaaggacaagaattcagtgttttcagtcctggatgaggaaattgccaaggccaaggtagtggcagagcagatgagtcgtctgacaccagagcgaaatctggatttggagcgctatcaggaaaaaggctcccagctgcaggagcgttggcaccgagtcattgcccagctcgagattcgccaatctgagctagaaagtatccaggaagttctgggagattaccgagcctgccatggaactctcatcaagtggattgaggaaaccactgcccagcaggaaatgatgaagccaggccaggcagaggatagcagagtgctttcggagcagctcagccagcagacggccctatttgcagaaattgagagaaatcagacaaaactggatcaatgtcaaaaattttcccagcagtactctactattgtaaaggactatgaattgcaactgatgacatacaaggcctttgtggaatcgcagcagaaatcccctggcaagcgccgtcgcatgctttcctcttcagatgccatcactcaagagttcatggacttaaggactcgctacacggcattggtgactttaacaactcagcacgtgaaatacatcagtgatgcactccggcgtctggaggaggaggagaaagtggtagaagaggagaaacaagaacatgtggagaaggttaaagaacttttgggctgggtgtctaccctagcgaggaatacacaaggaaaagctacctcatccgagaccaaagaatcaacagacattgaaaaagctattttggaacagcaggttctgtcagaagagctgacaacaaagaaagaacaagtctctgaagctattaaaacatcacagatcttcttggccaagcatggtcataagctctcagaaaaagagaagaaacaaatatctgagcaattgaatgccctaaacaaggcttaccatgacctttgtgatggttctgcaaatcagcttcagcagcttcagagccagttggctcaccagacagaacaaaagaccctgcagaaacaacaaaatacctgtcaccagcaactggaggatctttgcagttgggtaggacaggcagaaagagcactggcaggccaccaaggcagaaccacccagcaggatctctctgctttgcagaagaaccaaagtgacttgaaggatttacaggatgacattcagaatcgtgccacctcatttgccactgttgtcaaggacattgaggggttcatggaagagaatcagaccaagctgagcccacgtgagttgacagctcttcgggaaaagcttcatcaggctaaggagcaatatgaggcgctccaggaagagacacgtgtggcccagaaggaactggaggaagcagtgacctccgccttacagcaggagactgaaaagagtaaagcagcaaaggaactggcagagaacaagaagaagatcgatgctctcctggattgggtaacttcagtaggatcatctggtggacagctgctgaccaaccttccaggaatggagcagctctcgggagctagcttggagaaaggagccttggacaccactgatggttacatgggggtgaatcaagccccagagaaactggacaagcaatgtgagatgatgaaggcccgtcaccaagaattgctgtcccagcagcaaaatttcattctggccacccagtcagctcaggccttcttggatcagcatggccacaatctcacacctgaggagcaacagatgctgcaacagaagctgggagagctaaaggaacaatactctacttccctggcccaatcagaggcagaactgaagcaggtgcagacacttcaggatgagttgcagaaatttctgcaggatcataaagagtttgaaagctggttggaacgatccgagaaagagctggagaacatgcataagggaggcagcagccccgagacccttccctccctgctaaagcggcaaggaagcttctcagaggatgtcatttcccacaaaggagacttgagatttgtgactatctcaggacagaaagtcttggacatggaaaacagttttaaggaaggcaaagaaccatcagaaattggaaacttagtaaaggacaagttgaaggatgcaacagaaagatacactgctctccactcaaagtgtacacgattaggatctcacctgaatatgctgttaggccagtatcatcaattccaaaacagtgctgacagcctgcaggcctggatgcaggcttgtgaggccaacgtggagaagctcctctcagatactgttgcctctgaccctggagttctccaggagcagcttgcaacaacaaagcagttgcaggaggaattggctgagcaccaagtacctgtggaaaaactccaaaaagtagctcgtgacataatggaaattgaaggggagccagccccagaccacaggcatgttcaagaaactacagattccatactcagccacttccaaagcctctcctatagcctggctgagcgatcttctctgctgcagaaagcaattgcccaatctcagagtgtccaggaaagcctggagagcctgttgcagtctattggggaagttgaacaaaacctggaagggaagcaggtgtcatcactctcatcaggagtcatccaggaagccttagccacaaatatgaaattgaagcaggacattgctcggcaaaagagcagcttggaggccacccgtgagatggtgacccgattcatggagacagcagacagtactacagcagcagtgctgcagggcaaactggcagaggtgagccagcggttcgaacagctctgtctacagcagcaagaaaaggagagctccctaaagaagcttctaccccaggcagagatgtttgaacacctctctggtaagctgcagcagttcatggaaaacaaaagtcggatgctggcctctggaaatcagccagatcaagatattacacatttcttccaacagatccaggagctcaatttggaaatggaagaccaacaggagaacctagatactcttgagcacctggtcactgaactgagctcttgtggctttgcgctggacttgtgccagcatcaggacagggtacagaatctaagaaaagacttcacagagctacagaagacagttaaagagagagagaaagatgcatcatcttgccaggaacagttggatgaattccggaagctggtcaggaccttccagaaatggttgaaagaaactgaagggagtattccacctacggaaacttctatgagtgctaaagagttagaaaagcagattgaacacctgaagagtctactagatgactgggcaagtaagggaactctggtggaagaaatcaattgcaaaggtacttctttagaaaatctcatcatggaaatcacagcacctgattcccaaggcaagacagatctgacggagatccagtgtgacatgtcagatgtaaacttgaagtatgagaaactagggggagtacttcatgaacgccaggaaagccttcaggctatcctcaacagaatggaggaggttcacaaggaggcaaactctgtgctgcagtggctggaatcaaaagaggaagtcctgaaatccatggatgccatgtcatctccaaccaagacagaaacagtgaaagcccaagctgaatctaacaaggccttcctggctgagttggaacagaattctccaaaaattcaaaaagtaaaggaagccctggctggattactggtgacatatcccaactcacaggaagcagaaaattggaagaaaattcaggaagaactcaattcccgatgggaaagggccactgaggttactgtggctcggcaaaggcagctagaggaatctgcaagtcatctggcctgcttccaggctgcagaatcccagctccggccgtggctgatggagaaagaactgatgatgggagtgctggggcccctgtctattgaccccaacatgttgaatgcacaaaagcaacaggtccagtttatgctaaaggaatttgaagcacgcaggcaacagcatgagcaactgaatgaggcagctcagggcatcctaacaggccctggagatgtctctctgtccaccagccaagtacagaaagaactccagagcatcaatcagaaatgggttgagctgactgacaaactcaactcccgttccagccaaattgaccaagctattgttaagagcacccagtaccaggaactgctccaggacttatcagagaaggtgagggcagttggacaacggctgagtgtccagtcagctatcagcacccaaccagaggctgtaaagcagcaattggaagagaccagtgaaattcgatctgacttggagcagttagaccacgaggttaaggaggctcagacactgtgcgatgaactctcagtgctcattggtgagcagtacctcaaggatgaactgaagaagcgtttggagacagttgccctgcctctccaaggtttagaagaccttgcagccgatcgcattaacagactccaggcagctcttgccagcacccagcagttccagcaaatgtttgatgagttgaggacctggttggatgataaacaaagccagcaagcaaaaaactgcccaatttctgcaaaattggagcggctacagtctcagctacaggagaatgaagagtttcagaaaagtcttaatcaacacagtggctcctatgaggtgattgtggctgaaggggaatctctacttctttctgtacctcctggagaagagaaaaggactctacaaaaccagttggttgagctcaaaaaccattgggaagagcttagtaaaaaaactgcagacagacaatccaggctcaaggattgtatgcagaaagctcagaaatatcagtggcatgtggaagaccttgtgccatggatagaagattgtaaagctaagatgtctgagttgcgagtcactctggatccagtgcagctagagtccagtctcctaagatcaaaggctatgctgaatgaggtggagaagcgccgctccctgctggaaatattgaatagtgctgctgacattctgatcaattcttcagaagcagatgaggatggaatccgggatgagaaggctgggatcaaccagaacatggatgctgttacagaagagctgcaggccaaaacagggtcactcgaagaaatgactcagaggctcagggagttccaggaaagctttaagaatattgaaaagaaggttgaaggagccaaacaccaacttgagatctttgatgctctgggttctcaagcctgtagcaacaagaacctggagaagctaagagctcaacaggaagtgctgcaggccctagagcctcaggtagactatctgaggaactttactcagggtctggtagaagatgccccagatggatctgatgcttctcaacttctccaccaagctgaggtcgcccagcaagagttcctcgaagttaagcaaagagtgaacagtggttgtgtgatgatggaaaacaagctggaggggattggccagtttcactgccgggtccgagagatgttctctcaattggcagacctggatgatgagctagatggcatgggtgctattggcagagacactgatagcctccagtcccaaatcgaggatgtccggctattccttaacaaaattcacgtcctcaaattagacatagaggcctctgaagcagagtgtcgacatatgctagaagaagaggggactctggatttgttaggtctcaaaagggagctagaagccctgaacaaacagtgtggcaaactgacagagagggggaaagctcgtcaggaacagctggaactgacactaggccgtgtagaggacttctacaggaaattgaaaggactcaatgacgcgaccacagcagcagaggaggcagaggccctccagtgggtagtggggaccgaagtggaaatcatcaaccaacaattagcagattttaaaatgtttcagaaagaacaagtggatcctcttcagatgaaattgcagcaggtgaatggacttggccagggattaattcagagtgcaggaaaagactgtgatgtacagggtttagaacatgacatggaagagatcaatgctcgatggaatacattgaataaaaaggtcgcacaaagaattgcacagctacaggaagctttgttgcattgtgggaagtttcaagatgccttggagccattgctcagctggttggcagataccgaggagctcatagccaatcagaaacctccatctgctgagtataaagtggtgaaagcacagatccaagaacagaagttgctccagcggctcctagatgatcgaaaggccacagtagacatgcttcaagcagaaggaggcagaatagcccagtcagcagagctggctgatagagagaaaatcactggacagctggagagtcttgaaagtagatggactgaactactcagtaaggcagcagccaggcaaaaacagctggaagacatcctggttctggccaaacagttccatgagacagctgagcctatttctgacttcttatctgtcacagagaaaaagcttgctaactcagaacctgttggcactcagactgccaaaatacagcagcagatcattcggcacaaggctctggaagaagacatagaaaaccatgcaacagatgtgcaccaggcagtcaaaattgggcagtccctctcctccctgacatctcctgcagaacagggtgtgctgtcagaaaagatagactcattgcaggcccgatacagtgaaattcaagaccgctgttgtcggaaggcagccctacttgaccaagctctgtctaatgctaggctgtttggggaggatgaggtggaggtgctcaactggctggctgaggttgaggacaagctcagttcagtgttcgtaaaggatttcaaacaggatgtcctgcacaggcagcatgctgaccacctggctttaaatgaagaaattgttaatagaaagaagaatgtagatcaagctattaaaaatggtcaggctcttctaaaacaaaccacaggtgaggaggtgttacttatccaggaaaaactagatggtataaagactcgttacgcagacatcacagttactagctccaaggccctcagaactttagagcaagcccggcagctggccaccaagttccagtctacttatgaggaactgaccgggtggctgagggaggtggaggaggagctggcaaccagtggaggacagtctcccacaggggaacagataccccagtttcagcagagacagaaggaattaaagaaggaggtcatggagcacaggctggtgttggacacagtgaatgaggtgagccgtgctctcttagagctggtgccctggagagccagagaagggctggataaacttgtgtccgatgctaacgagcagtacaaactagtcagtgacactattggacaaagggtggatgaaattgatgctgctattcagagatcacaacagtatgagcaagctgccgatgcagaactagcttgggttgctgaaacaaaacggaaactgatggctctgggtccaattcgcctggaacaggaccagaccacagctcagcttcaggtacagaaggctttctccattgacattattcgacacaaagattcaatggatgaactcttcagtcaccgtagtgaaatctttggcacatgtggggaggagcaaaaaactgtattacaggaaaagacagagtctctaatacagcaatatgaagccattagcctactcaattcagagcgttatgcccgcctagagcgggcccaggtcttagtaaaccagttttgggaaacttatgaagagctcagcccctggattgaggaaactcgggcactaatagcacagttaccctctccagccattgatcatgagcagctcaggcagcaacaagaggaaatgaggcaattaagggaatctattgctgaacacaaacctcatattgacaaactactaaagataggcccacaactaaaggaattaaaccctgaggaaggggaaatggtggaagaaaaataccagaaagcagaaaacatgtatgcccaaataaaggaggaggtgcgccagcgagccctggctctggatgaagccgtgtcccagtccacacagattacagagtttcatgataaaattgagcctatgttggagacactggagaatctttcctctcgcctgcgtatgccaccactgatccctgctgaagtagacaagatcagagagtgcatcagtgacaataagagtgccaccgtggagctagaaaaactgcagccatcctttgaggccttgaagcgccgtggagaggagcttattggacgatctcagggagcagacaaggatctggctgcaaaagaaatccaggataaattggatcaaatggtattcttctgggaggacatcaaagctcgggctgaagaacgagaaatcaaatttcttgatgtccttgaattagcagagaagttctggtatgacatggcagctctcctgaccaccatcaaagacacccaggatattgtccatgacttggaaagcccaggcattgatccttccatcatcaaacaacaggttgaagctgctgagactattaaggaagagacagatggtctgcatgaagagctggagtttattcggatccttggagcagatttgatttttgcctgtggagaaactgagaagcctgaagtgaggaagagcattgatgagatgaataatgcttgggagaacttaaacaaaacatggaaagagaggctagaaaaacttgaggatgctatgcaagctgctgtgcagtatcaggacactcttcaggctatgtttgactggctagataacactgtgattaaactctgcaccatgccccctgttggcactgacctcaatactgttaaagatcagttaaatgaaatgaaggagttcaaagtagaagtttaccaacagcaaattgagatggagaagcttaatcaccagggtgaactgatgttaaagaaagctactgatgagacggacagagacattatacgagaaccactgacagaactcaaacacctctgggagaacctgggtgagaaaattgcccaccgacagcacaaactagaaggggctctgttggcccttggtcagttccagcatgccttagaggaactaatgagttggctgactcataccgaagagttgttagatgctcagagaccaataagtggagacccaaaagtcattgaagttgagctcgcaaagcaccatgtcctaaaaaatgatgttttggctcatcaagccacagtggaaacagtcaacaaagctggcaatgagcttcttgaatccagtgctggagatgatgccagcagcttaaggagccgtttggaagccatgaaccaagactgtacgtcacatttagaggcagcgagagagtagcagaatccaggtctgagctccatatgccacagtgcccagcatcatatgctatgctggtatatagtctagtggctgtcagttcaatggagagccagctttctgcatctaagcccacaggaggacttcctgaaactgctagggaacagcttgatacacatatggaactctattcccagctgaaagccaaggaagagacttataatcaactacttgacaagggcagactcatgcttctaagccgtgacgactctgggtctggctccaagacagaacagagtgtagcacttttggagcagaagtggcatgtggtcagcagtaagatggaagaaagaaagtcaaagctggaagaggccctcaacttggcaacagaattccagaattccctacaagaatttatcaactggctcactctagcagagcagagtttaaacatcgcttctccaccaagcctgattctaaatactgtcctttcccagatagaagagcacaaggtttttgctaatgaagtaaatgctcatcgagaccagatcattgagctggatcaaactgggaatcaattaaagttccttagccaaaagcaggatgttgttctgatcaagaatttgttggtgagcgtgcagtctcgatgggagaaggttgtccagcgatctattgaaagagggcgatcactagatgatgccaggaagcgggcaaaacaattccatgaagcttggaaaaaactgattgactggctagaagatgcagagagtcacctggactcagaactagagatatccaatgacccagacaaaattaaacttcagctttctaagcataaggagtttcagaagactcttggtggcaagcagcctgtgtatgataccacaattagaactggcagagcactgaaagaaaagactttgcttcccgaagatactcagaaacttgacaatttcctaggagaagtcagagacaaatgggatactgtttgtggcaagtctgtggagcggcagcacaagttggaggaagccctgctcttttcgggtcagttcatggatgctttgcaggcattggttgactggttatacaaggtggagccacagctggctgaggaccagcccgtgcacggggaccttgacctcgtcatgaacctcatggatgcacacaaggttttccagaaggaactgggaaagcgaacaggaaccgttcaggtcctgaagcggtcaggccgagagctgattgagaatagtcgagatgacaccacttgggtaaaaggacagctccaggaactgagcactcgctgggacactgtctgtaaactctctgtttccaaacaaagccggcttgagcaggccttaaaacaagcggaagtgtttcgagacacagtccacatgctgttggagtggctttctgaagcagagcaaacgcttcgctttcggggagcacttcctgatgacacagaggccctgcagtctctcattgacacccataaggaattcatgaagaaagtagaagaaaagcgagtggacgttaactcagcagtagccatgggagaagtcatcctggctgtctgccaccccgattgcatcacaaccatcaaacactggatcaccatcatccgagctcgcttcgaggaggtcctgacatgggctaagcagcaccagcagcgtcttgaaacggccttgtcagaactggtggctaatgctgagctcctggaagaacttctggcatggatccagtgggctgagaccaccctcattcagcgggatcaggagccaatcccgcagaacattgaccgagttaaagcccttatcgctgagcatcagacatttatggaggagatgactcgcaaacagcctgacgtggaccgggtcaccaagacatacaaaaggaaaaacatagagcctactcacgcgcctttcatagagaaatcccgcagcggaggcaggaaatccctaagtcagccaacccctcctcccatgccaatcctttcacagtctgaagcaaaaaacccacggatcaaccagctttctgcccgctggcagcaggtgtggctgttagcactggagcggcaaaggaaactgaatgatgccttggatcggctggaggagttgaaagaatttgccaactttgactttgatgtctggaggaaaaagtatatgcgttggatgaatcacaaaaagtctcgagtgatggatttcttccggcgcattgataaggaccaggatgggaagataacacgtcaggagtttatcgatggcattttagcatccaagttccccaccaccaagttagagatgactgctgtggctgacattttcgaccgagatggggatggttacattgattattatgaatttgtggctgctcttcatcccaacaaggatgcgtatcgaccaacaaccgatgcagataaaatcgaagatgaggttacaagacaagtggctcagtgcaaatgtgcaaaaaggtttcaggtggagcagatcggagagaataaataccggttcttcctcggcaatcagtttggggattctcagcagttgcggctggtccgtattctgcgcagcaccgtgatggttcgcgttggtggaggatggatggccttggatgaatttttagtgaaaaatgatccctgccgagcacgaggtagaactaacattgaacttagagagaaattcatcctaccagagggagcatcccagggaatgacccccttccgctcacggggtcgaaggtccaaaccatcttcccgggcagcttcccctactcgttccagctccagtgctagtcagagtaaccacagctgtacatccatgccatcttctccagccaccccagccagtggaaccaaggttatcccatcatcaggtagcaagttgaaacgaccaacaccaacttttcattctagtcggacatcccttgctggtgataccagcaatagttcttccccggcctccacaggtgccaaaactaatcgggcagaccctaaaaagtctgccagtcgccctgggagtcgggctgggagtcgagccgggagtcgagccagcagccggcgaggaagtgacgcttctgactttgacctcttagagacgcagtctgcttgttccgacacttcagaaagcagcgctgcagggggccaaggcaactccaggagagggctaaacaaaccttccaaaatcccaaccatgtctaagaagaccaccactgcctcccccaggactccaggtcccaagcgataacactgtctaagcacccccaagccactatccactttgaatcctgctccatacattgggtgtatatttattctgaacgggagaagttatattgttaaaagtgtaaaagaataattgtgttatgaagctgccttattttttttctttttgtaagttactattttcatgtgaatatttatgtagataaaatttgcctcctggtaaccctgtaatggatggggcccagaaatgaaatatttgagaaaaacaagtgaaaaggtcaagatacaaatgtgtattaaaaaaaaaaaagcctattaatagggtttctgcgcggtgagacgccctcaccgctaaaacttcaaagaaaaagtactcataaaaaaagtcttaccccccatg

SEQ ID NO: 367616 - DNA, 17598 bp, Homo sapiens
  misc_feature (995)..(995): n is a, c, g, or t
  misc_feature (1066)..(1066): n is a, c, g, or t
  misc_feature (1076)..(1076): n is a, c, g, or t
tcaaaacaccatctattaaagctgacaattgtcacaagcagaattgaatactcaaagggaagttaacttcacacagaaaaacacttcatatttcattcaacttgcaacgtatttactgagcgtctaccgtgtgtaaggcagcctgctaggaaatggggtacgaccctcctcctcacagagcttacattctgacaggggaacccgaagtgaacaagcatgatctgcaacaggtatgagatgtcaagaaagcctattacagaggcacccaggcccagtctacggggtcactaaaggctatgggataaactgatctgaaggatgagcacaaatcaatcatcgagaggctgagagcagctcaagtcgggggaataagatgtgcgagaagcaggagagagcaggatgaaataaaatcaggcccgtgtgatgcgtggtgaacagtgagtacccagagaagcgaagctgggggctgaggggctggtcaggaacacgggcttaattcatcaacccaacagcaaacatcagtgcaacaatgtaagcacatttaccttctgggtcataatgtaatttcttccaaagccagtggtggcactcagatatttgatcagaggattgacagattcaggcttttggtggaaaagccatacctggaaaggaaggatgtgtcaatgatttgtttcttctgcccaaggtgagtgaggctggtggagagtcactatctgcactttatagagctccccagacaaattataaacatcctctcaaatatcatcagtgaatggtttggcaaatatattgagaaccaattaaaatatagtttaaaagcacttgcttctacaaccaatttgtattcccacaataaatgtatttatttctgtaacacttaccaaaacaagagcatcaaagccaattccttcacactgccctccctcccacctgctcttcatgaggagtcctttattcctgcatgtttcctgttctttgggccggaattccgnggcgcgatgtcggctcactacaacctctgcctcctggattcaagcaattctgtacctcagcctcccgagtngctgtgattncagatgaacgggaccgggttcagaagaaaacgttcaccaagtgggtcaacaagcacttaatgaaggtccgcaagcacatcaatgatctttatgaagatctgcgggatggccataacctgatctctctgttggaggtcctctcaggcatcaaactgccccgggagaagggcaggatgcgttttcataggctgcagaatgtgcagattgccctggacttcctaaagcagcgacaggtgaaactagtgaatattcgcaatgatgacatcacagatggcaaccccaagttgaccctgggtctgatctggaccattattttgcatttccagatctctgacatctacattagtggagaatcaggggatatgtcagccaaggagaaactactcctgtggacccagaaggtgacagctggttacacaggaatcaaatgcaccaacttttcctcctgctggagtgatgggaagatgttcaatgcactcattcaccgataccgacccgatctagtagacatggagagggtgcaaatccaaagtaaccgagagaatctggaacaagcttttgaagtggcagaaagactgggggtcactcgcctgctggatgcagaagatgtggatgtgccatctccagatgaaaagtctgtaatcacttatgtgtcttcgatttatgatgccttccctaaagttcctgagggtggagaagggatcagtgctacggaagtggactccaggtggcaagaataccaaagccgagtggactccctcattccctggatcaaacagcatacaatactgatgtcagataaaacttttccccaaaaccctgttgaactaaaggcactttataaccaatatatacacttcaaagaaacagaaattctggccaaggagagagaaaaaggaagaattgaggaattatataaattactagaggtgtggattgaatttggccgaattaaactgcctcaaggttatcaccctaatgatgtggaagaagagtggggaaagctcatcatagagatgctggaacgagagaaatcacttcggccggctgtggagaggctggaattgctgctacagattgcaaacaaaatccagaatggtgctttgaactgtgaagaaaaactgacactagctaagaatacactgcaggctgatgctgctcacctggaatcaggacaaccggtacaatgtgagtcagatgtcattatgtacattcaagagtgtgaaggtctcatcaggcagctgcaggtggatctccagatcctgcgggatgagaattactaccagctagaagagctggcttttagggtcatgcgtcttcaggatgagctggtcaccttgcgtctagagtgtacaaacctgtaccggaagggtcatttcacttcacttgaattggttccaccctctactttaaccaccactcatctgaaagcagaacccttaaccaaggcaacccattcttcttctacctcctggttccgaaagcctatgactcgggctgaacttgggccatcagctcctctgaagatgaaggcaatctccgatttgtgtatgaactactgtctttgggtagaagagatgcagatgaaactggagcgagcagagtggggcaatgacctgcctagtgtggagttgcagctagaaacacagcagcacatccatacgagtgtagaagagctgggctcaagtgtcaaggaggccaggttgtatgagggaaagatgtcccagaatttccataccagctatgctgaaactcttggaaagctggagacacagtattgtaaattgaaggaaacttctagcttccggatgaggcaccttcagagcctgcataaatttgtttccagagctacagctgagttgatctggttgaatgagaaggaggaggaggaactagcatatgactggagtgacaacaattccaatatctcagccaagagaaattacttctctgagttgacaatggaactggaggagaaacaggatgtgtttcgttctctacaagatacagcagaactactttcacttgagaaccacccagccaagcagacagtggaggcttacagtgctgctgtccagtcccagttgcagtggatgaagcagctgtgcctgtgtgttgagcagcatgtgaaagagaatactgcttattttcagttcttcagtgatgcacgagagctggagtcattcttgaggaacctccaagattccattaaacgaaaatattcctgtgaccacaacaccagcttatcccgccttgaagacctgctccaggactccatggatgaaaaggagcagcttatacagtccaagagttccgttgccagtctcgttgggagatcaaaaaccatcgttcagctaaaaccacgcagtccagaccatgtgttaaagaacaccatttctgtcaaggctgtctgtgactacaggcagatcgagattactatttgcaaaaatgatgaatgtgtgctagaagataattctcagcggaccaaatggaaagtgatcagccccacagggaacgaggcaatggtgccgtcagtctgcttcctcatccccccacccaataaggatgccattgagatggccagcagggtcgaacaatcttatcagaaggttatggccctttggcatcagctgcatgttaacaccaaaagccttatctcttggaactatctgcgtaaagaccttgaccttgtacagacctggaacctagaaaagcttcgatcctcagcaccaggggagtgccatcagattatgaagaaccttcaggcccactatgaagactttctgcaggatagtcgtgactctgtgctgttctcagtggctgatcgcttgcgcttggaagaggaggtggaagcttgtaaagcccgcttccagcacctgatgaagtccatggagaatgaggacaaagaggagactgtggccaagatgtacatttcagagttgaagaacatccggctacgcctggaggagtatgaacagagggtggtcaaacgaattcagtctctagccagctctaggactgacagagatgcctggcaggacaatgcattaaggattgcagagcaagagcacacccaggaggatttacagcaattgaggtcagacttggatgcagtttctatgaaatgtgacagctttctccatcagtctccatctagttcaagtgtcccaactctgcgctcagaactgaatctgctggtggagaagatggaccatgtctatggtctctctactgtatatctgaataagttaaagacagttgatgttatagtacgtagcatacaggatgctgaactcttggtcaaaggttatgagattaagctgagtcaagaagaagtagtactggcagatctctcagctctggaggcccattggtcgacattacggcactggcttagtgatgtgaaggacaagaattcagtgttttcagtcctggatgaggaaattgccaaggccaaggtagtggcagagcagatgagtcgtctgacaccagagcgaaatctggatttggagcgctatcaggaaaaaggctcccagctgcaggagcgttggcaccgagtcattgcccagctcgagattcgccaatctgagctagaaagtatccaggaagttctgggagattaccgagcctgccatggaactctcatcaagtggattgaggaaaccactgcccagcaggaaatgatgaagccaggccaggcagaggatagcagagtgctttcggagcagctcagccagcagacggccctatttgcagaaattgagagaaatcagacaaaactggatcaatgtcaaaaattttcccagcagtactctactattgtaaaggactatgaattgcaactgatgacatacaaggcctttgtggaatcgcagcagaaatcccctggcaagcgccgtcgcatgctttcctcttcagatgccatcactcaagagttcatggacttaaggactcgctacacggcattggtgactttaacaactcagcacgtgaaatacatcagtgatgcactccggcgtctggaggaggaggagaaagtggtagaagaggagaaacaagaacatgtggagaaggttaaagaacttttgggctgggtgtctaccctagcgaggaatacacaaggaaaagctacctcatccgagaccaaagaatcaacagacattgaaaaagctattttggaacagcaggttctgtcagaagagctgacaacaaagaaagaacaagtctctgaagctattaaaacatcacagatcttcttggccaagcatggtcataagctctcagaaaaagagaagaaacaaatatctgagcaattgaatgccctaaacaaggcttaccatgacctttgtgatggttctgcaaatcagcttcagcagcttcagagccagttggctcaccagacagaacaaaagaccctgcagaaacaacaaaatacctgtcaccagcaactggaggatctttgcagttgggtaggacaggcagaaagagcactggcaggccaccaaggcagaaccacccagcaggatctctctgctttgcagaagaaccaaagtgacttgaaggatttacaggatgacattcagaatcgtgccacctcatttgccactgttgtcaaggacattgaggggttcatggaagagaatcagaccaagctgagcccacgtgagttgacagctcttcgggaaaagcttcatcaggctaaggagcaatatgaggcgctccaggaagagacacgtgtggcccagaaggaactggaggaagcagtgacctccgccttacagcaggagactgaaaagagtaaagcagcaaaggaactggcagagaacaagaagaagatcgatgctctcctggattgggtaacttcagtaggatcatctggtggacagctgctgaccaaccttccaggaatggagcagctctcgggagctagcttggagaaaggagccttggacaccactgatggttacatgggggtgaatcaagccccagagaaactggacaagcaatgtgagatgatgaaggcccgtcaccaagaattgctgtcccagcagcaaaatttcattctggccacccagtcagctcaggccttcttggatcagcatggccacaatctcacacctgaggagcaacagatgctgcaacagaagctgggagagctaaaggaacaatactctacttccctggcccaatcagaggcagaactgaagcaggtgcagacacttcaggatgagttgcagaaatttctgcaggatcataaagagtttgaaagctggttggaacgatccgagaaagagctggagaacatgcataagggaggcagcagccccgagacccttccctccctgctaaagcggcaaggaagcttctcagaggatgtcatttcccacaaaggagacttgagatttgtgactatctcaggacagaaagtcttggacatggaaaacagttttaaggaaggcaaagaaccatcagaaattggaaacttagtaaaggacaagttgaaggatgcaacagaaagatacactgctctccactcaaagtgtacacgattaggatctcacctgaatatgctgttaggccagtatcatcaattccaaaacagtgctgacagcctgcaggcctggatgcaggcttgtgaggccaacgtggagaagctcctctcagatactgttgcctctgaccctggagttctccaggagcagcttgcaacaacaaagcagttgcaggaggaattggctgagcaccaagtacctgtggaaaaactccaaaaagtagctcgtgacataatggaaattgaaggggagccagccccagaccacaggcatgttcaagaaactacagattccatactcagccacttccaaagcctctcctatagcctggctgagcgatcttctctgctgcagaaagcaattgcccaatctcagagtgtccaggaaagcctggagagcctgttgcagtctattggggaagttgaacaaaacctggaagggaagcaggtgtcatcactctcatcaggagtcatccaggaagccttagccacaaatatgaaattgaagcaggacattgctcggcaaaagagcagcttggaggccacccgtgagatggtgacccgattcatggagacagcagacagtactacagcagcagtgctgcagggcaaactggcagaggtgagccagcggttcgaacagctctgtctacagcagcaagaaaaggagagctccctaaagaagcttctaccccaggcagagatgtttgaacacctctctggtaagctgcagcagttcatggaaaacaaaagtcggatgctggcctctggaaatcagccagatcaagatattacacatttcttccaacagatccaggagctcaatttggaaatggaagaccaacaggagaacctagatactcttgagcacctggtcactgaactgagctcttgtggctttgcgctggacttgtgccagcatcaggacagggtacagaatctaagaaaagacttcacagagctacagaagacagttaaagagagagagaaagatgcatcatcttgccaggaacagttggatgaattccggaagctggtcaggaccttccagaaatggttgaaagaaactgaagggagtattccacctacggaaacttctatgagtgctaaagagttagaaaagcagattgaacacctgaagagtctactagatgactgggcaagtaagggaactctggtggaagaaatcaattgcaaaggtacttctttagaaaatctcatcatggaaatcacagcacctgattcccaaggcaagacagatctgacggagatccagtgtgacatgtcagatgtaaacttgaagtatgagaaactagggggagtacttcatgaacgccaggaaagccttcaggctatcctcaacagaatggaggaggttcacaaggaggcaaactctgtgctgcagtggctggaatcaaaagaggaagtcctgaaatccatggatgccatgtcatctccaaccaagacagaaacagtgaaagcccaagctgaatctaacaaggccttcctggctgagttggaacagaattctccaaaaattcaaaaagtaaaggaagccctggctggattactggtgacatatcccaactcacaggaagcagaaaattggaagaaaattcaggaagaactcaattcccgatgggaaagggccactgaggttactgtggctcggcaaaggcagctagaggaatctgcaagtcatctggcctgcttccaggctgcagaatcccagctccggccgtggctgatggagaaagaactgatgatgggagtgctggggcccctgtctattgaccccaacatgttgaatgcacaaaagcaacaggtccagtttatgctaaaggaatttgaagcacgcaggcaacagcatgagcaactgaatgaggcagctcagggcatcctaacaggccctggagatgtctctctgtccaccagccaagtacagaaagaactccagagcatcaatcagaaatgggttgagctgactgacaaactcaactcccgttccagccaaattgaccaagctattgttaagagcacccagtaccaggaactgctccaggacttatcagagaaggtgagggcagttggacaacggctgagtgtccagtcagctatcagcacccaaccagaggctgtaaagcagcaattggaagagaccagtgaaattcgatctgacttggagcagttagaccacgaggttaaggaggctcagacactgtgcgatgaactctcagtgctcattggtgagcagtacctcaaggatgaactgaagaagcgtttggagacagttgccctgcctctccaaggtttagaagaccttgcagccgatcgcattaacagactccaggcagctcttgccagcacccagcagttccagcaaatgtttgatgagttgaggacctggttggatgataaacaaagccagcaagcaaaaaactgcccaatttctgcaaaattggagcggctacagtctcagctacaggagaatgaagagtttcagaaaagtcttaatcaacacagtggctcctatgaggtgattgtggctgaaggggaatctctacttctttctgtacctcctggagaagagaaaaggactctacaaaaccagttggttgagctcaaaaaccattgggaagagcttagtaaaaaaactgcagacagacaatccaggctcaaggattgtatgcagaaagctcagaaatatcagtggcatgtggaagaccttgtgccatggatagaagattgtaaagctaagatgtctgagttgcgagtcactctggatccagtgcagctagagtccagtctcctaagatcaaaggctatgctgaatgaggtggagaagcgccgctccctgctggaaatattgaatagtgctgctgacattctgatcaattcttcagaagcagatgaggatggaatccgggatgagaaggctgggatcaaccagaacatggatgctgttacagaagagctgcaggccaaaacagggtcactcgaagaaatgactcagaggctcagggagttccaggaaagctttaagaatattgaaaagaaggttgaaggagccaaacaccaacttgagatctttgatgctctgggttctcaagcctgtagcaacaagaacctggagaagctaagagctcaacaggaagtgctgcaggccctagagcctcaggtagactatctgaggaactttactcagggtctggtagaagatgccccagatggatctgatgcttctcaacttctccaccaagctgaggtcgcccagcaagagttcctcgaagttaagcaaagagtgaacagtggttgtgtgatgatggaaaacaagctggaggggattggccagtttcactgccgggtccgagagatgttctctcaattggcagacctggatgatgagctagatggcatgggtgctattggcagagacactgatagcctccagtcccaaatcgaggatgtccggctattccttaacaaaattcacgtcctcaaattagacatagaggcctctgaagcagagtgtcgacatatgctagaagaagaggggactctggatttgttaggtctcaaaagggagctagaagccctgaacaaacagtgtggcaaactgacagagagggggaaagctcgtcaggaacagctggaactgacactaggccgtgtagaggacttctacaggaaattgaaaggactcaatgacgcgaccacagcagcagaggaggcagaggccctccagtgggtagtggggaccgaagtggaaatcatcaaccaacaattagcagattttaaaatgtttcagaaagaacaagtggatcctcttcagatgaaattgcagcaggtgaatggacttggccagggattaattcagagtgcaggaaaagactgtgatgtacagggtttagaacatgacatggaagagatcaatgctcgatggaatacattgaataaaaaggtcgcacaaagaattgcacagctacaggaagctttgttgcattgtgggaagtttcaagatgccttggagccattgctcagctggttggcagataccgaggagctcatagccaatcagaaacctccatctgctgagtataaagtggtgaaagcacagatccaagaacagaagttgctccagcggctcctagatgatcgaaaggccacagtagacatgcttcaagcagaaggaggcagaatagcccagtcagcagagctggctgatagagagaaaatcactggacagctggagagtcttgaaagtagatggactgaactactcagtaaggcagcagccaggcaaaaacagctggaagacatcctggttctggccaaacagttccatgagacagctgagcctatttctgacttcttatctgtcacagagaaaaagcttgctaactcagaacctgttggcactcagactgccaaaatacagcagcagatcattcggcacaaggctctggaagaagacatagaaaaccatgcaacagatgtgcaccaggcagtcaaaattgggcagtccctctcctccctgacatctcctgcagaacagggtgtgctgtcagaaaagatagactcattgcaggcccgatacagtgaaattcaagaccgctgttgtcggaaggcagccctacttgaccaagctctgtctaatgctaggctgtttggggaggatgaggtggaggtgctcaactggctggctgaggttgaggacaagctcagttcagtgttcgtaaaggatttcaaacaggatgtcctgcacaggcagcatgctgaccacctggctttaaatgaagaaattgttaatagaaagaagaatgtagatcaagctattaaaaatggtcaggctcttctaaaacaaaccacaggtgaggaggtgttacttatccaggaaaaactagatggtataaagactcgttacgcagacatcacagttactagctccaaggccctcagaactttagagcaagcccggcagctggccaccaagttccagtctacttatgaggaactgaccgggtggctgagggaggtggaggaggagctggcaaccagtggaggacagtctcccacaggggaacagataccccagtttcagcagagacagaaggaattaaagaaggaggtcatggagcacaggctggtgttggacacagtgaatgaggtgagccgtgctctcttagagctggtgccctggagagccagagaagggctggataaacttgtgtccgatgctaacgagcagtacaaactagtcagtgacactattggacaaagggtggatgaaattgatgctgctattcagagatcacaacagtatgagcaagctgccgatgcagaactagcttgggttgctgaaacaaaacggaaactgatggctctgggtccaattcgcctggaacaggaccagaccacagctcagcttcaggtacagaaggctttctccattgacattattcgacacaaagattcaatggatgaactcttcagtcaccgtagtgaaatctttggcacatgtggggaggagcaaaaaactgtattacaggaaaagacagagtctctaatacagcaatatgaagccattagcctactcaattcagagcgttatgcccgcctagagcgggcccaggtcttagtaaaccagttttgggaaacttatgaagagctcagcccctggattgaggaaactcgggcactaatagcacagttaccctctccagccattgatcatgagcagctcaggcagcaacaagaggaaatgaggcaattaagggaatctattgctgaacacaaacctcatattgacaaactactaaagataggcccacaactaaaggaattaaaccctgaggaaggggaaatggtggaagaaaaataccagaaagcagaaaacatgtatgcccaaataaaggaggaggtgcgccagcgagccctggctctggatgaagccgtgtcccagtccacacagattacagagtttcatgataaaattgagcctatgttggagacactggagaatctttcctctcgcctgcgtatgccaccactgatccctgctgaagtagacaagatcagagagtgcatcagtgacaataagagtgccaccgtggagctagaaaaactgcagccatcctttgaggccttgaagcgccgtggagaggagcttattggacgatctcagggagcagacaaggatctggctgcaaaagaaatccaggataaattggatcaaatggtattcttctgggaggacatcaaagctcgggctgaagaacgagaaatcaaatttcttgatgtccttgaattagcagagaagttctggtatgacatggcagctctcctgaccaccatcaaagacacccaggatattgtccatgacttggaaagcccaggcattgatccttccatcatcaaacaacaggttgaagctgctgagactattaaggaagagacagatggtctgcatgaagagctggagtttattcggatccttggagcagatttgatttttgcctgtggagaaactgagaagcctgaagtgaggaagagcattgatgagatgaataatgcttgggagaacttaaacaaaacatggaaagagaggctagaaaaacttgaggatgctatgcaagctgctgtgcagtatcaggacactcttcaggctatgtttgactggctagataacactgtgattaaactctgcaccatgccccctgttggcactgacctcaatactgttaaagatcagttaaatgaaatgaaggagttcaaagtagaagtttaccaacagcaaattgagatggagaagcttaatcaccagggtgaactgatgttaaagaaagctactgatgagacggacagagacattatacgagaaccactgacagaactcaaacacctctgggagaacctgggtgagaaaattgcccaccgacagcacaaactagaaggggctctgttggcccttggtcagttccagcatgccttagaggaactaatgagttggctgactcataccgaagagttgttagatgctcagagaccaataagtggagacccaaaagtcattgaagttgagctcgcaaagcaccatgtcctaaaaaatgatgttttggctcatcaagccacagtggaaacagtcaacaaagctggcaatgagcttcttgaatccagtgctggagatgatgccagcagcttaaggagccgtttggaagccatgaaccaagactgtacgtcacatttagaggcagcgagagagtagcagaatccaggtctgagctccatatgccacagtgcccagcatcatatgctatgctggtatatagtctagtggctgtcagttcaatggagagccagctttctgcatctaagcccacaggaggacttcctgaaactgctagggaacagcttgatacacatatggaactctattcccagctgaaagccaaggaagagacttataatcaactacttgacaagggcagactcatgcttctaagccgtgacgactctgggtctggctccaagacagaacagagtgtagcacttttggagcagaagtggcatgtggtcagcagtaagatggaagaaagaaagtcaaagctggaagaggccctcaacttggcaacagaattccagaattccctacaagaatttatcaactggctcactctagcagagcagagtttaaacatcgcttctccaccaagcctgattctaaatactgtcctttcccagatagaagagcacaaggtttttgctaatgaagtaaatgctcatcgagaccagatcattgagctggatcaaactgggaatcaattaaagttccttagccaaaagcaggatgttgttctgatcaagaatttgttggtgagcgtgcagtctcgatgggagaaggttgtccagcgatctattgaaagagggcgatcactagatgatgccaggaagcgggcaaaacaattccatgaagcttggaaaaaactgattgactggctagaagatgcagagagtcacctggactcagaactagagatatccaatgacccagacaaaattaaacttcagctttctaagcataaggagtttcagaagactcttggtggcaagcagcctgtgtatgataccacaattagaactggcagagcactgaaagaaaagactttgcttcccgaagatactcagaaacttgacaatttcctaggagaagtcagagacaaatgggatactgtttgtggcaagtctgtggagcggcagcacaagttggaggaagccctgctcttttcgggtcagttcatggatgctttgcaggcattggttgactggttatacaaggtggagccacagctggctgaggaccagcccgtgcacggggaccttgacctcgtcatgaacctcatggatgcacacaaggttttccagaaggaactgggaaagcgaacaggaaccgttcaggtcctgaagcggtcaggccgagagctgattgagaatagtcgagatgacaccacttgggtaaaaggacagctccaggaactgagcactcgctgggacactgtctgtaaactctctgtttccaaacaaagccggcttgagcaggccttaaaacaagcggaagtgtttcgagacacagtccacatgctgttggagtggctttctgaagcagagcaaacgcttcgctttcggggagcacttcctgatgacacagaggccctgcagtctctcattgacacccataaggaattcatgaagaaagtagaagaaaagcgagtggacgttaactcagcagtagccatgggagaagtcatcctggctgtctgccaccccgattgcatcacaaccatcaaacactggatcaccatcatccgagctcgcttcgaggaggtcctgacatgggctaagcagcaccagcagcgtcttgaaacggccttgtcagaactggtggctaatgctgagctcctggaagaacttctggcatggatccagtgggctgagaccaccctcattcagcgggatcaggagccaatcccgcagaacattgaccgagttaaagcccttatcgctgagcatcagacatttatggaggagatgactcgcaaacagcctgacgtggaccgggtcaccaagacatacaaaaggaaaaacatagagcctactcacgcgcctttcatagagaaatcccgcagcggaggcaggaaatccctaagtcagccaacccctcctcccatgccaatcctttcacagtctgaagcaaaaaacccacggatcaaccagctttctgcccgctggcagcaggtgtggctgttagcactggagcggcaaaggaaactgaatgatgccttggatcggctggaggagttgaaagaatttgccaactttgactttgatgtctggaggaaaaagtatatgcgttggatgaatcacaaaaagtctcgagtgatggatttcttccggcgcattgataaggaccaggatgggaagataacacgtcaggagtttatcgatggcattttagcatccaagttccccaccaccaagttagagatgactgctgtggctgacattttcgaccgagatggggatggttacattgattattatgaatttgtggctgctcttcatcccaacaaggatgcgtatcgaccaacaaccgatgcagataaaatcgaagatgaggttacaagacaagtggctcagtgcaaatgtgcaaaaaggtttcaggtggagcagatcggagagaataaataccgggtaaggaagagaaaaagcagtcctttgttgtggtggtttctcatatgtggctgatcccaccttttcctcctgatgcttagaggcccagagcccatcggacttgagatgtggtcactctctgacctcatctctatagatgccaagtgtcaggtaccctgttacatctgaaaactagtcccatatctacctagatagtagtagtttgtatttaagttttaagataggagatatttcagagctgtcacttcacatctgacaaagttcctagggggatgaaggtacctttggaaacaattatatctattgactgaccacttgcccacaaagagatggtcattgtgagcctgagtggctcccaggctagagaggcctggggaaactgtgttgaagccccaacagacactgtgcctgctctgagctgggctacaaatggggcccaggagcactgaggagacatcaggctcagtggtcttccctggaaagccatgctaggtgtggccataactgacagtgaactatacttgtgttttagcttcttttgggaccagggtcagggacatagaaggatctgaaacaggtctcctaaaatatatcaacagctcgtcaagattctctaaagtcctaagaaaaatctatgattggcaaagaggatttagattgcactaagaaacacaggaaggtccatgtttcattagtatatccaaaatgtcctcaaagtacaccaaatctaccccatgctgcagtctcctgaggagtgctgggtgaatctgctttgaatataacctagggcatttagttaataaagctccatataatcttatgcctgcttgttggattttgttttcttgttttttgtttttaattatctatgagagaaatgaattaacaagaacaacatagcatggagagttagttcatagtttataaaaccacatccctggccgggcgtggtggctcacacctgtaattccagaattttggaaggtagagaggcgagcgagcggatcacttgaggtcaggaattcgagaccaacctggccaacatggtgaaacaccctctctactaataacacaaaaattagctgggcttggtagcgcatgcctgtaatcccaactactagggaggctgaggcaggagaattgcttgaacgccggggtcggaggttgcagtgagccatgatcgcgccactgcactccagcctgggcaacagagcgagactctca

SEQ ID NO: 367617 - DNA, 16165 bp, Homo sapiens
  misc_feature (995)..(995): n is a, c, g, or t
  misc_feature (1066)..(1066): n is a, c, g, or t
  misc_feature (1076)..(1076): n is a, c, g, or t
tcaaaacaccatctattaaagctgacaattgtcacaagcagaattgaatactcaaagggaagttaacttcacacagaaaaacacttcatatttcattcaacttgcaacgtatttactgagcgtctaccgtgtgtaaggcagcctgctaggaaatggggtacgaccctcctcctcacagagcttacattctgacaggggaacccgaagtgaacaagcatgatctgcaacaggtatgagatgtcaagaaagcctattacagaggcacccaggcccagtctacggggtcactaaaggctatgggataaactgatctgaaggatgagcacaaatcaatcatcgagaggctgagagcagctcaagtcgggggaataagatgtgcgagaagcaggagagagcaggatgaaataaaatcaggcccgtgtgatgcgtggtgaacagtgagtacccagagaagcgaagctgggggctgaggggctggtcaggaacacgggcttaattcatcaacccaacagcaaacatcagtgcaacaatgtaagcacatttaccttctgggtcataatgtaatttcttccaaagccagtggtggcactcagatatttgatcagaggattgacagattcaggcttttggtggaaaagccatacctggaaaggaaggatgtgtcaatgatttgtttcttctgcccaaggtgagtgaggctggtggagagtcactatctgcactttatagagctccccagacaaattataaacatcctctcaaatatcatcagtgaatggtttggcaaatatattgagaaccaattaaaatatagtttaaaagcacttgcttctacaaccaatttgtattcccacaataaatgtatttatttctgtaacacttaccaaaacaagagcatcaaagccaattccttcacactgccctccctcccacctgctcttcatgaggagtcctttattcctgcatgtttcctgttctttgggccggaattccgnggcgcgatgtcggctcactacaacctctgcctcctggattcaagcaattctgtacctcagcctcccgagtngctgtgattncagatgaacgggaccgggttcagaagaaaacgttcaccaagtgggtcaacaagcacttaatgaaggtccgcaagcacatcaatgatctttatgaagatctgcgggatggccataacctgatctctctgttggaggtcctctcaggcatcaaactgccccgggagaagggcaggatgcgttttcataggctgcagaatgtgcagattgccctggacttcctaaagcagcgacaggtgaaactagtgaatattcgcaatgatgacatcacagatggcaaccccaagttgaccctgggtctgatctggaccattattttgcatttccagatctctgacatctacattagtggagaatcaggggatatgtcagccaaggagaaactactcctgtggacccagaaggtgacagctggttacacaggaatcaaatgcaccaacttttcctcctgctggagtgatgggaagatgttcaatgcactcattcaccgataccgacccgatctagtagacatggagagggtgcaaatccaaagtaaccgagagaatctggaacaagcttttgaagtggcagaaagactgggggtcactcgcctgctggatgcagaagatgtggatgtgccatctccagatgaaaagtctgtaatcacttatgtgtcttcgatttatgatgccttccctaaagttcctgagggtggagaagggatcagtgctacggaagtggactccaggtggcaagaataccaaagccgagtggactccctcattccctggatcaaacagcatacaatactgatgtcagataaaacttttccccaaaaccctgttgaactaaaggcactttataaccaatatatacacttcaaagaaacagaaattctggccaaggagagagaaaaaggaagaattgaggaattatataaattactagaggtgtggattgaatttggccgaattaaactgcctcaaggttatcaccctaatgatgtggaagaagagtggggaaagctcatcatagagatgctggaacgagagaaatcacttcggccggctgtggagaggctggaattgctgctacagattgcaaacaaaatccagaatggtgctttgaactgtgaagaaaaactgacactagctaagaatacactgcaggctgatgctgctcacctggaatcaggacaaccggtacaatgtgagtcagatgtcattatgtacattcaagagtgtgaaggtctcatcaggcagctgcaggtggatctccagatcctgcgggatgagaattactaccagctagaagagctggcttttagggtcatgcgtcttcaggatgagctggtcaccttgcgtctagagtgtacaaacctgtaccggaagggtcatttcacttcacttgaattggttccaccctctactttaaccaccactcatctgaaagcagaacccttaaccaaggcaacccattcttcttctacctcctggttccgaaagcctatgactcgggctgaacttgggccatcagctcctctgaagatgaaggcaatctccgatttgtgtatgaactactgtctttgggtagaagagatgcagatgaaactggagcgagcagagtggggcaatgacctgcctagtgtggagttgcagctagaaacacagcagcacatccatacgagtgtagaagagctgggctcaagtgtcaaggaggccaggttgtatgagggaaagatgtcccagaatttccataccagctatgctgaaactcttggaaagctggagacacagtattgtaaattgaaggaaacttctagcttccggatgaggcaccttcagagcctgcataaatttgtttccagagctacagctgagttgatctggttgaatgagaaggaggaggaggaactagcatatgactggagtgacaacaattccaatatctcagccaagagaaattacttctctgagttgacaatggaactggaggagaaacaggatgtgtttcgttctctacaagatacagcagaactactttcacttgagaaccacccagccaagcagacagtggaggcttacagtgctgctgtccagtcccagttgcagtggatgaagcagctgtgcctgtgtgttgagcagcatgtgaaagagaatactgcttattttcagttcttcagtgatgcacgagagctggagtcattcttgaggaacctccaagattccattaaacgaaaatattcctgtgaccacaacaccagcttatcccgccttgaagacctgctccaggactccatggatgaaaaggagcagcttatacagtccaagagttccgttgccagtctcgttgggagatcaaaaaccatcgttcagctaaaaccacgcagtccagaccatgtgttaaagaacaccatttctgtcaaggctgtctgtgactacaggcagatcgagattactatttgcaaaaatgatgaatgtgtgctagaagataattctcagcggaccaaatggaaagtgatcagccccacagggaacgaggcaatggtgccgtcagtctgcttcctcatccccccacccaataaggatgccattgagatggccagcagggtcgaacaatcttatcagaaggttatggccctttggcatcagctgcatgttaacaccaaaagccttatctcttggaactatctgcgtaaagaccttgaccttgtacagacctggaacctagaaaagcttcgatcctcagcaccaggggagtgccatcagattatgaagaaccttcaggcccactatgaagactttctgcaggatagtcgtgactctgtgctgttctcagtggctgatcgcttgcgcttggaagaggaggtggaagcttgtaaagcccgcttccagcacctgatgaagtccatggagaatgaggacaaagaggagactgtggccaagatgtacatttcagagttgaagaacatccggctacgcctggaggagtatgaacagagggtggtcaaacgaattcagtctctagccagctctaggactgacagagatgcctggcaggacaatgcattaaggattgcagagcaagagcacacccaggaggatttacagcaattgaggtcagacttggatgcagtttctatgaaatgtgacagctttctccatcagtctccatctagttcaagtgtcccaactctgcgctcagaactgaatctgctggtggagaagatggaccatgtctatggtctctctactgtatatctgaataagttaaagacagttgatgttatagtacgtagcatacaggatgctgaactcttggtcaaaggttatgagattaagctgagtcaagaagaagtagtactggcagatctctcagctctggaggcccattggtcgacattacggcactggcttagtgatgtgaaggacaagaattcagtgttttcagtcctggatgaggaaattgccaaggccaaggtagtggcagagcagatgagtcgtctgacaccagagcgaaatctggatttggagcgctatcaggaaaaaggctcccagctgcaggagcgttggcaccgagtcattgcccagctcgagattcgccaatctgagctagaaagtatccaggaagttctgggagattaccgagcctgccatggaactctcatcaagtggattgaggaaaccactgcccagcaggaaatgatgaagccaggccaggcagaggatagcagagtgctttcggagcagctcagccagcagacggccctatttgcagaaattgagagaaatcagacaaaactggatcaatgtcaaaaattttcccagcagtactctactattgtaaaggactatgaattgcaactgatgacatacaaggcctttgtggaatcgcagcagaaatcccctggcaagcgccgtcgcatgctttcctcttcagatgccatcactcaagagttcatggacttaaggactcgctacacggcattggtgactttaacaactcagcacgtgaaatacatcagtgatgcactccggcgtctggaggaggaggagaaagtggtagaagaggagaaacaagaacatgtggagaaggttaaagaacttttgggctgggtgtctaccctagcgaggaatacacaaggaaaagctacctcatccgagaccaaagaatcaacagacattgaaaaagctattttggaacagcaggttctgtcagaagagctgacaacaaagaaagaacaagtctctgaagctattaaaacatcacagatcttcttggccaagcatggtcataagctctcagaaaaagagaagaaacaaatatctgagcaattgaatgccctaaacaaggcttaccatgacctttgtgatggttctgcaaatcagcttcagcagcttcagagccagttggctcaccagacagaacaaaagaccctgcagaaacaacaaaatacctgtcaccagcaactggaggatctttgcagttgggtaggacaggcagaaagagcactggcaggccaccaaggcagaaccacccagcaggatctctctgctttgcagaagaaccaaagtgacttgaaggatttacaggatgacattcagaatcgtgccacctcatttgccactgttgtcaaggacattgaggggttcatggaagagaatcagaccaagctgagcccacgtgagttgacagctcttcgggaaaagcttcatcaggctaaggagcaatatgaggcgctccaggaagagacacgtgtggcccagaaggaactggaggaagcagtgacctccgccttacagcaggagactgaaaagagtaaagcagcaaaggaactggcagagaacaagaagaagatcgatgctctcctggattgggtaacttcagtaggatcatctggtggacagctgctgaccaaccttccaggaatggagcagctctcgggagctagcttggagaaaggagccttggacaccactgatggttacatgggggtgaatcaagccccagagaaactggacaagcaatgtgagatgatgaaggcccgtcaccaagaattgctgtcccagcagcaaaatttcattctggccacccagtcagctcaggccttcttggatcagcatggccacaatctcacacctgaggagcaacagatgctgcaacagaagctgggagagctaaaggaacaatactctacttccctggcccaatcagaggcagaactgaagcaggtgcagacacttcaggatgagttgcagaaatttctgcaggatcataaagagtttgaaagctggttggaacgatccgagaaagagctggagaacatgcataagggaggcagcagccccgagacccttccctccctgctaaagcggcaaggaagcttctcagaggatgtcatttcccacaaaggagacttgagatttgtgactatctcaggacagaaagtcttggacatggaaaacagttttaaggaaggcaaagaaccatcagaaattggaaacttagtaaaggacaagttgaaggatgcaacagaaagatacactgctctccactcaaagtgtacacgattaggatctcacctgaatatgctgttaggccagtatcatcaattccaaaacagtgctgacagcctgcaggcctggatgcaggcttgtgaggccaacgtggagaagctcctctcagatactgttgcctctgaccctggagttctccaggagcagcttgcaacaacaaagcagttgcaggaggaattggctgagcaccaagtacctgtggaaaaactccaaaaagtagctcgtgacataatggaaattgaaggggagccagccccagaccacaggcatgttcaagaaactacagattccatactcagccacttccaaagcctctcctatagcctggctgagcgatcttctctgctgcagaaagcaattgcccaatctcagagtgtccaggaaagcctggagagcctgttgcagtctattggggaagttgaacaaaacctggaagggaagcaggtgtcatcactctcatcaggagtcatccaggaagccttagccacaaatatgaaattgaagcaggacattgctcggcaaaagagcagcttggaggccacccgtgagatggtgacccgattcatggagacagcagacagtactacagcagcagtgctgcagggcaaactggcagaggtgagccagcggttcgaacagctctgtctacagcagcaagaaaaggagagctccctaaagaagcttctaccccaggcagagatgtttgaacacctctctggtaagctgcagcagttcatggaaaacaaaagtcggatgctggcctctggaaatcagccagatcaagatattacacatttcttccaacagatccaggagctcaatttggaaatggaagaccaacaggagaacctagatactcttgagcacctggtcactgaactgagctcttgtggctttgcgctggacttgtgccagcatcaggacagggtacagaatctaagaaaagacttcacagagctacagaagacagttaaagagagagagaaagatgcatcatcttgccaggaacagttggatgaattccggaagctggtcaggaccttccagaaatggttgaaagaaactgaagggagtattccacctacggaaacttctatgagtgctaaagagttagaaaagcagattgaacacctgaagagtctactagatgactgggcaagtaagggaactctggtggaagaaatcaattgcaaaggtacttctttagaaaatctcatcatggaaatcacagcacctgattcccaaggcaagacagatctgacggagatccagtgtgacatgtcagatgtaaacttgaagtatgagaaactagggggagtacttcatgaacgccaggaaagccttcaggctatcctcaacagaatggaggaggttcacaaggaggcaaactctgtgctgcagtggctggaatcaaaagaggaagtcctgaaatccatggatgccatgtcatctccaaccaagacagaaacagtgaaagcccaagctgaatctaacaaggccttcctggctgagttggaacagaattctccaaaaattcaaaaagtaaaggaagccctggctggattactggtgacatatcccaactcacaggaagcagaaaattggaagaaaattcaggaagaactcaattcccgatgggaaagggccactgaggttactgtggctcggcaaaggcagctagaggaatctgcaagtcatctggcctgcttccaggctgcagaatcccagctccggccgtggctgatggagaaagaactgatgatgggagtgctggggcccctgtctattgaccccaacatgttgaatgcacaaaagcaacaggtccagtttatgctaaaggaatttgaagcacgcaggcaacagcatgagcaactgaatgaggcagctcagggcatcctaacaggccctggagatgtctctctgtccaccagccaagtacagaaagaactccagagcatcaatcagaaatgggttgagctgactgacaaactcaactcccgttccagccaaattgaccaagctattgttaagagcacccagtaccaggaactgctccaggacttatcagagaaggtgagggcagttggacaacggctgagtgtccagtcagctatcagcacccaaccagaggctgtaaagcagcaattggaagagaccagtgaaattcgatctgacttggagcagttagaccacgaggttaaggaggctcagacactgtgcgatgaactctcagtgctcattggtgagcagtacctcaaggatgaactgaagaagcgtttggagacagttgccctgcctctccaaggtttagaagaccttgcagccgatcgcattaacagactccaggcagctcttgccagcacccagcagttccagcaaatgtttgatgagttgaggacctggttggatgataaacaaagccagcaagcaaaaaactgcccaatttctgcaaaattggagcggctacagtctcagctacaggagaatgaagagtttcagaaaagtcttaatcaacacagtggctcctatgaggtgattgtggctgaaggggaatctctacttctttctgtacctcctggagaagagaaaaggactctacaaaaccagttggttgagctcaaaaaccattgggaagagcttagtaaaaaaactgcagacagacaatccaggctcaaggattgtatgcagaaagctcagaaatatcagtggcatgtggaagaccttgtgccatggatagaagattgtaaagctaagatgtctgagttgcgagtcactctggatccagtgcagctagagtccagtctcctaagatcaaaggctatgctgaatgaggtggagaagcgccgctccctgctggaaatattgaatagtgctgctgacattctgatcaattcttcagaagcagatgaggatggaatccgggatgagaaggctgggatcaaccagaacatggatgctgttacagaagagctgcaggccaaaacagggtcactcgaagaaatgactcagaggctcagggagttccaggaaagctttaagaatattgaaaagaaggttgaaggagccaaacaccaacttgagatctttgatgctctgggttctcaagcctgtagcaacaagaacctggagaagctaagagctcaacaggaagtgctgcaggccctagagcctcaggtagactatctgaggaactttactcagggtctggtagaagatgccccagatggatctgatgcttctcaacttctccaccaagctgaggtcgcccagcaagagttcctcgaagttaagcaaagagtgaacagtggttgtgtgatgatggaaaacaagctggaggggattggccagtttcactgccgggtccgagagatgttctctcaattggcagacctggatgatgagctagatggcatgggtgctattggcagagacactgatagcctccagtcccaaatcgaggatgtccggctattccttaacaaaattcacgtcctcaaattagacatagaggcctctgaagcagagtgtcgacatatgctagaagaagaggggactctggatttgttaggtctcaaaagggagctagaagccctgaacaaacagtgtggcaaactgacagagagggggaaagctcgtcaggaacagctggaactgacactaggccgtgtagaggacttctacaggaaattgaaaggactcaatgacgcgaccacagcagcagaggaggcagaggccctccagtgggtagtggggaccgaagtggaaatcatcaaccaacaattagcagattttaaaatgtttcagaaagaacaagtggatcctcttcagatgaaattgcagcaggtgaatggacttggccagggattaattcagagtgcaggaaaagactgtgatgtacagggtttagaacatgacatggaagagatcaatgctcgatggaatacattgaataaaaaggtcgcacaaagaattgcacagctacaggaagctttgttgcattgtgggaagtttcaagatgccttggagccattgctcagctggttggcagataccgaggagctcatagccaatcagaaacctccatctgctgagtataaagtggtgaaagcacagatccaagaacagaagttgctccagcggctcctagatgatcgaaaggccacagtagacatgcttcaagcagaaggaggcagaatagcccagtcagcagagctggctgatagagagaaaatcactggacagctggagagtcttgaaagtagatggactgaactactcagtaaggcagcagccaggcaaaaacagctggaagacatcctggttctggccaaacagttccatgagacagctgagcctatttctgacttcttatctgtcacagagaaaaagcttgctaactcagaacctgttggcactcagactgccaaaatacagcagcagatcattcggcacaaggctctggaagaagacatagaaaaccatgcaacagatgtgcaccaggcagtcaaaattgggcagtccctctcctccctgacatctcctgcagaacagggtgtgctgtcagaaaagatagactcattgcaggcccgatacagtgaaattcaagaccgctgttgtcggaaggcagccctacttgaccaagctctgtctaatgctaggctgtttggggaggatgaggtggaggtgctcaactggctggctgaggttgaggacaagctcagttcagtgttcgtaaaggatttcaaacaggatgtcctgcacaggcagcatgctgaccacctggctttaaatgaagaaattgttaatagaaagaagaatgtagatcaagctattaaaaatggtcaggctcttctaaaacaaaccacaggtgaggaggtgttacttatccaggaaaaactagatggtataaagactcgttacgcagacatcacagttactagctccaaggccctcagaactttagagcaagcccggcagctggccaccaagttccagtctacttatgaggaactgaccgggtggctgagggaggtggaggaggagctggcaaccagtggaggacagtctcccacaggggaacagataccccagtttcagcagagacagaaggaattaaagaaggaggtcatggagcacaggctggtgttggacacagtgaatgaggtgagccgtgctctcttagagctggtgccctggagagccagagaagggctggataaacttgtgtccgatgctaacgagcagtacaaactagtcagtgacactattggacaaagggtggatgaaattgatgctgctattcagagatcacaacagtatgagcaagctgccgatgcagaactagcttgggttgctgaaacaaaacggaaactgatggctctgggtccaattcgcctggaacaggaccagaccacagctcagcttcaggtacagaaggctttctccattgacattattcgacacaaagattcaatggatgaactcttcagtcaccgtagtgaaatctttggcacatgtggggaggagcaaaaaactgtattacaggaaaagacagagtctctaatacagcaatatgaagccattagcctactcaattcagagcgttatgcccgcctagagcgggcccaggtcttagtaaaccagttttgggaaacttatgaagagctcagcccctggattgaggaaactcgggcactaatagcacagttaccctctccagccattgatcatgagcagctcaggcagcaacaagaggaaatgaggcaattaagggaatctattgctgaacacaaacctcatattgacaaactactaaagataggcccacaactaaaggaattaaaccctgaggaaggggaaatggtggaagaaaaataccagaaagcagaaaacatgtatgcccaaataaaggaggaggtgcgccagcgagccctggctctggatgaagccgtgtcccagtccacacagattacagagtttcatgataaaattgagcctatgttggagacactggagaatctttcctctcgcctgcgtatgccaccactgatccctgctgaagtagacaagatcagagagtgcatcagtgacaataagagtgccaccgtggagctagaaaaactgcagccatcctttgaggccttgaagcgccgtggagaggagcttattggacgatctcagggagcagacaaggatctggctgcaaaagaaatccaggataaattggatcaaatggtattcttctgggaggacatcaaagctcgggctgaagaacgagaaatcaaatttcttgatgtccttgaattagcagagaagttctggtatgacatggcagctctcctgaccaccatcaaagacacccaggatattgtccatgacttggaaagcccaggcattgatccttccatcatcaaacaacaggttgaagctgctgagactattaaggaagagacagatggtctgcatgaagagctggagtttattcggatccttggagcagatttgatttttgcctgtggagaaactgagaagcctgaagtgaggaagagcattgatgagatgaataatgcttgggagaacttaaacaaaacatggaaagagaggctagaaaaacttgaggatgctatgcaagctgctgtgcagtatcaggacactcttcaggctatgtttgactggctagataacactgtgattaaactctgcaccatgccccctgttggcactgacctcaatactgttaaagatcagttaaatgaaatgaaggagttcaaagtagaagtttaccaacagcaaattgagatggagaagcttaatcaccagggtgaactgatgttaaagaaagctactgatgagacggacagagacattatacgagaaccactgacagaactcaaacacctctgggagaacctgggtgagaaaattgcccaccgacagcacaaactagaaggggctctgttggcccttggtcagttccagcatgccttagaggaactaatgagttggctgactcataccgaagagttgttagatgctcagagaccaataagtggagacccaaaagtcattgaagttgagctcgcaaagcaccatgtcctaaaaaatgatgttttggctcatcaagccacagtggaaacagtcaacaaagctggcaatgagcttcttgaatccagtgctggagatgatgccagcagcttaaggagccgtttggaagccatgaaccaagactgtacgtcacatttagaggcagcgagagagtagcagaatccaggtctgagctccatatgccacagtgcccagcatcatatgctatgctggtatatagtctagtggctgtcagttcaatggagagccagctttctgcatctaagcccacaggaggacttcctgaaactgctagggaacagcttgatacacatatggaactctattcccagctgaaagccaaggaagagacttataatcaactacttgacaagggcagactcatgcttctaagccgtgacgactctgggtctggctccaagacagaacagagtgtagcacttttggagcagaagtggcatgtggtcagcagtaagatggaagaaagaaagtcaaagctggaagaggccctcaacttggcaacagaattccagaattccctacaagaatttatcaactggctcactctagcagagcagagtttaaacatcgcttctccaccaagcctgattctaaatactgtcctttcccagatagaagagcacaaggtttttgctaatgaagtaaatgctcatcgagaccagatcattgagctggatcaaactgggaatcaattaaagttccttagccaaaagcaggatgttgttctgatcaagaatttgttggtgagcgtgcagtctcgatgggagaaggttgtccagcgatctattgaaagagggcgatcactagatgatgccaggaagcgggcaaaacaattccatgaagcttggaaaaaactgattgactggctagaagatgcagagagtcacctggactcagaactagagatatccaatgacccagacaaaattaaacttcagctttctaagcataaggagtttcagaagactcttggtggcaagcagcctgtgtatgataccacaattagaactggcagagcactgaaagaaaagactttgcttcccgaagatactcagaaacttgacaatttcctaggagaagtcagagacaaatgggatactgtttgtggcaagtctgtggagcggcagcacaagttggaggaagccctgctcttttcgggtcagttcatggatgctttgcaggcattggttgactggttatacaaggtggagccacagctggctgaggaccagcccgtgcacggggaccttgacctcgtcatgaacctcatggatgcacacaaggttttccagaaggaactgggaaagcgaacaggaaccgttcaggtcctgaagcggtcaggccgagagctgattgagaatagtcgagatgacaccacttgggtaaaaggacagctccaggaactgagcactcgctgggacactgtctgtaaactctctgtttccaaacaaagccggcttgagcaggccttaaaacaagcggaagtgtttcgagacacagtccacatgctgttggagtggctttctgaagcagagcaaacgcttcgctttcggggagcacttcctgatgacacagaggccctgcagtctctcattgacacccataaggaattcatgaagaaagtagaagaaaagcgagtggacgttaactcagcagtagccatgggagaagtcatcctggctgtctgccaccccgattgcatcacaaccatcaaacactggatcaccatcatccgagctcgcttcgaggaggtcctgacatgggctaagcagcaccagcagcgtcttgaaacggccttgtcagaactggtggctaatgctgagctcctggaagaacttctggcatggatccagtgggctgagaccaccctcattcagcgggatcaggagccaatcccgcagaacattgaccgagttaaagcccttatcgctgagcatcagacatttatggaggagatgactcgcaaacagcctgacgtggaccgggtcaccaagacatacaaaaggaaaaacatagagcctactcacgcgcctttcatagagaaatcccgcagcggaggcaggaaatccctaagtcagccaacccctcctcccatgccaatcctttcacagtctgaagcaaaaaacccacggatcaaccagctttctgcccgctggcagcaggtgtggctgttagcactggagcggcaaaggaaactgaatgatgccttggatcggctggaggagctgcaggcattgaaaaaattgcacaacttcaactcgaatctagggaggaccaagaccaaactggcgtagtttcccttttgttacgaacagcaatagtgtactccggagtaataaggggagcccacaatgatgttcgttaacaaaagggaaatacgccactttgctgcatccagggctcaatggt

SEQ ID NO: 367618 - DNA, 8763 bp, Homo sapiens
  misc_feature (995)..(995): n is a, c, g, or t
  misc_feature (1066)..(1066): n is a, c, g, or t
  misc_feature (1076)..(1076): n is a, c, g, or t
tcaaaacaccatctattaaagctgacaattgtcacaagcagaattgaatactcaaagggaagttaacttcacacagaaaaacacttcatatttcattcaacttgcaacgtatttactgagcgtctaccgtgtgtaaggcagcctgctaggaaatggggtacgaccctcctcctcacagagcttacattctgacaggggaacccgaagtgaacaagcatgatctgcaacaggtatgagatgtcaagaaagcctattacagaggcacccaggcccagtctacggggtcactaaaggctatgggataaactgatctgaaggatgagcacaaatcaatcatcgagaggctgagagcagctcaagtcgggggaataagatgtgcgagaagcaggagagagcaggatgaaataaaatcaggcccgtgtgatgcgtggtgaacagtgagtacccagagaagcgaagctgggggctgaggggctggtcaggaacacgggcttaattcatcaacccaacagcaaacatcagtgcaacaatgtaagcacatttaccttctgggtcataatgtaatttcttccaaagccagtggtggcactcagatatttgatcagaggattgacagattcaggcttttggtggaaaagccatacctggaaaggaaggatgtgtcaatgatttgtttcttctgcccaaggtgagtgaggctggtggagagtcactatctgcactttatagagctccccagacaaattataaacatcctctcaaatatcatcagtgaatggtttggcaaatatattgagaaccaattaaaatatagtttaaaagcacttgcttctacaaccaatttgtattcccacaataaatgtatttatttctgtaacacttaccaaaacaagagcatcaaagccaattccttcacactgccctccctcccacctgctcttcatgaggagtcctttattcctgcatgtttcctgttctttgggccggaattccgnggcgcgatgtcggctcactacaacctctgcctcctggattcaagcaattctgtacctcagcctcccgagtngctgtgattncagatgaacgggaccgggttcagaagaaaacgttcaccaagtgggtcaacaagcacttaatgaaggtccgcaagcacatcaatgatctttatgaagatctgcgggatggccataacctgatctctctgttggaggtcctctcaggcatcaaactgccccgggagaagggcaggatgcgttttcataggctgcagaatgtgcagattgccctggacttcctaaagcagcgacaggtgaaactagtgaatattcgcaatgatgacatcacagatggcaaccccaagttgaccctgggtctgatctggaccattattttgcatttccagatctctgacatctacattagtggagaatcaggggatatgtcagccaaggagaaactactcctgtggacccagaaggtgacagctggttacacaggaatcaaatgcaccaacttttcctcctgctggagtgatgggaagatgttcaatgcactcattcaccgataccgacccgatctagtagacatggagagggtgcaaatccaaagtaaccgagagaatctggaacaagcttttgaagtggcagaaagactgggggtcactcgcctgctggatgcagaagatgtggatgtgccatctccagatgaaaagtctgtaatcacttatgtgtcttcgatttatgatgccttccctaaagttcctgagggtggagaagggatcagtgctacggaagtggactccaggtggcaagaataccaaagccgagtggactccctcattccctggatcaaacagcatacaatactgatgtcagataaaacttttccccaaaaccctgttgaactaaaggcactttataaccaatatatacacttcaaagaaacagaaattctggccaaggagagagaaaaaggaagaattgaggaattatataaattactagaggtgtggattgaatttggccgaattaaactgcctcaaggttatcaccctaatgatgtggaagaagagtggggaaagctcatcatagagatgctggaacgagagaaatcacttcggccggctgtggagaggctggaattgctgctacagattgcaaacaaaatccagaatggtgctttgaactgtgaagaaaaactgacactagctaagaatacactgcaggctgatgctgctcacctggaatcaggacaaccggtacaatgtgagtcagatgtcattatgtacattcaagagtgtgaaggtctcatcaggcagctgcaggtggatctccagatcctgcgggatgagaattactaccagctagaagagctggcttttagggtcatgcgtcttcaggatgagctggtcaccttgcgtctagagtgtacaaacctgtaccggaagggtcatttcacttcacttgaattggttccaccctctactttaaccaccactcatctgaaagcagaacccttaaccaaggcaacccattcttcttctacctcctggttccgaaagcctatgactcgggctgaacttgggccatcagctcctctgaagatgaaggcaatctccgatttgtgtatgaactactgtctttgggtagaagagatgcagatgaaactggagcgagcagagtggggcaatgacctgcctagtgtggagttgcagctagaaacacagcagcacatccatacgagtgtagaagagctgggctcaagtgtcaaggaggccaggttgtatgagggaaagatgtcccagaatttccataccagctatgctgaaactcttggaaagctggagacacagtattgtaaattgaaggaaacttctagcttccggatgaggcaccttcagagcctgcataaatttgtttccagagctacagctgagttgatctggttgaatgagaaggaggaggaggaactagcatatgactggagtgacaacaattccaatatctcagccaagagaaattacttctctgagttgacaatggaactggaggagaaacaggatgtgtttcgttctctacaagatacagcagaactactttcacttgagaaccacccagccaagcagacagtggaggcttacagtgctgctgtccagtcccagttgcagtggatgaagcagctgtgcctgtgtgttgagcagcatgtgaaagagaatactgcttattttcagttcttcagtgatgcacgagagctggagtcattcttgaggaacctccaagattccattaaacgaaaatattcctgtgaccacaacaccagcttatcccgccttgaagacctgctccaggactccatggatgaaaaggagcagcttatacagtccaagagttccgttgccagtctcgttgggagatcaaaaaccatcgttcagctaaaaccacgcagtccagaccatgtgttaaagaacaccatttctgtcaaggctgtctgtgactacaggcagatcgagattactatttgcaaaaatgatgaatgtgtgctagaagataattctcagcggaccaaatggaaagtgatcagccccacagggaacgaggcaatggtgccgtcagtctgcttcctcatccccccacccaataaggatgccattgagatggccagcagggtcgaacaatcttatcagaaggttatggccctttggcatcagctgcatgttaacaccaaaagccttatctcttggaactatctgcgtaaagaccttgaccttgtacagacctggaacctagaaaagcttcgatcctcagcaccaggggagtgccatcagattatgaagaaccttcaggcccactatgaagactttctgcaggatagtcgtgactctgtgctgttctcagtggctgatcgcttgcgcttggaagaggaggtggaagcttgtaaagcccgcttccagcacctgatgaagtccatggagaatgaggacaaagaggagactgtggccaagatgtacatttcagagttgaagaacatccggctacgcctggaggagtatgaacagagggtggtcaaacgaattcagtctctagccagctctaggactgacagagatgcctggcaggacaatgcattaaggattgcagagcaagagcacacccaggaggatttacagcaattgaggtcagacttggatgcagtttctatgaaatgtgacagctttctccatcagtctccatctagttcaagtgtcccaactctgcgctcagaactgaatctgctggtggagaagatggaccatgtctatggtctctctactgtatatctgaataagttaaagacagttgatgttatagtacgtagcatacaggatgctgaactcttggtcaaaggttatgagattaagctgagtcaagaagaagtagtactggcagatctctcagctctggaggcccattggtcgacattacggcactggcttagtgatgtgaaggacaagaattcagtgttttcagtcctggatgaggaaattgccaaggccaaggtagtggcagagcagatgagtcgtctgacaccagagcgaaatctggatttggagcgctatcaggaaaaaggctcccagctgcaggagcgttggcaccgagtcattgcccagctcgagattcgccaatctgagctagaaagtatccaggaagttctgggagattaccgagcctgccatggaactctcatcaagtggattgaggaaaccactgcccagcaggaaatgatgaagccaggccaggcagaggatagcagagtgctttcggagcagctcagccagcagacggccctatttgcagaaattgagagaaatcagacaaaactggatcaatgtcaaaaattttcccagcagtactctactattgtaaaggactatgaattgcaactgatgacatacaaggcctttgtggaatcgcagcagaaatcccctggcaagcgccgtcgcatgctttcctcttcagatgccatcactcaagagttcatggacttaaggactcgctacacggcattggtgactttaacaactcagcacgtgaaatacatcagtgatgcactccggcgtctggaggaggaggagaaagtggtagaagaggagaaacaagaacatgtggagaaggttaaagaacttttgggctgggtgtctaccctagcgaggaatacacaaggaaaagctacctcatccgagaccaaagaatcaacagacattgaaaaagctattttggaacagcaggttctgtcagaagagctgacaacaaagaaagaacaagtctctgaagctattaaaacatcacagatcttcttggccaagcatggtcataagctctcagaaaaagagaagaaacaaatatctgagcaattgaatgccctaaacaaggcttaccatgacctttgtgatggttctgcaaatcagcttcagcagcttcagagccagttggctcaccagacagaacaaaagaccctgcagaaacaacaaaatacctgtcaccagcaactggaggatctttgcagttgggtaggacaggcagaaagagcactggcaggccaccaaggcagaaccacccagcaggatctctctgctttgcagaagaaccaaagtgacttgaaggatttacaggatgacattcagaatcgtgccacctcatttgccactgttgtcaaggacattgaggggttcatggaagagaatcagaccaagctgagcccacgtgagttgacagctcttcgggaaaagcttcatcaggctaaggagcaatatgaggcgctccaggaagagacacgtgtggcccagaaggaactggaggaagcagtgacctccgccttacagcaggagactgaaaagagtaaagcagcaaaggaactggcagagaacaagaagaagatcgatgctctcctggattgggtaacttcagtaggatcatctggtggacagctgctgaccaaccttccaggaatggagcagctctcgggagctagcttggagaaaggagccttggacaccactgatggttacatgggggtgaatcaagccccagagaaactggacaagcaatgtgagatgatgaaggcccgtcaccaagaattgctgtcccagcagcaaaatttcattctggccacccagtcagctcaggccttcttggatcagcatggccacaatctcacacctgaggagcaacagatgctgcaacagaagctgggagagctaaaggaacaatactctacttccctggcccaatcagaggcagaactgaagcaggtgcagacacttcaggatgagttgcagaaatttctgcaggatcataaagagtttgaaagctggttggaacgatccgagaaagagctggagaacatgcataagggaggcagcagccccgagacccttccctccctgctaaagcggcaaggaagcttctcagaggatgtcatttcccacaaaggagacttgagatttgtgactatctcaggacagaaagtcttggacatggaaaacagttttaaggaaggcaaagaaccatcagaaattggaaacttagtaaaggacaagttgaaggatgcaacagaaagatacactgctctccactcaaagtgtacacgattaggatctcacctgaatatgctgttaggccagtatcatcaattccaaaacagtgctgacagcctgcaggcctggatgcaggcttgtgaggccaacgtggagaagctcctctcagatactgttgcctctgaccctggagttctccaggagcagcttgcaacaacaaagcagttgcaggaggaattggctgagcaccaagtacctgtggaaaaactccaaaaagtagctcgtgacataatggaaattgaaggggagccagccccagaccacaggcatgttcaagaaactacagattccatactcagccacttccaaagcctctcctatagcctggctgagcgatcttctctgctgcagaaagcaattgcccaatctcagagtgtccaggaaagcctggagagcctgttgcagtctattggggaagttgaacaaaacctggaagggaagcaggtgtcatcactctcatcaggagtcatccaggaagccttagccacaaatatgaaattgaagcaggacattgctcggcaaaagagcagcttggaggccacccgtgagatggtgacccgattcatggagacagcagacagtactacagcagcagtgctgcagggcaaactggcagaggtgagccagcggttcgaacagctctgtctacagcagcaagaaaaggagagctccctaaagaagcttctaccccaggcagagatgtttgaacacctctctggtaagctgcagcagttcatggaaaacaaaagtcggatgctggcctctggaaatcagccagatcaagatattacacatttcttccaacagatccaggagctcaatttggaaatggaagaccaacaggagaacctagatactcttgagcacctggtcactgaactgagctcttgtggctttgcgctggacttgtgccagcatcaggacagggtacagaatctaagaaaagacttcacagagctacagaagacagttaaagagagagagaaagatgcatcatcttgccaggaacagttggatgaattccggaagctggtcaggaccttccagaaatggttgaaagaaactgaagggagtattccacctacggaaacttctatgagtgctaaagagttagaaaagcagattgaacacctgaagagtctactagatgactgggcaagtaagggaactctggtggaagaaatcaattgcaaaggtacttctttagaaaatctcatcatggaaatcacagcacctgattcccaaggcaagacaggtgagtacaggctcttcaaaatatagtgaataaaaattgctctttgcttttggcctttggagatgcctccttatataattaaagtgaaaatcaaggttggatatgaaaacaaagggcatgcccaaagcagtcttcccctgcaacctgacctgtcaccccttttgctatataacattgctccattttgcaaaattccttcccatgatggaaaaagtaaatgaactagttgtcccacttagaactatcaaatgaacactgaataattaaaatgagattttcatcttgagaatttcccttttttgaatgtgtaaatgggatgggtaagcatcatctttaaacttgggcactggccagccacgaagtcagaagatcaaaaccagcctggccaacatggtgaaaccccatctctactaaaaatacaaaaattaggccaggtgcggcagctcacacctgtaatcccagcactttgggaggccaaggcaggcggatcacgaagtcaggagattgagaccatcctggctaacacggtgaaaccccgtctctactaaaaatacaaaaaattggccaggcgtggtggcgggtgcctgtagtcccagctactcgggaggctgaggcaggagaatggtgcggagcttgcagtgagccgagatcacgccactgcactccaacttgggcaacagacagagcgagactctgtctcaaaaaaaaaaaaaaatacaaacattagccgggcatggtggcacgcacctatagtcccagctactcgggagtctgaaacaggagaatagcttgaacctggtaggtggaggtttcattgagccacgacagtgcatgcactccagcctgggcaacagacagagtgagactccatctcagg

SEQ ID NO: 367619 - DNA, 14685 bp, Homo sapiens
  misc_feature (995)..(995): n is a, c, g, or t
  misc_feature (1066)..(1066): n is a, c, g, or t
  misc_feature (1076)..(1076): n is a, c, g, or t
tcaaaacaccatctattaaagctgacaattgtcacaagcagaattgaatactcaaagggaagttaacttcacacagaaaaacacttcatatttcattcaacttgcaacgtatttactgagcgtctaccgtgtgtaaggcagcctgctaggaaatggggtacgaccctcctcctcacagagcttacattctgacaggggaacccgaagtgaacaagcatgatctgcaacaggtatgagatgtcaagaaagcctattacagaggcacccaggcccagtctacggggtcactaaaggctatgggataaactgatctgaaggatgagcacaaatcaatcatcgagaggctgagagcagctcaagtcgggggaataagatgtgcgagaagcaggagagagcaggatgaaataaaatcaggcccgtgtgatgcgtggtgaacagtgagtacccagagaagcgaagctgggggctgaggggctggtcaggaacacgggcttaattcatcaacccaacagcaaacatcagtgcaacaatgtaagcacatttaccttctgggtcataatgtaatttcttccaaagccagtggtggcactcagatatttgatcagaggattgacagattcaggcttttggtggaaaagccatacctggaaaggaaggatgtgtcaatgatttgtttcttctgcccaaggtgagtgaggctggtggagagtcactatctgcactttatagagctccccagacaaattataaacatcctctcaaatatcatcagtgaatggtttggcaaatatattgagaaccaattaaaatatagtttaaaagcacttgcttctacaaccaatttgtattcccacaataaatgtatttatttctgtaacacttaccaaaacaagagcatcaaagccaattccttcacactgccctccctcccacctgctcttcatgaggagtcctttattcctgcatgtttcctgttctttgggccggaattccgnggcgcgatgtcggctcactacaacctctgcctcctggattcaagcaattctgtacctcagcctcccgagtngctgtgattncagatgaacgggaccgggttcagaagaaaacgttcaccaagtgggtcaacaagcacttaatgaaggtccgcaagcacatcaatgatctttatgaagatctgcgggatggccataacctgatctctctgttggaggtcctctcaggcatcaaactgccccgggagaagggcaggatgcgttttcataggctgcagaatgtgcagattgccctggacttcctaaagcagcgacaggtgaaactagtgaatattcgcaatgatgacatcacagatggcaaccccaagttgaccctgggtctgatctggaccattattttgcatttccagatctctgacatctacattagtggagaatcaggggatatgtcagccaaggagaaactactcctgtggacccagaaggtgacagctggttacacaggaatcaaatgcaccaacttttcctcctgctggagtgatgggaagatgttcaatgcactcattcaccgataccgacccgatctagtagacatggagagggtgcaaatccaaagtaaccgagagaatctggaacaagcttttgaagtggcagaaagactgggggtcactcgcctgctggatgcagaagatgtggatgtgccatctccagatgaaaagtctgtaatcacttatgtgtcttcgatttatgatgccttccctaaagttcctgagggtggagaagggatcagtgctacggaagtggactccaggtggcaagaataccaaagccgagtggactccctcattccctggatcaaacagcatacaatactgatgtcagataaaacttttccccaaaaccctgttgaactaaaggcactttataaccaatatatacacttcaaagaaacagaaattctggccaaggagagagaaaaaggaagaattgaggaattatataaattactagaggtgtggattgaatttggccgaattaaactgcctcaaggttatcaccctaatgatgtggaagaagagtggggaaagctcatcatagagatgctggaacgagagaaatcacttcggccggctgtggagaggctggaattgctgctacagattgcaaacaaaatccagaatggtgctttgaactgtgaagaaaaactgacactagctaagaatacactgcaggctgatgctgctcacctggaatcaggacaaccggtacaatgtgagtcagatgtcattatgtacattcaagagtgtgaaggtctcatcaggcagctgcaggtggatctccagatcctgcgggatgagaattactaccagctagaagagctggcttttagggtcatgcgtcttcaggatgagctggtcaccttgcgtctagagtgtacaaacctgtaccggaagggtcatttcacttcacttgaattggttccaccctctactttaaccaccactcatctgaaagcagaacccttaaccaaggcaacccattcttcttctacctcctggttccgaaagcctatgactcgggctgaacttgggccatcagctcctctgaagatgaaggcaatctccgatttgtgtatgaactactgtctttgggtagaagagatgcagatgaaactggagcgagcagagtggggcaatgacctgcctagtgtggagttgcagctagaaacacagcagcacatccatacgagtgtagaagagctgggctcaagtgtcaaggaggccaggttgtatgagggaaagatgtcccagaatttccataccagctatgctgaaactcttggaaagctggagacacagtattgtaaattgaaggaaacttctagcttccggatgaggcaccttcagagcctgcataaatttgtttccagagctacagctgagttgatctggttgaatgagaaggaggaggaggaactagcatatgactggagtgacaacaattccaatatctcagccaagagaaattacttctctgagttgacaatggaactggaggagaaacaggatgtgtttcgttctctacaagatacagcagaactactttcacttgagaaccacccagccaagcagacagtggaggcttacagtgctgctgtccagtcccagttgcagtggatgaagcagctgtgcctgtgtgttgagcagcatgtgaaagagaatactgcttattttcagttcttcagtgatgcacgagagctggagtcattcttgaggaacctccaagattccattaaacgaaaatattcctgtgaccacaacaccagcttatcccgccttgaagacctgctccaggactccatggatgaaaaggagcagcttatacagtccaagagttccgttgccagtctcgttgggagatcaaaaaccatcgttcagctaaaaccacgcagtccagaccatgtgttaaagaacaccatttctgtcaaggctgtctgtgactacaggcagatcgagattactatttgcaaaaatgatgaatgtgtgctagaagataattctcagcggaccaaatggaaagtgatcagccccacagggaacgaggcaatggtgccgtcagtctgcttcctcatccccccacccaataaggatgccattgagatggccagcagggtcgaacaatcttatcagaaggttatggccctttggcatcagctgcatgttaacaccaaaagccttatctcttggaactatctgcgtaaagaccttgaccttgtacagacctggaacctagaaaagcttcgatcctcagcaccaggggagtgccatcagattatgaagaaccttcaggcccactatgaagactttctgcaggatagtcgtgactctgtgctgttctcagtggctgatcgcttgcgcttggaagaggaggtggaagcttgtaaagcccgcttccagcacctgatgaagtccatggagaatgaggacaaagaggagactgtggccaagatgtacatttcagagttgaagaacatccggctacgcctggaggagtatgaacagagggtggtcaaacgaattcagtctctagccagctctaggactgacagagatgcctggcaggacaatgcattaaggattgcagagcaagagcacacccaggaggatttacagcaattgaggtcagacttggatgcagtttctatgaaatgtgacagctttctccatcagtctccatctagttcaagtgtcccaactctgcgctcagaactgaatctgctggtggagaagatggaccatgtctatggtctctctactgtatatctgaataagttaaagacagttgatgttatagtacgtagcatacaggatgctgaactcttggtcaaaggttatgagattaagctgagtcaagaagaagtagtactggcagatctctcagctctggaggcccattggtcgacattacggcactggcttagtgatgtgaaggacaagaattcagtgttttcagtcctggatgaggaaattgccaaggccaaggtagtggcagagcagatgagtcgtctgacaccagagcgaaatctggatttggagcgctatcaggaaaaaggctcccagctgcaggagcgttggcaccgagtcattgcccagctcgagattcgccaatctgagctagaaagtatccaggaagttctgggagattaccgagcctgccatggaactctcatcaagtggattgaggaaaccactgcccagcaggaaatgatgaagccaggccaggcagaggatagcagagtgctttcggagcagctcagccagcagacggccctatttgcagaaattgagagaaatcagacaaaactggatcaatgtcaaaaattttcccagcagtactctactattgtaaaggactatgaattgcaactgatgacatacaaggcctttgtggaatcgcagcagaaatcccctggcaagcgccgtcgcatgctttcctcttcagatgccatcactcaagagttcatggacttaaggactcgctacacggcattggtgactttaacaactcagcacgtgaaatacatcagtgatgcactccggcgtctggaggaggaggagaaagtggtagaagaggagaaacaagaacatgtggagaaggttaaagaacttttgggctgggtgtctaccctagcgaggaatacacaaggaaaagctacctcatccgagaccaaagaatcaacagacattgaaaaagctattttggaacagcaggttctgtcagaagagctgacaacaaagaaagaacaagtctctgaagctattaaaacatcacagatcttcttggccaagcatggtcataagctctcagaaaaagagaagaaacaaatatctgagcaattgaatgccctaaacaaggcttaccatgacctttgtgatggttctgcaaatcagcttcagcagcttcagagccagttggctcaccagacagaacaaaagaccctgcagaaacaacaaaatacctgtcaccagcaactggaggatctttgcagttgggtaggacaggcagaaagagcactggcaggccaccaaggcagaaccacccagcaggatctctctgctttgcagaagaaccaaagtgacttgaaggatttacaggatgacattcagaatcgtgccacctcatttgccactgttgtcaaggacattgaggggttcatggaagagaatcagaccaagctgagcccacgtgagttgacagctcttcgggaaaagcttcatcaggctaaggagcaatatgaggcgctccaggaagagacacgtgtggcccagaaggaactggaggaagcagtgacctccgccttacagcaggagactgaaaagagtaaagcagcaaaggaactggcagagaacaagaagaagatcgatgctctcctggattgggtaacttcagtaggatcatctggtggacagctgctgaccaaccttccaggaatggagcagctctcgggagctagcttggagaaaggagccttggacaccactgatggttacatgggggtgaatcaagccccagagaaactggacaagcaatgtgagatgatgaaggcccgtcaccaagaattgctgtcccagcagcaaaatttcattctggccacccagtcagctcaggccttcttggatcagcatggccacaatctcacacctgaggagcaacagatgctgcaacagaagctgggagagctaaaggaacaatactctacttccctggcccaatcagaggcagaactgaagcaggtgcagacacttcaggatgagttgcagaaatttctgcaggatcataaagagtttgaaagctggttggaacgatccgagaaagagctggagaacatgcataagggaggcagcagccccgagacccttccctccctgctaaagcggcaaggaagcttctcagaggatgtcatttcccacaaaggagacttgagatttgtgactatctcaggacagaaagtcttggacatggaaaacagttttaaggaaggcaaagaaccatcagaaattggaaacttagtaaaggacaagttgaaggatgcaacagaaagatacactgctctccactcaaagtgtacacgattaggatctcacctgaatatgctgttaggccagtatcatcaattccaaaacagtgctgacagcctgcaggcctggatgcaggcttgtgaggccaacgtggagaagctcctctcagatactgttgcctctgaccctggagttctccaggagcagcttgcaacaacaaagcagttgcaggaggaattggctgagcaccaagtacctgtggaaaaactccaaaaagtagctcgtgacataatggaaattgaaggggagccagccccagaccacaggcatgttcaagaaactacagattccatactcagccacttccaaagcctctcctatagcctggctgagcgatcttctctgctgcagaaagcaattgcccaatctcagagtgtccaggaaagcctggagagcctgttgcagtctattggggaagttgaacaaaacctggaagggaagcaggtgtcatcactctcatcaggagtcatccaggaagccttagccacaaatatgaaattgaagcaggacattgctcggcaaaagagcagcttggaggccacccgtgagatggtgacccgattcatggagacagcagacagtactacagcagcagtgctgcagggcaaactggcagaggtgagccagcggttcgaacagctctgtctacagcagcaagaaaaggagagctccctaaagaagcttctaccccaggcagagatgtttgaacacctctctggtaagctgcagcagttcatggaaaacaaaagtcggatgctggcctctggaaatcagccagatcaagatattacacatttcttccaacagatccaggagctcaatttggaaatggaagaccaacaggagaacctagatactcttgagcacctggtcactgaactgagctcttgtggctttgcgctggacttgtgccagcatcaggacagggtacagaatctaagaaaagacttcacagagctacagaagacagttaaagagagagagaaagatgcatcatcttgccaggaacagttggatgaattccggaagctggtcaggaccttccagaaatggttgaaagaaactgaagggagtattccacctacggaaacttctatgagtgctaaagagttagaaaagcagattgaacacctgaagagtctactagatgactgggcaagtaagggaactctggtggaagaaatcaattgcaaaggtacttctttagaaaatctcatcatggaaatcacagcacctgattcccaaggcaagacagatctgacggagatccagtgtgacatgtcagatgtaaacttgaagtatgagaaactagggggagtacttcatgaacgccaggaaagccttcaggctatcctcaacagaatggaggaggttcacaaggaggcaaactctgtgctgcagtggctggaatcaaaagaggaagtcctgaaatccatggatgccatgtcatctccaaccaagacagaaacagtgaaagcccaagctgaatctaacaaggccttcctggctgagttggaacagaattctccaaaaattcaaaaagtaaaggaagccctggctggattactggtgacatatcccaactcacaggaagcagaaaattggaagaaaattcaggaagaactcaattcccgatgggaaagggccactgaggttactgtggctcggcaaaggcagctagaggaatctgcaagtcatctggcctgcttccaggctgcagaatcccagctccggccgtggctgatggagaaagaactgatgatgggagtgctggggcccctgtctattgaccccaacatgttgaatgcacaaaagcaacaggtccagtttatgctaaaggaatttgaagcacgcaggcaacagcatgagcaactgaatgaggcagctcagggcatcctaacaggccctggagatgtctctctgtccaccagccaagtacagaaagaactccagagcatcaatcagaaatgggttgagctgactgacaaactcaactcccgttccagccaaattgaccaagctattgttaagagcacccagtaccaggaactgctccaggacttatcagagaaggtgagggcagttggacaacggctgagtgtccagtcagctatcagcacccaaccagaggctgtaaagcagcaattggaagagaccagtgaaattcgatctgacttggagcagttagaccacgaggttaaggaggctcagacactgtgcgatgaactctcagtgctcattggtgagcagtacctcaaggatgaactgaagaagcgtttggagacagttgccctgcctctccaaggtttagaagaccttgcagccgatcgcattaacagactccaggcagctcttgccagcacccagcagttccagcaaatgtttgatgagttgaggacctggttggatgataaacaaagccagcaagcaaaaaactgcccaatttctgcaaaattggagcggctacagtctcagctacaggagaatgaagagtttcagaaaagtcttaatcaacacagtggctcctatgaggtgattgtggctgaaggggaatctctacttctttctgtacctcctggagaagagaaaaggactctacaaaaccagttggttgagctcaaaaaccattgggaagagcttagtaaaaaaactgcagacagacaatccaggctcaaggattgtatgcagaaagctcagaaatatcagtggcatgtggaagaccttgtgccatggatagaagattgtaaagctaagatgtctgagttgcgagtcactctggatccagtgcagctagagtccagtctcctaagatcaaaggctatgctgaatgaggtggagaagcgccgctccctgctggaaatattgaatagtgctgctgacattctgatcaattcttcagaagcagatgaggatggaatccgggatgagaaggctgggatcaaccagaacatggatgctgttacagaagagctgcaggccaaaacagggtcactcgaagaaatgactcagaggctcagggagttccaggaaagctttaagaatattgaaaagaaggttgaaggagccaaacaccaacttgagatctttgatgctctgggttctcaagcctgtagcaacaagaacctggagaagctaagagctcaacaggaagtgctgcaggccctagagcctcaggtagactatctgaggaactttactcagggtctggtagaagatgccccagatggatctgatgcttctcaacttctccaccaagctgaggtcgcccagcaagagttcctcgaagttaagcaaagagtgaacagtggttgtgtgatgatggaaaacaagctggaggggattggccagtttcactgccgggtccgagagatgttctctcaattggcagacctggatgatgagctagatggcatgggtgctattggcagagacactgatagcctccagtcccaaatcgaggatgtccggctattccttaacaaaattcacgtcctcaaattagacatagaggcctctgaagcagagtgtcgacatatgctagaagaagaggggactctggatttgttaggtctcaaaagggagctagaagccctgaacaaacagtgtggcaaactgacagagagggggaaagctcgtcaggaacagctggaactgacactaggccgtgtagaggacttctacaggaaattgaaaggactcaatgacgcgaccacagcagcagaggaggcagaggccctccagtgggtagtggggaccgaagtggaaatcatcaaccaacaattagcagattttaaaatgtttcagaaagaacaagtggatcctcttcagatgaaattgcagcaggtgaatggacttggccagggattaattcagagtgcaggaaaagactgtgatgtacagggtttagaacatgacatggaagagatcaatgctcgatggaatacattgaataaaaaggtcgcacaaagaattgcacagctacaggaagctttgttgcattgtgggaagtttcaagatgccttggagccattgctcagctggttggcagataccgaggagctcatagccaatcagaaacctccatctgctgagtataaagtggtgaaagcacagatccaagaacagaagttgctccagcggctcctagatgatcgaaaggccacagtagacatgcttcaagcagaaggaggcagaatagcccagtcagcagagctggctgatagagagaaaatcactggacagctggagagtcttgaaagtagatggactgaactactcagtaaggcagcagccaggcaaaaacagctggaagacatcctggttctggccaaacagttccatgagacagctgagcctatttctgacttcttatctgtcacagagaaaaagcttgctaactcagaacctgttggcactcagactgccaaaatacagcagcagatcattcggcacaaggctctggaagaagacatagaaaaccatgcaacagatgtgcaccaggcagtcaaaattgggcagtccctctcctccctgacatctcctgcagaacagggtgtgctgtcagaaaagatagactcattgcaggcccgatacagtgaaattcaagaccgctgttgtcggaaggcagccctacttgaccaagctctgtctaatgctaggctgtttggggaggatgaggtggaggtgctcaactggctggctgaggttgaggacaagctcagttcagtgttcgtaaaggatttcaaacaggatgtcctgcacaggcagcatgctgaccacctggctttaaatgaagaaattgttaatagaaagaagaatgtagatcaagctattaaaaatggtcaggctcttctaaaacaaaccacaggtgaggaggtgttacttatccaggaaaaactagatggtataaagactcgttacgcagacatcacagttactagctccaaggccctcagaactttagagcaagcccggcagctggccaccaagttccagtctacttatgaggaactgaccgggtggctgagggaggtggaggaggagctggcaaccagtggaggacagtctcccacaggggaacagataccccagtttcagcagagacagaaggaattaaagaaggaggtcatggagcacaggctggtgttggacacagtgaatgaggtgagccgtgctctcttagagctggtgccctggagagccagagaagggctggataaacttgtgtccgatgctaacgagcagtacaaactagtcagtgacactattggacaaagggtggatgaaattgatgctgctattcagagatcacaacagtatgagcaagctgccgatgcagaactagcttgggttgctgaaacaaaacggaaactgatggctctgggtccaattcgcctggaacaggaccagaccacagctcagcttcaggtacagaaggctttctccattgacattattcgacacaaagattcaatggatgaactcttcagtcaccgtagtgaaatctttggcacatgtggggaggagcaaaaaactgtattacaggaaaagacagagtctctaatacagcaatatgaagccattagcctactcaattcagagcgttatgcccgcctagagcgggcccaggtcttagtaaaccagttttgggaaacttatgaagagctcagcccctggattgaggaaactcgggcactaatagcacagttaccctctccagccattgatcatgagcagctcaggcagcaacaagaggaaatgaggcaattaagggaatctattgctgaacacaaacctcatattgacaaactactaaagataggcccacaactaaaggaattaaaccctgaggaaggggaaatggtggaagaaaaataccagaaagcagaaaacatgtatgcccaaataaaggaggaggtgcgccagcgagccctggctctggatgaagccgtgtcccagtccacacagattacagagtttcatgataaaattgagcctatgttggagacactggagaatctttcctctcgcctgcgtatgccaccactgatccctgctgaagtagacaagatcagagagtgcatcagtgacaataagagtgccaccgtggagctagaaaaactgcagccatcctttgaggccttgaagcgccgtggagaggagcttattggacgatctcagggagcagacaaggatctggctgcaaaagaaatccaggataaattggatcaaatggtattcttctgggaggacatcaaagctcgggctgaagaacgagaaatcaaatttcttgatgtccttgaattagcagagaagttctggtatgacatggcagctctcctgaccaccatcaaagacacccaggatattgtccatgacttggaaagcccaggcattgatccttccatcatcaaacaacaggttgaagctgctgagactattaaggaagagacagatggtctgcatgaagagctggagtttattcggatccttggagcagatttgatttttgcctgtggagaaactgagaagcctgaagtgaggaagagcattgatgagatgaataatgcttgggagaacttaaacaaaacatggaaagagaggctagaaaaacttgaggatgctatgcaagctgctgtgcagtatcaggacactcttcaggctatgtttgactggctagataacactgtgattaaactctgcaccatgccccctgttggcactgacctcaatactgttaaagatcagttaaatgaaatgaaggagttcaaagtagaagtttaccaacagcaaattgagatggagaagcttaatcaccagggtgaactgatgttaaagaaagctactgatgagacggacagagacattatacgagaaccactgacagaactcaaacacctctgggagaacctgggtgagaaaattgcccaccgacagcacaaactagaaggggctctgttggcccttggtcagttccagcatgccttagaggaactaatgagttggctgactcataccgaagagttgttagatgctcagagaccaataagtggagacccaaaagtcattgaagttgagctcgcaaagcaccatgtcctaaaaaatgatgttttggctcatcaagccacagtggaaacagtcaacaaagctggcaatgagcttcttgaatccagtgctggagatgatgccagcagcttaaggagccgtttggaagccatgaaccaagactgtacgtcacatttagaggcagcgagagagtagcagaatccaggtctgagctccatatgccacagtgcccagcatcatatgctatgctggtatatagtctagtggctgtcagttcaatggagagccagctttctgcatctaagcccacaggaggacttcctgaaactgctagggaacagcttgatacacatatggaactctattcccagctgaaagccaaggaagagacttataatcaactacttgacaagggcagactcatgcttctaagccgtgacgactctgggtctggctccaagacagaacagagtgtagcacttttggagcagaagtggcatgtggtcagcagtaagatggaagaaagaaagtcaaagctggaagaggccctcaacttggcaacagaattccagaattccctacaagaatttatcaactggctcactctagcagagcagagtttaaacatcgcttctccaccaagcctgattctaaatactgtcctttcccagatagaagagcacaaggtttttgctaatgaagtaaatgctcatcgagaccagatcattgagctggatcaaactgggaatagagttccatatgtgtatcaagctgttccctagcagtttcaggaagtcctcctgtgggcttagatgcagaaagctggctctccattctagtcagttccaagaagaaatattcaatttcactgtggaagcactggccctgctgcagagttgactgaaactgttgctccctctcatctgttttctgtacactgacttcagcattggttcatggttttcaaacggctccataagctgctgcat

SEQ ID NO: 367620 - DNA, 12844 bp, Homo sapiens
  misc_feature (995)..(995): n is a, c, g, or t
  misc_feature (1066)..(1066): n is a, c, g, or t
  misc_feature (1076)..(1076): n is a, c, g, or t
tcaaaacaccatctattaaagctgacaattgtcacaagcagaattgaatactcaaagggaagttaacttcacacagaaaaacacttcatatttcattcaacttgcaacgtatttactgagcgtctaccgtgtgtaaggcagcctgctaggaaatggggtacgaccctcctcctcacagagcttacattctgacaggggaacccgaagtgaacaagcatgatctgcaacaggtatgagatgtcaagaaagcctattacagaggcacccaggcccagtctacggggtcactaaaggctatgggataaactgatctgaaggatgagcacaaatcaatcatcgagaggctgagagcagctcaagtcgggggaataagatgtgcgagaagcaggagagagcaggatgaaataaaatcaggcccgtgtgatgcgtggtgaacagtgagtacccagagaagcgaagctgggggctgaggggctggtcaggaacacgggcttaattcatcaacccaacagcaaacatcagtgcaacaatgtaagcacatttaccttctgggtcataatgtaatttcttccaaagccagtggtggcactcagatatttgatcagaggattgacagattcaggcttttggtggaaaagccatacctggaaaggaaggatgtgtcaatgatttgtttcttctgcccaaggtgagtgaggctggtggagagtcactatctgcactttatagagctccccagacaaattataaacatcctctcaaatatcatcagtgaatggtttggcaaatatattgagaaccaattaaaatatagtttaaaagcacttgcttctacaaccaatttgtattcccacaataaatgtatttatttctgtaacacttaccaaaacaagagcatcaaagccaattccttcacactgccctccctcccacctgctcttcatgaggagtcctttattcctgcatgtttcctgttctttgggccggaattccgnggcgcgatgtcggctcactacaacctctgcctcctggattcaagcaattctgtacctcagcctcccgagtngctgtgattncagatgaacgggaccgggttcagaagaaaacgttcaccaagtgggtcaacaagcacttaatgaaggtccgcaagcacatcaatgatctttatgaagatctgcgggatggccataacctgatctctctgttggaggtcctctcaggcatcaaactgccccgggagaagggcaggatgcgttttcataggctgcagaatgtgcagattgccctggacttcctaaagcagcgacaggtgaaactagtgaatattcgcaatgatgacatcacagatggcaaccccaagttgaccctgggtctgatctggaccattattttgcatttccagatctctgacatctacattagtggagaatcaggggatatgtcagccaaggagaaactactcctgtggacccagaaggtgacagctggttacacaggaatcaaatgcaccaacttttcctcctgctggagtgatgggaagatgttcaatgcactcattcaccgataccgacccgatctagtagacatggagagggtgcaaatccaaagtaaccgagagaatctggaacaagcttttgaagtggcagaaagactgggggtcactcgcctgctggatgcagaagatgtggatgtgccatctccagatgaaaagtctgtaatcacttatgtgtcttcgatttatgatgccttccctaaagttcctgagggtggagaagggatcagtgctacggaagtggactccaggtggcaagaataccaaagccgagtggactccctcattccctggatcaaacagcatacaatactgatgtcagataaaacttttccccaaaaccctgttgaactaaaggcactttataaccaatatatacacttcaaagaaacagaaattctggccaaggagagagaaaaaggaagaattgaggaattatataaattactagaggtgtggattgaatttggccgaattaaactgcctcaaggttatcaccctaatgatgtggaagaagagtggggaaagctcatcatagagatgctggaacgagagaaatcacttcggccggctgtggagaggctggaattgctgctacagattgcaaacaaaatccagaatggtgctttgaactgtgaagaaaaactgacactagctaagaatacactgcaggctgatgctgctcacctggaatcaggacaaccggtacaatgtgagtcagatgtcattatgtacattcaagagtgtgaaggtctcatcaggcagctgcaggtggatctccagatcctgcgggatgagaattactaccagctagaagagctggcttttagggtcatgcgtcttcaggatgagctggtcaccttgcgtctagagtgtacaaacctgtaccggaagggtcatttcacttcacttgaattggttccaccctctactttaaccaccactcatctgaaagcagaacccttaaccaaggcaacccattcttcttctacctcctggttccgaaagcctatgactcgggctgaacttgggccatcagctcctctgaagatgaaggcaatctccgatttgtgtatgaactactgtctttgggtagaagagatgcagatgaaactggagcgagcagagtggggcaatgacctgcctagtgtggagttgcagctagaaacacagcagcacatccatacgagtgtagaagagctgggctcaagtgtcaaggaggccaggttgtatgagggaaagatgtcccagaatttccataccagctatgctgaaactcttggaaagctggagacacagtattgtaaattgaaggaaacttctagcttccggatgaggcaccttcagagcctgcataaatttgtttccagagctacagctgagttgatctggttgaatgagaaggaggaggaggaactagcatatgactggagtgacaacaattccaatatctcagccaagagaaattacttctctgagttgacaatggaactggaggagaaacaggatgtgtttcgttctctacaagatacagcagaactactttcacttgagaaccacccagccaagcagacagtggaggcttacagtgctgctgtccagtcccagttgcagtggatgaagcagctgtgcctgtgtgttgagcagcatgtgaaagagaatactgcttattttcagttcttcagtgatgcacgagagctggagtcattcttgaggaacctccaagattccattaaacgaaaatattcctgtgaccacaacaccagcttatcccgccttgaagacctgctccaggactccatggatgaaaaggagcagcttatacagtccaagagttccgttgccagtctcgttgggagatcaaaaaccatcgttcagctaaaaccacgcagtccagaccatgtgttaaagaacaccatttctgtcaaggctgtctgtgactacaggcagatcgagattactatttgcaaaaatgatgaatgtgtgctagaagataattctcagcggaccaaatggaaagtgatcagccccacagggaacgaggcaatggtgccgtcagtctgcttcctcatccccccacccaataaggatgccattgagatggccagcagggtcgaacaatcttatcagaaggttatggccctttggcatcagctgcatgttaacaccaaaagccttatctcttggaactatctgcgtaaagaccttgaccttgtacagacctggaacctagaaaagcttcgatcctcagcaccaggggagtgccatcagattatgaagaaccttcaggcccactatgaagactttctgcaggatagtcgtgactctgtgctgttctcagtggctgatcgcttgcgcttggaagaggaggtggaagcttgtaaagcccgcttccagcacctgatgaagtccatggagaatgaggacaaagaggagactgtggccaagatgtacatttcagagttgaagaacatccggctacgcctggaggagtatgaacagagggtggtcaaacgaattcagtctctagccagctctaggactgacagagatgcctggcaggacaatgcattaaggattgcagagcaagagcacacccaggaggatttacagcaattgaggtcagacttggatgcagtttctatgaaatgtgacagctttctccatcagtctccatctagttcaagtgtcccaactctgcgctcagaactgaatctgctggtggagaagatggaccatgtctatggtctctctactgtatatctgaataagttaaagacagttgatgttatagtacgtagcatacaggatgctgaactcttggtcaaaggttatgagattaagctgagtcaagaagaagtagtactggcagatctctcagctctggaggcccattggtcgacattacggcactggcttagtgatgtgaaggacaagaattcagtgttttcagtcctggatgaggaaattgccaaggccaaggtagtggcagagcagatgagtcgtctgacaccagagcgaaatctggatttggagcgctatcaggaaaaaggctcccagctgcaggagcgttggcaccgagtcattgcccagctcgagattcgccaatctgagctagaaagtatccaggaagttctgggagattaccgagcctgccatggaactctcatcaagtggattgaggaaaccactgcccagcaggaaatgatgaagccaggccaggcagaggatagcagagtgctttcggagcagctcagccagcagacggccctatttgcagaaattgagagaaatcagacaaaactggatcaatgtcaaaaattttcccagcagtactctactattgtaaaggactatgaattgcaactgatgacatacaaggcctttgtggaatcgcagcagaaatcccctggcaagcgccgtcgcatgctttcctcttcagatgccatcactcaagagttcatggacttaaggactcgctacacggcattggtgactttaacaactcagcacgtgaaatacatcagtgatgcactccggcgtctggaggaggaggagaaagtggtagaagaggagaaacaagaacatgtggagaaggttaaagaacttttgggctgggtgtctaccctagcgaggaatacacaaggaaaagctacctcatccgagaccaaagaatcaacagacattgaaaaagctattttggaacagcaggttctgtcagaagagctgacaacaaagaaagaacaagtctctgaagctattaaaacatcacagatcttcttggccaagcatggtcataagctctcagaaaaagagaagaaacaaatatctgagcaattgaatgccctaaacaaggcttaccatgacctttgtgatggttctgcaaatcagcttcagcagcttcagagccagttggctcaccagacagaacaaaagaccctgcagaaacaacaaaatacctgtcaccagcaactggaggatctttgcagttgggtaggacaggcagaaagagcactggcaggccaccaaggcagaaccacccagcaggatctctctgctttgcagaagaaccaaagtgacttgaaggatttacaggatgacattcagaatcgtgccacctcatttgccactgttgtcaaggacattgaggggttcatggaagagaatcagaccaagctgagcccacgtgagttgacagctcttcgggaaaagcttcatcaggctaaggagcaatatgaggcgctccaggaagagacacgtgtggcccagaaggaactggaggaagcagtgacctccgccttacagcaggagactgaaaagagtaaagcagcaaaggaactggcagagaacaagaagaagatcgatgctctcctggattgggtaacttcagtaggatcatctggtggacagctgctgaccaaccttccaggaatggagcagctctcgggagctagcttggagaaaggagccttggacaccactgatggttacatgggggtgaatcaagccccagagaaactggacaagcaatgtgagatgatgaaggcccgtcaccaagaattgctgtcccagcagcaaaatttcattctggccacccagtcagctcaggccttcttggatcagcatggccacaatctcacacctgaggagcaacagatgctgcaacagaagctgggagagctaaaggaacaatactctacttccctggcccaatcagaggcagaactgaagcaggtgcagacacttcaggatgagttgcagaaatttctgcaggatcataaagagtttgaaagctggttggaacgatccgagaaagagctggagaacatgcataagggaggcagcagccccgagacccttccctccctgctaaagcggcaaggaagcttctcagaggatgtcatttcccacaaaggagacttgagatttgtgactatctcaggacagaaagtcttggacatggaaaacagttttaaggaaggcaaagaaccatcagaaattggaaacttagtaaaggacaagttgaaggatgcaacagaaagatacactgctctccactcaaagtgtacacgattaggatctcacctgaatatgctgttaggccagtatcatcaattccaaaacagtgctgacagcctgcaggcctggatgcaggcttgtgaggccaacgtggagaagctcctctcagatactgttgcctctgaccctggagttctccaggagcagcttgcaacaacaaagcagttgcaggaggaattggctgagcaccaagtacctgtggaaaaactccaaaaagtagctcgtgacataatggaaattgaaggggagccagccccagaccacaggcatgttcaagaaactacagattccatactcagccacttccaaagcctctcctatagcctggctgagcgatcttctctgctgcagaaagcaattgcccaatctcagagtgtccaggaaagcctggagagcctgttgcagtctattggggaagttgaacaaaacctggaagggaagcaggtgtcatcactctcatcaggagtcatccaggaagccttagccacaaatatgaaattgaagcaggacattgctcggcaaaagagcagcttggaggccacccgtgagatggtgacccgattcatggagacagcagacagtactacagcagcagtgctgcagggcaaactggcagaggtgagccagcggttcgaacagctctgtctacagcagcaagaaaaggagagctccctaaagaagcttctaccccaggcagagatgtttgaacacctctctggtaagctgcagcagttcatggaaaacaaaagtcggatgctggcctctggaaatcagccagatcaagatattacacatttcttccaacagatccaggagctcaatttggaaatggaagaccaacaggagaacctagatactcttgagcacctggtcactgaactgagctcttgtggctttgcgctggacttgtgccagcatcaggacagggtacagaatctaagaaaagacttcacagagctacagaagacagttaaagagagagagaaagatgcatcatcttgccaggaacagttggatgaattccggaagctggtcaggaccttccagaaatggttgaaagaaactgaagggagtattccacctacggaaacttctatgagtgctaaagagttagaaaagcagattgaacacctgaagagtctactagatgactgggcaagtaagggaactctggtggaagaaatcaattgcaaaggtacttctttagaaaatctcatcatggaaatcacagcacctgattcccaaggcaagacagatctgacggagatccagtgtgacatgtcagatgtaaacttgaagtatgagaaactagggggagtacttcatgaacgccaggaaagccttcaggctatcctcaacagaatggaggaggttcacaaggaggcaaactctgtgctgcagtggctggaatcaaaagaggaagtcctgaaatccatggatgccatgtcatctccaaccaagacagaaacagtgaaagcccaagctgaatctaacaaggccttcctggctgagttggaacagaattctccaaaaattcaaaaagtaaaggaagccctggctggattactggtgacatatcccaactcacaggaagcagaaaattggaagaaaattcaggaagaactcaattcccgatgggaaagggccactgaggttactgtggctcggcaaaggcagctagaggaatctgcaagtcatctggcctgcttccaggctgcagaatcccagctccggccgtggctgatggagaaagaactgatgatgggagtgctggggcccctgtctattgaccccaacatgttgaatgcacaaaagcaacaggtccagtttatgctaaaggaatttgaagcacgcaggcaacagcatgagcaactgaatgaggcagctcagggcatcctaacaggccctggagatgtctctctgtccaccagccaagtacagaaagaactccagagcatcaatcagaaatgggttgagctgactgacaaactcaactcccgttccagccaaattgaccaagctattgttaagagcacccagtaccaggaactgctccaggacttatcagagaaggtgagggcagttggacaacggctgagtgtccagtcagctatcagcacccaaccagaggctgtaaagcagcaattggaagagaccagtgaaattcgatctgacttggagcagttagaccacgaggttaaggaggctcagacactgtgcgatgaactctcagtgctcattggtgagcagtacctcaaggatgaactgaagaagcgtttggagacagttgccctgcctctccaaggtttagaagaccttgcagccgatcgcattaacagactccaggcagctcttgccagcacccagcagttccagcaaatgtttgatgagttgaggacctggttggatgataaacaaagccagcaagcaaaaaactgcccaatttctgcaaaattggagcggctacagtctcagctacaggagaatgaagagtttcagaaaagtcttaatcaacacagtggctcctatgaggtgattgtggctgaaggggaatctctacttctttctgtacctcctggagaagagaaaaggactctacaaaaccagttggttgagctcaaaaaccattgggaagagcttagtaaaaaaactgcagacagacaatccaggctcaaggattgtatgcagaaagctcagaaatatcagtggcatgtggaagaccttgtgccatggatagaagattgtaaagctaagatgtctgagttgcgagtcactctggatccagtgcagctagagtccagtctcctaagatcaaaggctatgctgaatgaggtggagaagcgccgctccctgctggaaatattgaatagtgctgctgacattctgatcaattcttcagaagcagatgaggatggaatccgggatgagaaggctgggatcaaccagaacatggatgctgttacagaagagctgcaggccaaaacagggtcactcgaagaaatgactcagaggctcagggagttccaggaaagctttaagaatattgaaaagaaggttgaaggagccaaacaccaacttgagatctttgatgctctgggttctcaagcctgtagcaacaagaacctggagaagctaagagctcaacaggaagtgctgcaggccctagagcctcaggtagactatctgaggaactttactcagggtctggtagaagatgccccagatggatctgatgcttctcaacttctccaccaagctgaggtcgcccagcaagagttcctcgaagttaagcaaagagtgaacagtggttgtgtgatgatggaaaacaagctggaggggattggccagtttcactgccgggtccgagagatgttctctcaattggcagacctggatgatgagctagatggcatgggtgctattggcagagacactgatagcctccagtcccaaatcgaggatgtccggctattccttaacaaaattcacgtcctcaaattagacatagaggcctctgaagcagagtgtcgacatatgctagaagaagaggggactctggatttgttaggtctcaaaagggagctagaagccctgaacaaacagtgtggcaaactgacagagagggggaaagctcgtcaggaacagctggaactgacactaggccgtgtagaggacttctacaggaaattgaaaggactcaatgacgcgaccacagcagcagaggaggcagaggccctccagtgggtagtggggaccgaagtggaaatcatcaaccaacaattagcagattttaaaatgtttcagaaagaacaagtggatcctcttcagatgaaattgcagcaggtgaatggacttggccagggattaattcagagtgcaggaaaagactgtgatgtacagggtttagaacatgacatggaagagatcaatgctcgatggaatacattgaataaaaaggtcgcacaaagaattgcacagctacaggaagctttgttgcattgtgggaagtttcaagatgccttggagccattgctcagctggttggcagataccgaggagctcatagccaatcagaaacctccatctgctgagtataaagtggtgaaagcacagatccaagaacagaagttgctccagcggctcctagatgatcgaaaggccacagtagacatgcttcaagcagaaggaggcagaatagcccagtcagcagagctggctgatagagagaaaatcactggacagctggagagtcttgaaagtagatggactgaactactcagtaaggcagcagccaggcaaaaacagctggaagacatcctggttctggccaaacagttccatgagacagctgagcctatttctgacttcttatctgtcacagagaaaaagcttgctaactcagaacctgttggcactcagactgccaaaatacagcagcagatcattcggcacaaggctctggaagaagacatagaaaaccatgcaacagatgtgcaccaggcagtcaaaattgggcagtccctctcctccctgacatctcctgcagaacagggtgtgctgtcagaaaagatagactcattgcaggcccgatacagtgaaattcaagaccgctgttgtcggaaggcagccctacttgaccaagctctgtctaatgctaggctgtttggggaggatgaggtggaggtgctcaactggctggctgaggttgaggacaagctcagttcagtgttcgtaaaggatttcaaacaggatgtcctgcacaggcagcatgctgaccacctggctttaaatgaagaaattgttaatagaaagaagaatgtagatcaagctattaaaaatggtcaggctcttctaaaacaaaccacaggtgaggaggtgttacttatccaggaaaaactagatggtataaagactcgttacgcagacatcacagttactagctccaaggccctcagaactttagagcaagcccggcagctggccaccaagttccagtctacttatgaggaactgaccgggtggctgagggaggtggaggaggagctggcaaccagtggaggacagtctcccacaggggaacagataccccagtttcagcagagacagaaggaattaaagaaggaggtcatggagcacaggctggtgttggacacagtgaatgaggtgagccgtgctctcttagagctggtgccctggagagccagagaagggctggataaacttgtgtccgatgctaacgagcagtacaaactagtcagtgacactattggacaaagggtggatgaaattgatgctgctattcagagatcacaacagtatgagcaagctgccgatgcagaactagcttgggttgctgaaacaaaacggaaactgatggctctgggtccaattcgcctggaacaggaccagaccacagctcagcttcaggtacagaaggctttctccattgacattattcgacacaaagattcaatggatgaactcttcagtcaccgtagtgaaatctttggcacatgtggggaggagcaaaaaactgtattacaggaaaagacagagtctctaatacagcaatatgaagccattagcctactcaattcagagcgttatgcccgcctagagcgggcccaggtcttagtaaaccagttttgggaaacttatgaagagctcagcccctggattgaggaaactcgggcactaatagcacagttaccctctccagccattgatcatgagcagctcaggcagcaacaagaggaaatgaggcaattaagggaatctattgctgaacacaaacctcatattgacaaactactaaagataggcccacaactaaaggaattaaaccctgaggaaggggaaatggtggaagaaaaataccagaaagcagaaaacatgtatgcccaaataaaggaggaggtgcgccagcgagccctggctctggatgaagccgtgtcccagtccacacaggtatgtgtgtgtctgacactcataaccttgaattgtctactgttctaaacaagaggtctctgtatcaggtatgtctctgtgctcaggaatgtccagagcagcatgttaatacgtgatcggtagatagaacagaaagcttagcctatcttcatttttattccaaggaacattggcatactgacattctaaggagagtgaaatgagtcttggctggtatatattgtctgttgatggtttctctgaaaa

SEQ ID NO: 367621 - DNA, 11917 bp, Homo sapiens
  misc_feature (995)..(995): n is a, c, g, or t
  misc_feature (1066)..(1066): n is a, c, g, or t
  misc_feature (1076)..(1076): n is a, c, g, or t
tcaaaacaccatctattaaagctgacaattgtcacaagcagaattgaatactcaaagggaagttaacttcacacagaaaaacacttcatatttcattcaacttgcaacgtatttactgagcgtctaccgtgtgtaaggcagcctgctaggaaatggggtacgaccctcctcctcacagagcttacattctgacaggggaacccgaagtgaacaagcatgatctgcaacaggtatgagatgtcaagaaagcctattacagaggcacccaggcccagtctacggggtcactaaaggctatgggataaactgatctgaaggatgagcacaaatcaatcatcgagaggctgagagcagctcaagtcgggggaataagatgtgcgagaagcaggagagagcaggatgaaataaaatcaggcccgtgtgatgcgtggtgaacagtgagtacccagagaagcgaagctgggggctgaggggctggtcaggaacacgggcttaattcatcaacccaacagcaaacatcagtgcaacaatgtaagcacatttaccttctgggtcataatgtaatttcttccaaagccagtggtggcactcagatatttgatcagaggattgacagattcaggcttttggtggaaaagccatacctggaaaggaaggatgtgtcaatgatttgtttcttctgcccaaggtgagtgaggctggtggagagtcactatctgcactttatagagctccccagacaaattataaacatcctctcaaatatcatcagtgaatggtttggcaaatatattgagaaccaattaaaatatagtttaaaagcacttgcttctacaaccaatttgtattcccacaataaatgtatttatttctgtaacacttaccaaaacaagagcatcaaagccaattccttcacactgccctccctcccacctgctcttcatgaggagtcctttattcctgcatgtttcctgttctttgggccggaattccgnggcgcgatgtcggctcactacaacctctgcctcctggattcaagcaattctgtacctcagcctcccgagtngctgtgattncagatgaacgggaccgggttcagaagaaaacgttcaccaagtgggtcaacaagcacttaatgaaggtccgcaagcacatcaatgatctttatgaagatctgcgggatggccataacctgatctctctgttggaggtcctctcaggcatcaaactgccccgggagaagggcaggatgcgttttcataggctgcagaatgtgcagattgccctggacttcctaaagcagcgacaggtgaaactagtgaatattcgcaatgatgacatcacagatggcaaccccaagttgaccctgggtctgatctggaccattattttgcatttccagatctctgacatctacattagtggagaatcaggggatatgtcagccaaggagaaactactcctgtggacccagaaggtgacagctggttacacaggaatcaaatgcaccaacttttcctcctgctggagtgatgggaagatgttcaatgcactcattcaccgataccgacccgatctagtagacatggagagggtgcaaatccaaagtaaccgagagaatctggaacaagcttttgaagtggcagaaagactgggggtcactcgcctgctggatgcagaagatgtggatgtgccatctccagatgaaaagtctgtaatcacttatgtgtcttcgatttatgatgccttccctaaagttcctgagggtggagaagggatcagtgctacggaagtggactccaggtggcaagaataccaaagccgagtggactccctcattccctggatcaaacagcatacaatactgatgtcagataaaacttttccccaaaaccctgttgaactaaaggcactttataaccaatatatacacttcaaagaaacagaaattctggccaaggagagagaaaaaggaagaattgaggaattatataaattactagaggtgtggattgaatttggccgaattaaactgcctcaaggttatcaccctaatgatgtggaagaagagtggggaaagctcatcatagagatgctggaacgagagaaatcacttcggccggctgtggagaggctggaattgctgctacagattgcaaacaaaatccagaatggtgctttgaactgtgaagaaaaactgacactagctaagaatacactgcaggctgatgctgctcacctggaatcaggacaaccggtacaatgtgagtcagatgtcattatgtacattcaagagtgtgaaggtctcatcaggcagctgcaggtggatctccagatcctgcgggatgagaattactaccagctagaagagctggcttttagggtcatgcgtcttcaggatgagctggtcaccttgcgtctagagtgtacaaacctgtaccggaagggtcatttcacttcacttgaattggttccaccctctactttaaccaccactcatctgaaagcagaacccttaaccaaggcaacccattcttcttctacctcctggttccgaaagcctatgactcgggctgaacttgggccatcagctcctctgaagatgaaggcaatctccgatttgtgtatgaactactgtctttgggtagaagagatgcagatgaaactggagcgagcagagtggggcaatgacctgcctagtgtggagttgcagctagaaacacagcagcacatccatacgagtgtagaagagctgggctcaagtgtcaaggaggccaggttgtatgagggaaagatgtcccagaatttccataccagctatgctgaaactcttggaaagctggagacacagtattgtaaattgaaggaaacttctagcttccggatgaggcaccttcagagcctgcataaatttgtttccagagctacagctgagttgatctggttgaatgagaaggaggaggaggaactagcatatgactggagtgacaacaattccaatatctcagccaagagaaattacttctctgagttgacaatggaactggaggagaaacaggatgtgtttcgttctctacaagatacagcagaactactttcacttgagaaccacccagccaagcagacagtggaggcttacagtgctgctgtccagtcccagttgcagtggatgaagcagctgtgcctgtgtgttgagcagcatgtgaaagagaatactgcttattttcagttcttcagtgatgcacgagagctggagtcattcttgaggaacctccaagattccattaaacgaaaatattcctgtgaccacaacaccagcttatcccgccttgaagacctgctccaggactccatggatgaaaaggagcagcttatacagtccaagagttccgttgccagtctcgttgggagatcaaaaaccatcgttcagctaaaaccacgcagtccagaccatgtgttaaagaacaccatttctgtcaaggctgtctgtgactacaggcagatcgagattactatttgcaaaaatgatgaatgtgtgctagaagataattctcagcggaccaaatggaaagtgatcagccccacagggaacgaggcaatggtgccgtcagtctgcttcctcatccccccacccaataaggatgccattgagatggccagcagggtcgaacaatcttatcagaaggttatggccctttggcatcagctgcatgttaacaccaaaagccttatctcttggaactatctgcgtaaagaccttgaccttgtacagacctggaacctagaaaagcttcgatcctcagcaccaggggagtgccatcagattatgaagaaccttcaggcccactatgaagactttctgcaggatagtcgtgactctgtgctgttctcagtggctgatcgcttgcgcttggaagaggaggtggaagcttgtaaagcccgcttccagcacctgatgaagtccatggagaatgaggacaaagaggagactgtggccaagatgtacatttcagagttgaagaacatccggctacgcctggaggagtatgaacagagggtggtcaaacgaattcagtctctagccagctctaggactgacagagatgcctggcaggacaatgcattaaggattgcagagcaagagcacacccaggaggatttacagcaattgaggtcagacttggatgcagtttctatgaaatgtgacagctttctccatcagtctccatctagttcaagtgtcccaactctgcgctcagaactgaatctgctggtggagaagatggaccatgtctatggtctctctactgtatatctgaataagttaaagacagttgatgttatagtacgtagcatacaggatgctgaactcttggtcaaaggttatgagattaagctgagtcaagaagaagtagtactggcagatctctcagctctggaggcccattggtcgacattacggcactggcttagtgatgtgaaggacaagaattcagtgttttcagtcctggatgaggaaattgccaaggccaaggtagtggcagagcagatgagtcgtctgacaccagagcgaaatctggatttggagcgctatcaggaaaaaggctcccagctgcaggagcgttggcaccgagtcattgcccagctcgagattcgccaatctgagctagaaagtatccaggaagttctgggagattaccgagcctgccatggaactctcatcaagtggattgaggaaaccactgcccagcaggaaatgatgaagccaggccaggcagaggatagcagagtgctttcggagcagctcagccagcagacggccctatttgcagaaattgagagaaatcagacaaaactggatcaatgtcaaaaattttcccagcagtactctactattgtaaaggactatgaattgcaactgatgacatacaaggcctttgtggaatcgcagcagaaatcccctggcaagcgccgtcgcatgctttcctcttcagatgccatcactcaagagttcatggacttaaggactcgctacacggcattggtgactttaacaactcagcacgtgaaatacatcagtgatgcactccggcgtctggaggaggaggagaaagtggtagaagaggagaaacaagaacatgtggagaaggttaaagaacttttgggctgggtgtctaccctagcgaggaatacacaaggaaaagctacctcatccgagaccaaagaatcaacagacattgaaaaagctattttggaacagcaggttctgtcagaagagctgacaacaaagaaagaacaagtctctgaagctattaaaacatcacagatcttcttggccaagcatggtcataagctctcagaaaaagagaagaaacaaatatctgagcaattgaatgccctaaacaaggcttaccatgacctttgtgatggttctgcaaatcagcttcagcagcttcagagccagttggctcaccagacagaacaaaagaccctgcagaaacaacaaaatacctgtcaccagcaactggaggatctttgcagttgggtaggacaggcagaaagagcactggcaggccaccaaggcagaaccacccagcaggatctctctgctttgcagaagaaccaaagtgacttgaaggatttacaggatgacattcagaatcgtgccacctcatttgccactgttgtcaaggacattgaggggttcatggaagagaatcagaccaagctgagcccacgtgagttgacagctcttcgggaaaagcttcatcaggctaaggagcaatatgaggcgctccaggaagagacacgtgtggcccagaaggaactggaggaagcagtgacctccgccttacagcaggagactgaaaagagtaaagcagcaaaggaactggcagagaacaagaagaagatcgatgctctcctggattgggtaacttcagtaggatcatctggtggacagctgctgaccaaccttccaggaatggagcagctctcgggagctagcttggagaaaggagccttggacaccactgatggttacatgggggtgaatcaagccccagagaaactggacaagcaatgtgagatgatgaaggcccgtcaccaagaattgctgtcccagcagcaaaatttcattctggccacccagtcagctcaggccttcttggatcagcatggccacaatctcacacctgaggagcaacagatgctgcaacagaagctgggagagctaaaggaacaatactctacttccctggcccaatcagaggcagaactgaagcaggtgcagacacttcaggatgagttgcagaaatttctgcaggatcataaagagtttgaaagctggttggaacgatccgagaaagagctggagaacatgcataagggaggcagcagccccgagacccttccctccctgctaaagcggcaaggaagcttctcagaggatgtcatttcccacaaaggagacttgagatttgtgactatctcaggacagaaagtcttggacatggaaaacagttttaaggaaggcaaagaaccatcagaaattggaaacttagtaaaggacaagttgaaggatgcaacagaaagatacactgctctccactcaaagtgtacacgattaggatctcacctgaatatgctgttaggccagtatcatcaattccaaaacagtgctgacagcctgcaggcctggatgcaggcttgtgaggccaacgtggagaagctcctctcagatactgttgcctctgaccctggagttctccaggagcagcttgcaacaacaaagcagttgcaggaggaattggctgagcaccaagtacctgtggaaaaactccaaaaagtagctcgtgacataatggaaattgaaggggagccagccccagaccacaggcatgttcaagaaactacagattccatactcagccacttccaaagcctctcctatagcctggctgagcgatcttctctgctgcagaaagcaattgcccaatctcagagtgtccaggaaagcctggagagcctgttgcagtctattggggaagttgaacaaaacctggaagggaagcaggtgtcatcactctcatcaggagtcatccaggaagccttagccacaaatatgaaattgaagcaggacattgctcggcaaaagagcagcttggaggccacccgtgagatggtgacccgattcatggagacagcagacagtactacagcagcagtgctgcagggcaaactggcagaggtgagccagcggttcgaacagctctgtctacagcagcaagaaaaggagagctccctaaagaagcttctaccccaggcagagatgtttgaacacctctctggtaagctgcagcagttcatggaaaacaaaagtcggatgctggcctctggaaatcagccagatcaagatattacacatttcttccaacagatccaggagctcaatttggaaatggaagaccaacaggagaacctagatactcttgagcacctggtcactgaactgagctcttgtggctttgcgctggacttgtgccagcatcaggacagggtacagaatctaagaaaagacttcacagagctacagaagacagttaaagagagagagaaagatgcatcatcttgccaggaacagttggatgaattccggaagctggtcaggaccttccagaaatggttgaaagaaactgaagggagtattccacctacggaaacttctatgagtgctaaagagttagaaaagcagattgaacacctgaagagtctactagatgactgggcaagtaagggaactctggtggaagaaatcaattgcaaaggtacttctttagaaaatctcatcatggaaatcacagcacctgattcccaaggcaagacagatctgacggagatccagtgtgacatgtcagatgtaaacttgaagtatgagaaactagggggagtacttcatgaacgccaggaaagccttcaggctatcctcaacagaatggaggaggttcacaaggaggcaaactctgtgctgcagtggctggaatcaaaagaggaagtcctgaaatccatggatgccatgtcatctccaaccaagacagaaacagtgaaagcccaagctgaatctaacaaggccttcctggctgagttggaacagaattctccaaaaattcaaaaagtaaaggaagccctggctggattactggtgacatatcccaactcacaggaagcagaaaattggaagaaaattcaggaagaactcaattcccgatgggaaagggccactgaggttactgtggctcggcaaaggcagctagaggaatctgcaagtcatctggcctgcttccaggctgcagaatcccagctccggccgtggctgatggagaaagaactgatgatgggagtgctggggcccctgtctattgaccccaacatgttgaatgcacaaaagcaacaggtccagtttatgctaaaggaatttgaagcacgcaggcaacagcatgagcaactgaatgaggcagctcagggcatcctaacaggccctggagatgtctctctgtccaccagccaagtacagaaagaactccagagcatcaatcagaaatgggttgagctgactgacaaactcaactcccgttccagccaaattgaccaagctattgttaagagcacccagtaccaggaactgctccaggacttatcagagaaggtgagggcagttggacaacggctgagtgtccagtcagctatcagcacccaaccagaggctgtaaagcagcaattggaagagaccagtgaaattcgatctgacttggagcagttagaccacgaggttaaggaggctcagacactgtgcgatgaactctcagtgctcattggtgagcagtacctcaaggatgaactgaagaagcgtttggagacagttgccctgcctctccaaggtttagaagaccttgcagccgatcgcattaacagactccaggcagctcttgccagcacccagcagttccagcaaatgtttgatgagttgaggacctggttggatgataaacaaagccagcaagcaaaaaactgcccaatttctgcaaaattggagcggctacagtctcagctacaggagaatgaagagtttcagaaaagtcttaatcaacacagtggctcctatgaggtgattgtggctgaaggggaatctctacttctttctgtacctcctggagaagagaaaaggactctacaaaaccagttggttgagctcaaaaaccattgggaagagcttagtaaaaaaactgcagacagacaatccaggctcaaggattgtatgcagaaagctcagaaatatcagtggcatgtggaagaccttgtgccatggatagaagattgtaaagctaagatgtctgagttgcgagtcactctggatccagtgcagctagagtccagtctcctaagatcaaaggctatgctgaatgaggtggagaagcgccgctccctgctggaaatattgaatagtgctgctgacattctgatcaattcttcagaagcagatgaggatggaatccgggatgagaaggctgggatcaaccagaacatggatgctgttacagaagagctgcaggccaaaacagggtcactcgaagaaatgactcagaggctcagggagttccaggaaagctttaagaatattgaaaagaaggttgaaggagccaaacaccaacttgagatctttgatgctctgggttctcaagcctgtagcaacaagaacctggagaagctaagagctcaacaggaagtgctgcaggccctagagcctcaggtagactatctgaggaactttactcagggtctggtagaagatgccccagatggatctgatgcttctcaacttctccaccaagctgaggtcgcccagcaagagttcctcgaagttaagcaaagagtgaacagtggttgtgtgatgatggaaaacaagctggaggggattggccagtttcactgccgggtccgagagatgttctctcaattggcagacctggatgatgagctagatggcatgggtgctattggcagagacactgatagcctccagtcccaaatcgaggatgtccggctattccttaacaaaattcacgtcctcaaattagacatagaggcctctgaagcagagtgtcgacatatgctagaagaagaggggactctggatttgttaggtctcaaaagggagctagaagccctgaacaaacagtgtggcaaactgacagagagggggaaagctcgtcaggaacagctggaactgacactaggccgtgtagaggacttctacaggaaattgaaaggactcaatgacgcgaccacagcagcagaggaggcagaggccctccagtgggtagtggggaccgaagtggaaatcatcaaccaacaattagcagattttaaaatgtttcagaaagaacaagtggatcctcttcagatgaaattgcagcaggtgaatggacttggccagggattaattcagagtgcaggaaaagactgtgatgtacagggtttagaacatgacatggaagagatcaatgctcgatggaatacattgaataaaaaggtcgcacaaagaattgcacagctacaggaagctttgttgcattgtgggaagtttcaagatgccttggagccattgctcagctggttggcagataccgaggagctcatagccaatcagaaacctccatctgctgagtataaagtggtgaaagcacagatccaagaacagaagttgctccagcggctcctagatgatcgaaaggccacagtagacatgcttcaagcagaaggaggcagaatagcccagtcagcagagctggctgatagagagaaaatcactggacagctggagagtcttgaaagtagatggactgaactactcagtaaggcagcagccaggcaaaaacagctggaagacatcctggttctggccaaacagttccatgagacagctgagcctatttctgacttcttatctgtcacagagaaaaagcttgctaactcagaacctgttggcactcagactgccaaaatacagcagcagatcattcggcacaaggctctggaagaagacatagaaaaccatgcaacagatgtgcaccaggcagtcaaaattgggcagtccctctcctccctgacatctcctgcagaacagggtgtgctgtcagaaaagatagactcattgcaggcccgatacagtgaaattcaagaccgctgttgtcggaaggcagccctacttgaccaagctctgtctaatgctaggctgtttggggaggatgaggtggaggtgctcaactggctggctgaggttgaggacaagctcagttcagtgttcgtaaaggatttcaaacaggatgtcctgcacaggcagcatgctgaccacctggtattcatgtttccatttttattggttatgttattctgttattttgttattttgattcatgtttctcttcatttatttttttttcttcattacaaacacttcaactttattttatacacaagtgcatagttagtggacttgatgctgactgctaatctgtttttggatgagtccatggaaatacttatatttaacaagttaaatcagtaattctagaagatggtacagggtatatagtcaggggccatctgaactccaactcatgatttacattattaggtgatgggtcactaagattctatttgagcagttttatgaaagataatgtgctttaacaaaaccagatctatctgtgtagtgcccaggatttgatcatacagttaaaaaacttttaggatatttctggatttgttcaaattccggggattctgtgtcatcttaatagaagagtttgcctttttcatttcatttttatgaaatctgtttgggagagtaaaaataggt

SEQ ID NO: 367622 - DNA, 2078 bp, Homo sapiens
  misc_feature (71)..(71): n is a, c, g, or t
  misc_feature (99)..(99): n is a, c, g, or t
  misc_feature (102)..(102): n is a, c, g, or t
  misc_feature (130)..(130): n is a, c, g, or t
ggggggggggggatgggagaaggaagaggggggggggaaagggagggagaggaaggggggggggggggggntttaaaagggggagggggggtaaagaanaanaaaggggggggggggggggggggggggnaaaccaagcaaaaaagagcagggaaatttccttaaaggaatttgggtgcaaggatcaacgtaagccaagaatgtcttcagatgctaaagaatttatcagtatcataaatcctcataatcttaaaggtaaatccttgggccaagtgtcattgacacacccttactctgaatgtgattttaaacttaaagaagtggctagaaataacatgggaaatgatacaaatgaagagcaggaaaaagcagtgacaaaaatagaaattatttctcatatgaagcagtctacctcatgtctagattctgaagaaataagagaaaatcaaggggaagtgattttggaagtacaagaaacatattgtgaaacgtcaggcaaattgccgagtgagcaggttttgcagcaaccaatgaatgctcgggtgaaaagtaagagagagaagagggaggtgattgtagaagaaagtatcagaacatgcaaaccagcatttctttctgaagaaaagttgtatcaggaaactgccattagagatgagcatgactcccatataaagagccaacctagggaaatgacctcaagtgaaaaagggaaagaagctgatacagaaatgggattttctattacttttaaaattgaagagtcctcttcccaagtggtacctcaaggaatttctgtaaaacatttagatgctttaacactcttcagctctaaacaggccaatgaaggaaaagtaaacaatttaagtctctgcttgactttaaaaccagaagaaaacttatctcgagaaattgcctgtggggcccagagtgaaccattcccttgtatgaccccaagacctgaaggattgcactaccaggaatcagatggaaaagcccaagtgacaggcccatcccaaatttccaaaacagacaagtctttccaaggaaccaccagacaggagaccaactatcaagattcctgggttacttcgaaaactaaggaaaccaaacatcaaatttcctcatctaatgaatgtaaagaaaagtcataccaagaagtatcttttgacccagcaagaggtcttaaattggaagaaatcacagtttctagaccagattcaaaagaagtcaggtatctagaattctcagacagaaaagaccttcatcatcagggcagcaaaagtgatgataaactttgtggaactctcaaatctgaaatagcaacacaggaactaactggagagaaatttctagaaatggcaaaccctaatgttgcaggtctagaagcaggatccattgaggacatagtgactcagagaggttccagagtcttgggatcctttcttccagagaaactgttcaaaggagtgtctcaaaaagagaatacagggcaacagaatgccatcattagtcctactgttctagagaccagtgaagaaaagacagtgtccctaacagtatgctctgcagtgaagacagagaagacaccacaggaaaagctcagagaaagccctggcagtgaacaaactcccttcatgactgcacctgaaggaaagggaaatggaggtgtaaacccagagcccttcagagcaactcagaatgtatttacccggcaactctgtttagaacatgatgaaaagctagtatcctatctgtctctgttacggaacattgaaatgaggaccaaacagattcaacctttggagctaaacctggcagaactacaggatctgctgtgtcaggccaaggtattagaaagggagttaaaggatctgaccacctatgtcagccgggctgcggagccacaggaacaggagtttgggaagagcgcttggataagggactacagcagtggtggcagctccaggacccttgacgcccaggacagaagctttcccccccagaccgctgagctctgggttcagccccgagaagcccagcatcaggatgaggaattgagaaggattccagtgtggaaa

SEQ ID NO: 367623 - DNA, 19077 bp, Homo sapiens
  misc_feature (5955)..(5955): n is a, c, g, or t
taggaatgcagagcagttgctggggtgattgacctaggcacagtggagatatttcccatcttcaaagccatgcaaaagggcctccttgaccaagacacaggcctagtgcttctggaatctcaggttatcatgtctggcctcattgcccctgagacgggtgaaaacctctctttggaggagggcatagccagaaacctcattaatccccagatgtaccagcagctccgggagctacaggatgccctggccttaataagcaggcttactgagagcagaggccctctttctgtggtggaagcaattgaaaagagaataatcagtgagacagttggactgaaaatcttagaagctcacctggcaactggaggtttcagtctttcccctagtgagaactgtattaacctggaagaggcttttcatcaaggcctcatttctgcatggcttcattcagtattagagtcttatcttagaacatccaagaatttgatagaccctaacacagctgagaaaattggtttgctggatctgatgcagcgatgtattgtccaccaggaatcaggattcaaattactgcctgtcaaacaattggcaggggggatggtgagcttgaaatcaggccggaaggttagcattttccgtgcagttcaggaagggctaatagataggcaggtcactgtccggttgctggaagctcagctttttgctggtggcatagtagatccaagaacaggacacagacttacagtggaagaggctgtaagacataatctgattgaccaagatatggcctgtgctatcctcataaggcagcttcagacaggaggcatcatagacactgtcacggggcaaaggctaacaatagatgaagcagtgagcaatgatctagtagctgctaagatcgcccttgtgattctggagtccctctggtcattcatggggttgctgtggcctgaatctggagagatcctcccaattacagatgccctagaacaaggtattgtgtctactgaactagcacataaaatccttagtaaccgacagcatattaaggctctgtttctaccagcaaccacagagattttgtcctggaagaaagcaatagaaagtggtatcctggatagagatcttgccaataacttaaaatcgatttgtatacctgatgtgatgccccacatgcaactagcagactctgcagaacaaaatattaatcctggagcagcagttctaccgtgcagcaagagccaccctaaggccacagcaagccagagtgagaatctgttgttccagctgatgactcacagctatattaatgtgcaaaatggacagaggctgcttctgttagataaagagctgatggagacactaacatccagagatgagtatcaaacaagtcctccaaaagtggttgaaattgggcatcaaaggcaaaaaactcctgagggattgcaagaatcagctaatgtgaaaatctcaggaactttcagcagtgggtggactgtgaggctgcctgagttccagttttcttctcagaacaaagaatatcccgatcgggaagattgcactacagaaaaaggcaaaaagaccactgtagaaacagaagattcttctgtagagaaccctgaacaggatctgtttgtagaacaaaaagagagaaatccaaacattgatgctttgaaggtaataaataaagtcaaattagaggtacaaaggcagttgataggtacccaaagggaagaccaaacagcagtgtctgtcagagaaaatgccagcaggggacacctcctgaccatacctcctgctgaggcggaaggtgtgccgttggtggttgacaaagatgttttttctgttgaaacaccaaagaaagaacatcaacctctaagaaacacttcctttacatgtcagaatgaacaagcacacactcttgagactgaatatattcatgatgaaactggaggatctcacataaaaccccaaagcaaaaagttacaagttcaggtaaagaaaactctaggtataaagttagaactaaagtctgaaactgatgggaatgttcatcctctggacaaaaaggaaatgttaaagaaaacatttctggctaaggatgaccataaagaaagtcaagaagcacagaacatcgcaggtggtagtatgatgatgtcagaaaagaccgatgaggaagatagtggcagggaaatttttctgtcatgcagtcatccattagaattgcttgaagaagctaccttaaatgtattatctgcacagttactagatggtggtatctttcatgaacaaacaggtcaaaagctcttactaaatgaagcaatatcccgaggcattgtgccaagtcacactgccgtgaagcttatggagaagctgaacatgtttcaggggttctttgactctcagacttgtgagtctttgacaactgaagaagtcattaatgaaggtctgatggatgagaaattattacataatgtcctcatggcagacaaagctataagtggtgtcttagacccccgtacccagacactgtgctctgtaaaggatgcagttacagttggacttcttgacaaggaaacagccaccagaattttagagaggcaggtggtgactggtggaattattgatctgaaacgaggcaaaaaagtttcagtaactttggcctcaactcttggcttggtggacgttgctgaccagccagaacttataaatctggagaaagcttccaaaggtagagatgctgaaaaaacagttagggagagattaattagtttacaaatggaaacaacaggacttatagaccctgatagtaaagcacctttaacagttgtgcagtccattgacagaggtcttttggagagagaggaggccgttcgtttgttgactaagcaagtggtagatggaggtatcattcaccatatatctgggatgagactttctgttgataatgccttcagacatggcttaattggtgaagatttagccgagaaactcaaaagagttgagaacttaaacatccatcagatttttaatcctgaaacgaaggaaaatatttccctccctaaagccataaaattagatcttattacctcagacctgaaaagagaaatccaggaggttcaggcctttactggaaactttgtggatctcatttctggtcagagattgaccttggcagaagctaaaaaagaaggactgttaactaatgaagcagtattgtctccaggaatgatgcatggcattgtagatcccgagaactgcagaattgtcccctactcagaattagtcaagaaatgtaagattgatattgaatctggacagagatatctagaagtaattcccttctcagacattaaagatggggtgagcgacaaagtgcttacattgtctcaagcaattcagcttggaaaagtagactttgcatctacgctgaaggttctagaagcccaggcaaatactggtggaatcatagatactgctactggaaaaagactgacattggcatcagctttggaagagaaactggtggatgaaaacatggtcagaattattgcatctcatcaggtgttaaatggaggaattgttgacatatttagtgatcagagagtgactttagtagaagctattgagaaaagactgatcagccctgaactggcaaatatgatccaaatagatagttcagagttcagcgatcacagggctcagattgaaaagcaagaagggattgaagtgtgtgcattacaaaatgaatttctaggaaaggatatgttaattgcttgtaatcagactgctgaaatgagttgtaataaagtagaagagagtgagagattatttcaagttgaaaatcagtctgcacaagaaaaggttaaagtgagagtttctgatggggagcaggcaaaaaagagcagggaaatttccttaaaggaatttgggtgcaaggatcaacgtaagccaagaatgtcttcagatgctaaagaatttatcagtatcataaatcctcataatcttaaaggtaaatccttgggccaagtgtcattgacacacccttactctgaatgtgattttaaacttaaagaagtggctagaaataacatgggaaatgatacaaatgaagagcaggaaaaagcagtgacaaaaatagaaattatttctcatatgaagcagtctacctcatgtctagattctgaagaaataagagaaaatcaaggggaagtgattttggaagtacaagaaacatattgtgaaacgtcaggcaaattgccgagtgagcaggttttgcagcaaccaatgaatgctcgggtgaaaagtaagagagagaagagggaggtgattgtagaagaaagtatcagaacatgcaaaccagcatttctttctgaagaaaagttgtatcaggaaactgccattagagatgagcatgactcccatataaagagccaacctagggaaatgacctcaagtgaaaaagggaaagaagctgatacagaaatgggattttctattacttttaaaattgaagagtcctcttcccaagtggtacctcaaggaatttctgtaaaacatttagatgctttaacactcttcagctctaaacaggccaatgaaggaaaagtaaacaatttaagtctctgcttgactttaaaaccagaagaaaacttatctcgagaaattgcctgtggggcccagagtgaaccattcccttgtatgaccccaagacctgaaggattgcactaccaggaatcagatggaaaagcccaagtgacaggcccatcccaaatttccaaaacagacaagtctttccaaggaaccaccagacaggagaccaactatcaagattcctgggttacttcgaaaactaaggaaaccaaacatcaaatttcctcatctaatgaatgtaaagaaaagtcataccaagaagtatcttttgacccagcaagaggtcttaaattggaagaaatcacagtttctagaccagattcaaaagaagtcaggtatctagaattctcagacagaaaagaccttcatcatcagggcagcaaaagtgatgataaactttgtggaactctcaaatctgaaatagcaacacaggaactaactggagagaaatttctagaaatggcaaaccctaatgttgcaggtctagaagcaggatccattgaggacatagtgactcagagaggttccagagtcttgggatcctttcttccagagaaactgttcaaaggagtgtctcaaaaagagaatacagggcaacagaatgccatcattagtcctactgttctagagaccagtgaagaaaagacagtgtccctaacagtatgctctgcagtgaagacagagaagacaccacaggaaaagctcagagaaagccctggcagtgaacaaactcccttcatgactgcacctgaaggaaagggaaatggaggtgtaaacccagagcccttcagagcaactcagaatgtatttacccggcaactctgtttagaacatgatgaaaagctagtatcctatctgtctctgttacggaacattgaaatgaggaccaaacagattcaacctttggagctaaacctggcagaactacaggatctgctgtgtcaggccaaggtattagaaagggagttaaaggatctgaccaccttggtcagtcaggagctggagtgtgtgaatcagattatcatcagccagcctcaagaagttcctgctcaactgttgaaggctctagagaaagatgccaagaatcttcagaagtctctcagctctgtgagtgacacttggaattccaggctactccacttccagaatgctgtggaaatagaaaagactaaagtgttaaatcagcacacacagctagaaggccgacttcaagatctgagagcctgggttggcaataaaaatcttattctgaacagcaagggatctaacagtgaaatagatgttgacagcctgaacctctgnctccaacagtatgaggatttgaaacagcccatggctgaaaggaaagctcagctggatgctcttgcttttgatattcagttctttatctcagaacatgcccaggacttgtcccctcagcagaatcgacagatgctgaggcttctgaatgaactgcagaggtccttccaggacattttggaacagactgcagctcaggtggatgccttgcagggccatcttcaacaaatggagcaggaagccctggtgaagaccctgcagaaacaacaaaatacctgtcaccagcaactggaggatctttgcagttgggtaggacaggcagaaagagcactggcaggccaccaaggcagaaccacccagcaggatctctctgctttgcagaagaaccaaagtgacttgaaggatttacaggatgacattcagaatcgtgccacctcatttgccactgttgtcaaggacattgaggggttcatggaagagaatcagaccaagctgagcccacgtgagttgacagctcttcgggaaaagcttcatcaggctaaggagcaatatgaggcgctccaggaagagacacgtgtggcccagaaggaactggaggaagcagtgacctccgccttacagcaggagactgaaaagagtaaagcagcaaaggaactggcagagaacaagaagaagatcgatgctctcctggattgggtaacttcagtaggatcatctggtggacagctgctgaccaaccttccaggaatggagcagctctcgggagctagcttggagaaaggagccttggacaccactgatggttacatgggggtgaatcaagccccagagaaactggacaagcaatgtgagatgatgaaggcccgtcaccaagaattgctgtcccagcagcaaaatttcattctggccacccagtcagctcaggccttcttggatcagcatggccacaatctcacacctgaggagcaacagatgctgcaacagaagctgggagagctaaaggaacaatactctacttccctggcccaatcagaggcagaactgaagcaggtgcagacacttcaggatgagttgcagaaatttctgcaggatcataaagagtttgaaagctggttggaacgatccgagaaagagctggagaacatgcataagggaggcagcagccccgagacccttccctccctgctaaagcggcaaggaagcttctcagaggatgtcatttcccacaaaggagacttgagatttgtgactatctcaggacagaaagtcttggacatggaaaacagttttaaggaaggcaaagaaccatcagaaattggaaacttagtaaaggacaagttgaaggatgcaacagaaagatacactgctctccactcaaagtgtacacgattaggatctcacctgaatatgctgttaggccagtatcatcaattccaaaacagtgctgacagcctgcaggcctggatgcaggcttgtgaggccaacgtggagaagctcctctcagatactgttgcctctgaccctggagttctccaggagcagcttgcaacaacaaagcagttgcaggaggaattggctgagcaccaagtacctgtggaaaaactccaaaaagtagctcgtgacataatggaaattgaaggggagccagccccagaccacaggcatgttcaagaaactacagattccatactcagccacttccaaagcctctcctatagcctggctgagcgatcttctctgctgcagaaagcaattgcccaatctcagagtgtccaggaaagcctggagagcctgttgcagtctattggggaagttgaacaaaacctggaagggaagcaggtgtcatcactctcatcaggagtcatccaggaagccttagccacaaatatgaaattgaagcaggacattgctcggcaaaagagcagcttggaggccacccgtgagatggtgacccgattcatggagacagcagacagtactacagcagcagtgctgcagggcaaactggcagaggtgagccagcggttcgaacagctctgtctacagcagcaagaaaaggagagctccctaaagaagcttctaccccaggcagagatgtttgaacacctctctggtaagctgcagcagttcatggaaaacaaaagtcggatgctggcctctggaaatcagccagatcaagatattacacatttcttccaacagatccaggagctcaatttggaaatggaagaccaacaggagaacctagatactcttgagcacctggtcactgaactgagctcttgtggctttgcgctggacttgtgccagcatcaggacagggtacagaatctaagaaaagacttcacagagctacagaagacagttaaagagagagagaaagatgcatcatcttgccaggaacagttggatgaattccggaagctggtcaggaccttccagaaatggttgaaagaaactgaagggagtattccacctacggaaacttctatgagtgctaaagagttagaaaagcagattgaacacctgaagagtctactagatgactgggcaagtaagggaactctggtggaagaaatcaattgcaaaggtacttctttagaaaatctcatcatggaaatcacagcacctgattcccaaggcaagacaggttccatactgccctctgtaggaagctctgtaggcagtgtaaacggataccacacctgcaaagatctgacggagatccagtgtgacatgtcagatgtaaacttgaagtatgagaaactagggggagtacttcatgaacgccaggaaagccttcaggctatcctcaacagaatggaggaggttcacaaggaggcaaactctgtgctgcagtggctggaatcaaaagaggaagtcctgaaatccatggatgccatgtcatctccaaccaagacagaaacagtgaaagcccaagctgaatctaacaaggccttcctggctgagttggaacagaattctccaaaaattcaaaaagtaaaggaagccctggctggattactggtgacatatcccaactcacaggaagcagaaaattggaagaaaattcaggaagaactcaattcccgatgggaaagggccactgaggttactgtggctcggcaaaggcagctagaggaatctgcaagtcatctggcctgcttccaggctgcagaatcccagctccggccgtggctgatggagaaagaactgatgatgggagtgctggggcccctgtctattgaccccaacatgttgaatgcacaaaagcaacaggtccagtttatgctaaaggaatttgaagcacgcaggcaacagcatgagcaactgaatgaggcagctcagggcatcctaacaggccctggagatgtctctctgtccaccagccaagtacagaaagaactccagagcatcaatcagaaatgggttgagctgactgacaaactcaactcccgttccagccaaattgaccaagctattgttaagagcacccagtaccaggaactgctccaggacttatcagagaaggtgagggcagttggacaacggctgagtgtccagtcagctatcagcacccaaccagaggctgtaaagcagcaattggaagagaccagtgaaattcgatctgacttggagcagttagaccacgaggttaaggaggctcagacactgtgcgatgaactctcagtgctcattggtgagcagtacctcaaggatgaactgaagaagcgtttggagacagttgccctgcctctccaaggtttagaagaccttgcagccgatcgcattaacagactccaggcagctcttgccagcacccagcagttccagcaaatgtttgatgagttgaggacctggttggatgataaacaaagccagcaagcaaaaaactgcccaatttctgcaaaattggagcggctacagtctcagctacaggagaatgaagagtttcagaaaagtcttaatcaacacagtggctcctatgaggtgattgtggctgaaggggaatctctacttctttctgtacctcctggagaagagaaaaggactctacaaaaccagttggttgagctcaaaaaccattgggaagagcttagtaaaaaaactgcagacagacaatccaggctcaaggattgtatgcagaaagctcagaaatatcagtggcatgtggaagaccttgtgccatggatagaagattgtaaagctaagatgtctgagttgcgagtcactctggatccagtgcagctagagtccagtctcctaagatcaaaggctatgctgaatgaggtggagaagcgccgctccctgctggaaatattgaatagtgctgctgacattctgatcaattcttcagaagcagatgaggatggaatccgggatgagaaggctgggatcaaccagaacatggatgctgttacagaagagctgcaggccaaaacagggtcactcgaagaaatgactcagaggctcagggagttccaggaaagctttaagaatattgaaaagaaggttgaaggagccaaacaccaacttgagatctttgatgctctgggttctcaagcctgtagcaacaagaacctggagaagctaagagctcaacaggaagtgctgcaggccctagagcctcaggtagactatctgaggaactttactcagggtctggtagaagatgccccagatggatctgatgcttctcaacttctccaccaagctgaggtcgcccagcaagagttcctcgaagttaagcaaagagtgaacagtggttgtgtgatgatggaaaacaagctggaggggattggccagtttcactgccgggtccgagagatgttctctcaattggcagacctggatgatgagctagatggcatgggtgctattggcagagacactgatagcctccagtcccaaatcgaggatgtccggctattccttaacaaaattcacgtcctcaaattagacatagaggcctctgaagcagagtgtcgacatatgctagaagaagaggggactctggatttgttaggtctcaaaagggagctagaagccctgaacaaacagtgtggcaaactgacagagagggggaaagctcgtcaggaacagctggaactgacactaggccgtgtagaggacttctacaggaaattgaaaggactcaatgacgcgaccacagcagcagaggaggcagaggccctccagtgggtagtggggaccgaagtggaaatcatcaaccaacaattagcagattttaaaatgtttcagaaagaacaagtggatcctcttcagatgaaattgcagcaggtgaatggacttggccagggattaattcagagtgcaggaaaagactgtgatgtacagggtttagaacatgacatggaagagatcaatgctcgatggaatacattgaataaaaaggtcgcacaaagaattgcacagctacaggaagctttgttgcattgtgggaagtttcaagatgccttggagccattgctcagctggttggcagataccgaggagctcatagccaatcagaaacctccatctgctgagtataaagtggtgaaagcacagatccaagaacagaagttgctccagcggctcctagatgatcgaaaggccacagtagacatgcttcaagcagaaggaggcagaatagcccagtcagcagagctggctgatagagagaaaatcactggacagctggagagtcttgaaagtagatggactgaactactcagtaaggcagcagccaggcaaaaacagctggaagacatcctggttctggccaaacagttccatgagacagctgagcctatttctgacttcttatctgtcacagagaaaaagcttgctaactcagaacctgttggcactcagactgccaaaatacagcagcagatcattcggcacaaggctctggaagaagacatagaaaaccatgcaacagatgtgcaccaggcagtcaaaattgggcagtccctctcctccctgacatctcctgcagaacagggtgtgctgtcagaaaagatagactcattgcaggcccgatacagtgaaattcaagaccgctgttgtcggaaggcagccctacttgaccaagctctgtctaatgctaggctgtttggggaggatgaggtggaggtgctcaactggctggctgaggttgaggacaagctcagttcagtgttcgtaaaggatttcaaacaggatgtcctgcacaggcagcatgctgaccacctggctttaaatgaagaaattgttaatagaaagaagaatgtagatcaagctattaaaaatggtcaggctcttctaaaacaaaccacaggtgaggaggtgttacttatccaggaaaaactagatggtataaagactcgttacgcagacatcacagttactagctccaaggccctcagaactttagagcaagcccggcagctggccaccaagttccagtctacttatgaggaactgaccgggtggctgagggaggtggaggaggagctggcaaccagtggaggacagtctcccacaggggaacagataccccagtttcagcagagacagaaggaattaaagaaggaggtcatggagcacaggctggtgttggacacagtgaatgaggtgagccgtgctctcttagagctggtgccctggagagccagagaagggctggataaacttgtgtccgatgctaacgagcagtacaaactagtcagtgacactattggacaaagggtggatgaaattgatgctgctattcagagatcacaacagtatgagcaagctgccgatgcagaactagcttgggttgctgaaacaaaacggaaactgatggctctgggtccaattcgcctggaacaggaccagaccacagctcagcttcaggtacagaaggctttctccattgacattattcgacacaaagattcaatggatgaactcttcagtcaccgtagtgaaatctttggcacatgtggggaggagcaaaaaactgtattacaggaaaagacagagtctctaatacagcaatatgaagccattagcctactcaattcagagcgttatgcccgcctagagcgggcccaggtcttagtaaaccagttttgggaaacttatgaagagctcagcccctggattgaggaaactcgggcactaatagcacagttaccctctccagccattgatcatgagcagctcaggcagcaacaagaggaaatgaggcaattaagggaatctattgctgaacacaaacctcatattgacaaactactaaagataggcccacaactaaaggaattaaaccctgaggaaggggaaatggtggaagaaaaataccagaaagcagaaaacatgtatgcccaaataaaggaggaggtgcgccagcgagccctggctctggatgaagccgtgtcccagtccacacagattacagagtttcatgataaaattgagcctatgttggagacactggagaatctttcctctcgcctgcgtatgccaccactgatccctgctgaagtagacaagatcagagagtgcatcagtgacaataagagtgccaccgtggagctagaaaaactgcagccatcctttgaggccttgaagcgccgtggagaggagcttattggacgatctcagggagcagacaaggatctggctgcaaaagaaatccaggataaattggatcaaatggtattcttctgggaggacatcaaagctcgggctgaagaacgagaaatcaaatttcttgatgtccttgaattagcagagaagttctggtatgacatggcagctctcctgaccaccatcaaagacacccaggatattgtccatgacttggaaagcccaggcattgatccttccatcatcaaacaacaggttgaagctgctgagactattaaggaagagacagatggtctgcatgaagagctggagtttattcggatccttggagcagatttgatttttgcctgtggagaaactgagaagcctgaagtgaggaagagcattgatgagatgaataatgcttgggagaacttaaacaaaacatggaaagagaggctagaaaaacttgaggatgctatgcaagctgctgtgcagtatcaggacactcttcaggctatgtttgactggctagataacactgtgattaaactctgcaccatgccccctgttggcactgacctcaatactgttaaagatcagttaaatgaaatgaaggagttcaaagtagaagtttaccaacagcaaattgagatggagaagcttaatcaccagggtgaactgatgttaaagaaagctactgatgagacggacagagacattatacgagaaccactgacagaactcaaacacctctgggagaacctgggtgagaaaattgcccaccgacagcacaaactagaaggggctctgttggcccttggtcagttccagcatgccttagaggaactaatgagttggctgactcataccgaagagttgttagatgctcagagaccaataagtggagacccaaaagtcattgaagttgagctcgcaaagcaccatgtcctaaaaaatgatgttttggctcatcaagccacagtggaaacagtcaacaaagctggcaatgagcttcttgaatccagtgctggagatgatgccagcagcttaaggagccgtttggaagccatgaaccaatgctgggagtcagtgttacagaaaacagaggagagggagcagcagcttcagtcaactctgcagcaggcccagggcttccacagtgaaattgaagatttcctcttggaacttactagaatggagagccagctttctgcatctaagcccacaggaggacttcctgaaactgctagggaacagcttgatacacatatggaactctattcccagctgaaagccaaggaagagacttataatcaactacttgacaagggcagactcatgcttctaagccgtgacgactctgggtctggctccaagacagaacagagtgtagcacttttggagcagaagtggcatgtggtcagcagtaagatggaagaaagaaagtcaaagctggaagaggccctcaacttggcaacagaattccagaattccctacaagaatttatcaactggctcactctagcagagcagagtttaaacatcgcttctccaccaagcctgattctaaatactgtcctttcccagatagaagagcacaaggtttttgctaatgaagtaaatgctcatcgagaccagatcattgagctggatcaaactgggaatcaattaaagttccttagccaaaagcaggatgttgttctgatcaagaatttgttggtgagcgtgcagtctcgatgggagaaggttgtccagcgatctattgaaagagggcgatcactagatgatgccaggaagcgggcaaaacaattccatgaagcttggaaaaaactgattgactggctagaagatgcagagagtcacctggactcagaactagagatatccaatgacccagacaaaattaaacttcagctttctaagcataaggagtttcagaagactcttggtggcaagcagcctgtgtatgataccacaattagaactggcagagcactgaaagaaaagactttgcttcccgaagatactcagaaacttgacaatttcctaggagaagtcagagacaaatgggatactgtttgtggcaagtctgtggagcggcagcacaagttggaggaagccctgctcttttcgggtcagttcatggatgctttgcaggcattggttgactggttatacaaggtggagccacagctggctgaggaccagcccgtgcacggggaccttgacctcgtcatgaacctcatggatgcacacaaggttttccagaaggaactgggaaagcgaacaggaaccgttcaggtcctgaagcggtcaggccgagagctgattgagaatagtcgagatgacaccacttgggtaaaaggacagctccaggaactgagcactcgctgggacactgtctgtaaactctctgtttccaaacaaagccggcttgagcaggccttaaaacaagcggaagtgtttcgagacacagtccacatgctgttggagtggctttctgaagcagagcaaacgcttcgctttcggggagcacttcctgatgacacagaggccctgcagtctctcattgacacccataaggaattcatgaagaaagtagaagaaaagcgagtggacgttaactcagcagtagccatgggagaagtcatcctggctgtctgccaccccgattgcatcacaaccatcaaacactggatcaccatcatccgagctcgcttcgaggaggtcctgacatgggctaagcagcaccagcagcgtcttgaaacggccttgtcagaactggtggctaatgctgagctcctggaagaacttctggcatggatccagtgggctgagaccaccctcattcagcgggatcaggagccaatcccgcagaacattgaccgagttaaagcccttatcgctgagcatcagacatttatggaggagatgactcgcaaacagcctgacgtggaccgggtcaccaagacatacaaaaggaaaaacatagagcctactcacgcgcctttcatagagaaatcccgcagcggaggcaggaaatccctaagtcagccaacccctcctcccatgccaatcctttcacagtctgaagcaaaaaacccacggatcaaccagctttctgcccgctggcagcaggtgtggctgttagcactggagcggcaaaggaaactgaatgatgccttggatcggctggaggagttgaaagaatttgccaactttgactttgatgtctggaggaaaaagtatatgcgttggatgaatcacaaaaagtctcgagtgatggatttcttccggcgcattgataaggaccaggatgggaagataacacgtcaggagtttatcgatggcattttagcatccaagttccccaccaccaagttagagatgactgctgtggctgacattttcgaccgagatggggatggttacattgattattatgaatttgtggctgctcttcatcccaacaaggatgcgtatcgaccaacaaccgatgcagataaaatcgaagatgaggttacaagacaagtggctcagtgcaaatgtgcaaaaaggtttcaggtggagcagatcggagagaataaataccggttcttcctcggcaatcagtttggggattctcagcagttgcggctggtccgtattctgcgcagcaccgtgatggttcgcgttggtggaggatggatggccttggatgaatttttagtgaaaaatgatccctgccgagcacgaggtagaactaacattgaacttagagagaaattcatcctaccagagggagcatcccagggaatgacccccttccgctcacggggtcgaaggtccaaaccatcttcccgggcagcttcccctactcgttccagctccagtgctagtcagagtaaccacagctgtacatccatgccatcttctccagccaccccagccagtggaaccaaggttatcccatcatcaggtagcaagttgaaacgaccaacaccaacttttcattctagtcggacatcccttgctggtgataccagcaatagttcttccccggcctccacaggtgccaaaactaatcgggcagaccctaaaaagtctgccagtcgccctgggagtcgggctgggagtcgagccgggagtcgagccagcagccggcgaggaagtgacgcttctgactttgacctcttagagacgcagtctgcttgttccgacacttcagaaagcagcgctgcagggggccaaggcaactccaggagagggctaaacaaaccttccaaaatcccaaccatgtctaagaagaccaccactgcctcccccaggactccaggtcccaagcgataacactgtctaagcacccccaagccactatccactttgaatcctgctccatacattgggtgtatatttattctgaacgggagaagttatattgttaaaagtgtaaaagaataattgtgttatgaagctgccttattttttttctttttgtaagttactattttcatgtgaatatttatgtagataaaatttgcctcctggtaaccctgtaatggatggggcccagaaatgaaatatttgagaaaaacaagtgaaaaggtcaagatacaaatgtgtattaaaaaaaaaaaagcctattaatagggtttctgcgcggtgcagggttgtaaacctgctttatcttttaggattattcctaaatgcatcttctttataaacttgacttgctatctcagcaagataaattatattaaaaaaataagaatcctgcagtgtttaaggaactctttttttgtaaatcacggacacctcaattagcaagaactgaggggagggctttttccattgtttaatgttttgtgatttttagctaaagagagggaacctcatctaagtaacatttgcacatgatacagcaaaaggagttcattgcaatactgtctttggatattgtttcagtactgggtgtttaaaggacaaatagctgctagaattcaggggtaaatgtaagtgttcagaaaacgtcagaacatttggggttttaaactgatttgttgctccctatccagcctagacaccagtaactcttgtgttcaccaggacccagacccttggcaagggataggctcgttggtgacattgtgaatttcagatttgttttatccactttttttgctatttatttaaatggtcgatcaacttcccacaaactgaggaatgaattccacgagcctgttctgaaaatgtggacgtaagacaaacacgtgctcgtcctttaatggagttcaccagcacacttgttaaccagtcctgtttgctttcgtctttttttgtgcgtaataaagtcaactgaccaagtgaccatgaaaaggggctgtctggggctcctgttttttagctgctgttcttcagctccgaccatgttgctgtgtgattatctcaattggttttaattgaggcagaaactgaagctctaccaatgaactgtttagaaacaagacacacttttgtattaaaattgcttgcagtaacaaa

SEQ ID NO: 367624 - DNA, 1694 bp, Homo sapiens
  misc_feature (686)..(686): n is a, c, g, or t
  misc_feature (785)..(785): n is a, c, g, or t
ggcgcctgcactgggcctctggtcctgtgtaggggctgggcatggaggcagggcccggcgttccctgccctgtgcttacagtcagtggcgaggcagagacttcttaaacagaggcaccagatggaaatggaaggactgtgtgtggggcccagagtaacctcctaattcagctccagcccaacccaggaaggcttctggaggaggtggtacctgccccagctttccattcattctaagtggagaggggactgcagggccaaggaggggaaggaaaagtggtttctgacttggggagcagctgtggttgcctgtcacgaggtgggaacgctccaggagcacgcctggaggagatagcatgtcgagtttgaactgcccgtagatgtccatgtgtgggctccctgaaggcaggacccacactcctgttgtgatcactgctgtgccccagagcccatatgcagacctggcccagagctggcaccgggggtctgctgccatgggggagaattccaagggaggtgcccagcaggtggactggattctaggactggagctatgggtagggaatggagtccagggcacaccccactaggctgatgctgcttccttgcggccccctacccccctagaacaaccagctggaaaagatctaccctgaggagctctcccggctgcaccggctggagacnctgaacctgcaaaacaaccgcctgacttcccgaggcacctgtaatccgagctactcaggaggctgaggcagaagaatcacatgaacccgggaggcggangttgcagtgagctgagatcacaccattgcactccagtctgggcaataagagtgaaaaaagctgtctaactaaagcaagctcctccaacaagaccaagacagcatctctccttctaaggcttaggatttgcccagaattcctgatacctggactagcccataccaacagtcatggctcctataacaaagccttgaactgccacatgcatgtggatcagatgaagggacattgtcgtgtttcccatgctcttcaatttgtgtaatccctatgcaacaatggctgcaaagcctgccattccaatgggacaaatggtgcctctttagctttctgaagaagtttggatccctgatcttcatcatgtgaaaaatgggaaacctctgtgtctattgacatagtgattggttgaagaatctccctagagtgagaaaacctcttacacgccaaccagcttctgatccctcccgtgcaccccaggcgggtgtttctaagacctgggggatgcgcaggagagaggcttcagagaagctgagcttccagaaccttgtcacaggatcttcggttccgagggcctttagaacccaagagttgtagagtcctcacattttaaaaagatttttttttcctgatgacgaaaataacatctgactgggatagaaactttgtaacataaaatggaaagagaaaatttctcataattttgccacttggaattaactactattgacattttggtaaatttgtttccatttttaaaaaagcagctttcttgaagtatcatttatgtaccgtaggatttacccaatttgaaggtataattggctgagttttagtcagcggtgcagccagcaccacagtccagtggtcttttttcctttgtgttttaaactcgtggctgaacacatgctatga

SEQ ID NO: 367625 - DNA, 3058 bp, Homo sapiens
  misc_feature (528)..(528): n is a, c, g, or t
agcttgacttgaatggaaggagcccgagcccgcggagcgcagctgagactgggggagcgcgttcggcctgtggggcgccgctcggcgccggggcgcagcaggttccgtcagccctggcgcccaggcgcatctgactcggcaccccctgcaggcaccatggcccagagccgggtgctgctgctcctgctgctgctgccgccacagctgcacctgggacctgtgcttgccgtgagggccccaggatttggccgaagtggcggccacagcctgagccccgaagagaacgaatttgcggaggaggagccggtgctggtactgagccctgaggagcccgggcctggcccagccgcggtcagctgcccccgagactgtgcctgttcccaggagggcgtcgtggactgtggcggtattgacctgcgtgagttcccgggggacctgcctgagcacaccaaccacctatctctgcagaacaaccagctggaaaagatctaccctgaggagctctcccggctgcaccggctggagacnctgaacctgcaaaacaaccgcctgacttcccgagggctcccagagaaggcgtttgagcatctgaccaacctcaattacctgtacttggccaataacaagctgaccttggcacccccgcttcctgccaaacgccctgatcagtgtggactttgctgccaactatctcaccaagatctatgggctcacctttggccagaagccaaacttgaggtctgtgtacctgcacaacaacaagctggcagacgccgggctgccggacaacatgttcaacggctccagcaacgtcgaggtcctcatcctgtccagcaacttcctgcgccacgtgcccaagcacctgccgcctgccctgtacaagctgcacctcaagaacaacaagctggagaagatccccccgggggccttcagcgagctgagcagcctgcgcgagctatacctgcagaacaactacctgactgacgagggcctggacaacgagaccttctggaagctctccagcctggagtacctggatctgtccagcaacaacctgtctcgggtcccagctgggctgccgcgcagcctggtgctgctgcacttggagaagaacgccatccggagcgtggacgcgaatgtgctgacccccatccgcagcctggagtacctgctgctgcacagcaaccagctgcgggagcagggcatccacccactggccttccagggcctcaagcggttgcacacggtgcacctgtacaacaacgcgctggagcgcgtgcccagtggcctgcctcgccgcgtgcgcaccctcatgatcctgcacaaccagatcacaggcattggccgcgaagactttgccaccacctacttcctggaggagctcaacctcagctacaaccgcatcaccagcccacaggtgcaccgcgacgccttccgcaagctgcgcctgctgcgctcgctggacctgtcgggcaaccggctgcacacgctgccacctgggctgcctcgaaatgtccatgtgctgaaggtcaagcgcaatgagctggctgccttggcacgaggggcgctggcgggcatggctcagctgcgtgagctgtacctcaccagcaaccgactgcgcagccgagccctgggcccccgtgcctgggtggacctcgcccatctgcaggtgggagtccctgactcccttggtcacccctgcagctgctggacatcgccgggaatcagctcacagagatccccgaggggctccccgagtcacttgagtacctgtacctgcagaacaacaagattagtgcggtgcccgccaatgccttcgactccacgcccaacctcaaggggatctttctcaggtttaacaagctggctgtgggctccgtggtggacagtgccttccggaggctgaagcacctgcaggtcttggacattgaaggcaacttagagtttggtgacatttccaaggaccgtggccgcttggggaaggaaaaggaggaggaggaagaggaggaggaggaggaagaggaaacaagatagtgacaaggtgatgcagatgtgacctaggatgatggaccgccggactcttttctgcagcacacgcctgtgtgctgtgagccccccactctgccgtgctcacacagacacacccagctgcacacatgaggcatcccacatgacacgggctgacacagtctcatatccccaccccttcccacggcgtgtcccacggccagacacatgcacacacatcacaccctcaaacacccagctcagccacacacaactaccctccaaaccaccacagtctctgtcacacccccactaccgctgccacgccctctgaatcatgcagggaagggtctgcccctgccctggcacacacaggcacccattccctccccctgctgacatgtgtatgcgtatgcatacacaccacacacacacacatgcacaagtcatgtgcgaacagccctccaaagcctatgccacagacagctcttgccccagccagaatcagccatagcagctcgccgtctgccctgtccatctgtccgtccgttccctggagaagacacaagggtatccatgctctgtggccaggtgcctgccaccctctggaactcacaaaagctggcttttattcctttcccatcctatggggacaggagccttcaggactgctggcctggcctggcccaccctgctcctccaggtgctgggcagtcactctgctaagagtccctccctgccacgccctggcaggacacaggcacttttccaatgggcaagcccagtggaggcaggatgggagagccccctgggtgctgctggggccttggggcaggagtgaagcagaggtgatggggctgggctgagccagggaggaaggacccagctgcacctaggagacacctttgttcttcaggcctgtgggggaagttccgggtgcctttattttttattcttttctaaggaaaaaaatgataaaaatctcaaagctgatttttcttgttatagaaaaactaatataaaagcattatccctatccctgcagcctgtg

SEQ ID NO: 367626 - DNA, 2426 bp, Homo sapiens
ctaagacactgatggggcccctccctctcttatgatctctgtggatgtaaatctgctttcccgtgagggcagtggggtgtagggatcttattatctcctcagccccactggtagttcctgaggattcctacttaggcctccttcctaaataccctgttacttttcttgccctggcctactcacccctacccccgtgtgcacttagaacaccatgcctgctctaaccggacatgccacacatttcagacgcccacaaagcctagaacaacaagctggagaagatccccccgggggccttcagcgagctgagcagcctgcgcgagctatacctgcagaacaactacctgactgacgagggcctggacaacgagaccttctggaagctctccagcctggagtacctggatctgtccagcaacaacctgtctcgggtcccagctgggctgccgcgcagcctggtgctgctgcacttggagaagaacgccatccggagcgtggacgcgaatgtgctgacccccatccgcagcctggagtacctgctgctgcacagcaaccagctgcgggagcagggcatccacccactggccttccagggcctcaagcggttgcacacggtgcacctgtacaacaacgcgctggagcgcgtgcccagtggcctgcctcgccgcgtgcgcaccctcatgatcctgcacaaccagatcacaggcattggccgcgaagactttgccaccacctacttcctggaggagctcaacctcagctacaaccgcatcaccagcccacaggtgcaccgcgacgccttccgcaagctgcgcctgctgcgctcgctggacctgtcgggcaaccggctgcacacgctgccacctgggctgcctcgaaatgtccatgtgctgaaggtcaagcgcaatgagctggctgccttggcacgaggggcgctggcgggcatggctcagctgcgtgagctgtacctcaccagcaaccgactgcgcagccgagccctgggcccccgtgcctgggtggacctcgcccatctgcaggtgggagtccctgactcccttggtcacccctgcagctgctggacatcgccgggaatcagctcacagagatccccgaggggctccccgagtcacttgagtacctgtacctgcagaacaacaagattagtgcggtgcccgccaatgccttcgactccacgcccaacctcaaggggatctttctcaggtttaacaagctggctgtgggctccgtggtggacagtgccttccggaggctgaagcacctgcaggtcttggacattgaaggcaacttagagtttggtgacatttccaaggaccgtggccgcttggggaaggaaaaggaggaggaggaagaggaggaggaggaggaagaggaaacaagatagtgacaaggtgatgcagatgtgacctaggatgatggaccgccggactcttttctgcagcacacgcctgtgtgctgtgagccccccactctgccgtgctcacacagacacacccagctgcacacatgaggcatcccacatgacacgggctgacacagtctcatatccccaccccttcccacggcgtgtcccacggccagacacatgcacacacatcacaccctcaaacacccagctcagccacacacaactaccctccaaaccaccacagtctctgtcacacccccactaccgctgccacgccctctgaatcatgcagggaagggtctgcccctgccctggcacacacaggcacccattccctccccctgctgacatgtgtatgcgtatgcatacacaccacacacacacacatgcacaagtcatgtgcgaacagccctccaaagcctatgccacagacagctcttgccccagccagaatcagccatagcagctcgccgtctgccctgtccatctgtccgtccgttccctggagaagacacaagggtatccatgctctgtggccaggtgcctgccaccctctggaactcacaaaagctggcttttattcctttcccatcctatggggacaggagccttcaggactgctggcctggcctggcccaccctgctcctccaggtgctgggcagtcactctgctaagagtccctccctgccacgccctggcaggacacaggcacttttccaatgggcaagcccagtggaggcaggatgggagagccccctgggtgctgctggggccttggggcaggagtgaagcagaggtgatggggctgggctgagccagggaggaaggacccagctgcacctaggagacacctttgttcttcaggcctgtgggggaagttccgggtgcctttattttttattcttttctaaggaaaaaaatgataaaaatctcaaagctgatttttcttgttatagaaaaactaatataaaagcattatccctatccctgcagcctgtg

SEQ ID NO: 367627 - DNA, 742 bp, Homo sapiens
  misc_feature (35)..(35): n is a, c, g, or t
  misc_feature (37)..(37): n is a, c, g, or t
  misc_feature (57)..(57): n is a, c, g, or t
  misc_feature (63)..(63): n is a, c, g, or t
agttatttcaaaaaggtggctggcaggttcttccntnttgcacaacacatacattcnttaccnattctttggaacccacaatgcacttgctgggcaaacaaggaaaaacacacaccacacacacacacatgcacaagtcatgtgcgaacagccctccaaagcctatgccacagacagctcttgccccagccagaatcagccatagcagctcgccgtctgccctgtccatctgtccgtccgttccctggagaagacacaagggtatccatgctctgtggccaggtgcctgccaccctctggaactcacaaaagctggcttttattcctttcccatcctatggggacaggagccttcaggactgctggcctggcctggcccaccctgctcctccaggtgctgggcagtcactctgctaagagtccctccctgccacgccctggcaggacacaggcacttttccaatgggcaagcccagtggaggcaggatgggagagccccctgggtgctgctggggccttggggcaggagtgaagcagaggtgatggggctgggctgagccagggaggaaggacccagctgcacctaggagacacctttgttcttcaggcctgtgggggaagttccgggtgcctttattttttattcttttctaaggaaaaaaatgataaaaatctcaaagctgatttttcttgttatagaaaaactaatataaaagcattatccctatccctgcagcctgtg

SEQ ID NO: 367628 - DNA, 3004 bp, Homo sapiens
  misc_feature (528)..(528): n is a, c, g, or t
agcttgacttgaatggaaggagcccgagcccgcggagcgcagctgagactgggggagcgcgttcggcctgtggggcgccgctcggcgccggggcgcagcaggttccgtcagccctggcgcccaggcgcatctgactcggcaccccctgcaggcaccatggcccagagccgggtgctgctgctcctgctgctgctgccgccacagctgcacctgggacctgtgcttgccgtgagggccccaggatttggccgaagtggcggccacagcctgagccccgaagagaacgaatttgcggaggaggagccggtgctggtactgagccctgaggagcccgggcctggcccagccgcggtcagctgcccccgagactgtgcctgttcccaggagggcgtcgtggactgtggcggtattgacctgcgtgagttcccgggggacctgcctgagcacaccaaccacctatctctgcagaacaaccagctggaaaagatctaccctgaggagctctcccggctgcaccggctggagacnctgaacctgcaaaacaaccgcctgacttcccgagggctcccagagaaggcgtttgagcatctgaccaacctcaattacctgtacttggccaataacaagctgaccttggcacccccgcttcctgccaaacgccctgatcagtgtggactttgctgccaactatctcaccaagatctatgggctcacctttggccagaagccaaacttgaggtctgtgtacctgcacaacaacaagctggcagacgccgggctgccggacaacatgttcaacggctccagcaacgtcgaggtcctcatcctgtccagcaacttcctgcgccacgtgcccaagcacctgccgcctgccctgtacaagctgcacctcaagaacaacaagctggagaagatccccccgggggccttcagcgagctgagcagcctgcgcgagctatacctgcagaacaactacctgactgacgagggcctggacaacgagaccttctggaagctctccagcctggagtacctggatctgtccagcaacaacctgtctcgggtcccagctgggctgccgcgcagcctggtgctgctgcacttggagaagaacgccatccggagcgtggacgcgaatgtgctgacccccatccgcagcctggagtacctgctgctgcacagcaaccagctgcgggagcagggcatccacccactggccttccagggcctcaagcggttgcacacggtgcacctgtacaacaacgcgctggagcgcgtgcccagtggcctgcctcgccgcgtgcgcaccctcatgatcctgcacaaccagatcacaggcattggccgcgaagactttgccaccacctacttcctggaggagctcaacctcagctacaaccgcatcaccagcccacaggtgcaccgcgacgccttccgcaagctgcgcctgctgcgctcgctggacctgtcgggcaaccggctgcacacgctgccacctgggctgcctcgaaatgtccatgtgctgaaggtcaagcgcaatgagctggctgccttggcacgaggggcgctggcgggcatggctcagctgcgtgagctgtacctcaccagcaaccgactgcgcagccgagccctgggcccccgtgcctgggtggacctcgcccatctgcaggtgggagtccctgactcccttggtcacccctgcagctgctggacatcgccgggaatcagctcacagagatccccgaggggctccccgagtcacttgagtacctgtacctgcagaacaacaagattagtgcggtgcccgccaatgccttcgactccacgcccaacctcaaggggatctttctcaggtttaacaagctggctgtgggctccgtggtggacagtgccttccggaggctgaagcacctgcaggtcttggacattgaaggcaacttagagtttggtgacatttccaaggaccgtggccgcttggggaaggaaaaggaggaggaggaagaggaggaggaggaggaagaggaaacaagatagtgacaaggtgatgcagatgtgacctaggatgatggaccgccggactcttttctgcagcacacgcctgtgtgctgtgagccccccactctgccgtgctcacacagacacacccagctgcacacatgaggcatcccacatgacacgggctgacacagtctcatatccccaccccttcccacggcgtgtcccacggccagacacatgcacacacatcacaccctcaaacacccagctcagccacacacaactaccctccaaaccaccacagtctctgtcacacccccactaccgctgccacgccctctgaatcatgcagggaagggtctgcccctgccctggcacacacaggcacccattccctccccctgctgacatgtgtatgcgtatgcatacacaccacacacacacacatgcacaagtcatgtgcgaacagccctccaaagcctatgccacagacagctcttgccccagccagaatcagccatagcagctcgccgtctgccctgtccatctgtccgtccgttccctggagaagacacaagggtatccatgctctgtggccaggtgcctgccaccctctggaactcacaaaagctggcttttattcctttcccatcctatggggacaggagccttcaggactgctggcctggcctggcccaccctgctcctccaggtgctgggcatccaatgggcaagcccagtggaggcaggatgggagagccccctgggtgctgctggggccttggggcaggagtgaagcagaggtgatggggctgggctgagccagggaggaaggacccagctgcacctaggagacacctttgttcttcaggcctgtgggggaagttccgggtgcctttattttttattcttttctaaggaaaaaaatgataaaaatctcaaagctgatttttcttgttatagaaaaactaatataaaagcattatccctatccctgcagcctgtg

SEQ ID NO: 367629 - DNA, 2945 bp, Homo sapiens
  misc_feature (528)..(528): n is a, c, g, or t
agcttgacttgaatggaaggagcccgagcccgcggagcgcagctgagactgggggagcgcgttcggcctgtggggcgccgctcggcgccggggcgcagcaggttccgtcagccctggcgcccaggcgcatctgactcggcaccccctgcaggcaccatggcccagagccgggtgctgctgctcctgctgctgctgccgccacagctgcacctgggacctgtgcttgccgtgagggccccaggatttggccgaagtggcggccacagcctgagccccgaagagaacgaatttgcggaggaggagccggtgctggtactgagccctgaggagcccgggcctggcccagccgcggtcagctgcccccgagactgtgcctgttcccaggagggcgtcgtggactgtggcggtattgacctgcgtgagttcccgggggacctgcctgagcacaccaaccacctatctctgcagaacaaccagctggaaaagatctaccctgaggagctctcccggctgcaccggctggagacnctgaacctgcaaaacaaccgcctgacttcccgagggctcccagagaaggcgtttgagcatctgaccaacctcaattacctgtacttggccaataacaagctgaccttggcacccccgcttcctgccaaacgccctgatcagtgtggactttgctgccaactatctcaccaagatctatgggctcacctttggccagaagccaaacttgaggtctgtgtacctgcacaacaacaagctggcagacgccgggctgccggacaacatgttcaacggctccagcaacgtcgaggtcctcatcctgtccagcaacttcctgcgccacgtgcccaagcacctgccgcctgccctgtacaagctgcacctcaagaacaacaagctggagaagatccccccgggggccttcagcgagctgagcagcctgcgcgagctatacctgcagaacaactacctgactgacgagggcctggacaacgagaccttctggaagctctccagcctggagtacctggatctgtccagcaacaacctgtctcgggtcccagctgggctgccgcgcagcctggtgctgctgcacttggagaagaacgccatccggagcgtggacgcgaatgtgctgacccccatccgcagcctggagtacctgctgctgcacagcaaccagctgcgggagcagggcatccacccactggccttccagggcctcaagcggttgcacacggtgcacctgtacaacaacgcgctggagcgcgtgcccagtggcctgcctcgccgcgtgcgcaccctcatgatcctgcacaaccagatcacaggcattggccgcgaagactttgccaccacctacttcctggaggagctcaacctcagctacaaccgcatcaccagcccacaggtgcaccgcgacgccttccgcaagctgcgcctgctgcgctcgctggacctgtcgggcaaccggctgcacacgctgccacctgggctgcctcgaaatgtccatgtgctgaaggtcaagcgcaatgagctggctgccttggcacgaggggcgctggcgggcatggctcagctgcgtgagctgtacctcaccagcaaccgactgcgcagccgagccctgggcccccgtgcctgggtggacctcgcccatctgcagaacaacaagattagtgcggtgcccgccaatgccttcgactccacgcccaacctcaaggggatctttctcaggtttaacaagctggctgtgggctccgtggtggacagtgccttccggaggctgaagcacctgcaggtcttggacattgaaggcaacttagagtttggtgacatttccaaggaccgtggccgcttggggaaggaaaaggaggaggaggaagaggaggaggaggaggaagaggaaacaagatagtgacaaggtgatgcagatgtgacctaggatgatggaccgccggactcttttctgcagcacacgcctgtgtgctgtgagccccccactctgccgtgctcacacagacacacccagctgcacacatgaggcatcccacatgacacgggctgacacagtctcatatccccaccccttcccacggcgtgtcccacggccagacacatgcacacacatcacaccctcaaacacccagctcagccacacacaactaccctccaaaccaccacagtctctgtcacacccccactaccgctgccacgccctctgaatcatgcagggaagggtctgcccctgccctggcacacacaggcacccattccctccccctgctgacatgtgtatgcgtatgcatacacaccacacacacacacatgcacaagtcatgtgcgaacagccctccaaagcctatgccacagacagctcttgccccagccagaatcagccatagcagctcgccgtctgccctgtccatctgtccgtccgttccctggagaagacacaagggtatccatgctctgtggccaggtgcctgccaccctctggaactcacaaaagctggcttttattcctttcccatcctatggggacaggagccttcaggactgctggcctggcctggcccaccctgctcctccaggtgctgggcagtcactctgctaagagtccctccctgccacgccctggcaggacacaggcacttttccaatgggcaagcccagtggaggcaggatgggagagccccctgggtgctgctggggccttggggcaggagtgaagcagaggtgatggggctgggctgagccagggaggaaggacccagctgcacctaggagacacctttgttcttcaggcctgtgggggaagttccgggtgcctttattttttattcttttctaaggaaaaaaatgataaaaatctcaaagctgatttttcttgttatagaaaaactaatataaaagcattatccctatccctgcagcctgtg

SEQ ID NO: 367630 - DNA, 1386 bp, Homo sapiens
ggcccgggagtatgaaggtagagctggttctctgaggtgttgtcctcacacagagttggggtgggtgacagggtgactggccatccagtggggacaccacaggcctcatgaggggctgtggagtcctggggtgggtgagaatctgccccatctcaggtcagttgagtggggctctgggagaagccctggggagtggctggtgggacccaaaggccttctggcaccccgctggctctgggctcccagggccaacgctccctccctactcatagtagcctggcctttccagagccccctccagcagggctccccacagcaggtcccctcgggctgcttgggctggtgggtctgccctgagctggcccctgactctcttacatgttccacaggatgatggaccgccggactcttttctgcagcacacgcctgtgtgctgtgagccccccactctgccgtgctcacacagacacacccagctgcacacatgaggcatcccacatgacacgggctgacacagtctcatatccccaccccttcccacggcgtgtcccacggccagacacatgcacacacatcacaccctcaaacacccagctcagccacacacaactaccctccaaaccaccacagtctctgtcacacccccactaccgctgccacgccctctgaatcatgcagggaagggtctgcccctgccctggcacacacaggcacccattccctccccctgctgacatgtgtatgcgtatgcatacacaccacacacacacacatgcacaagtcatgtgcgaacagccctccaaagcctatgccacagacagctcttgccccagccagaatcagccatagcagctcgccgtctgccctgtccatctgtccgtccgttccctggagaagacacaagggtatccatgctctgtggccaggtgcctgccaccctctggaactcacaaaagctggcttttattcctttcccatcctatggggacaggagccttcaggactgctggcctggcctggcccaccctgctcctccaggtgctgggcagtcactctgctaagagtccctccctgccacgccctggcaggacacaggcacttttccaatgggcaagcccagtggaggcaggatgggagagccccctgggtgctgctggggccttggggcaggagtgaagcagaggtgatggggctgggctgagccagggaggaaggacccagctgcacctaggagacacctttgttcttcaggcctgtgggggaagttccgggtgcctttattttttattcttttctaaggaaaaaaatgataaaaatctcaaagctgatttttcttgttatagaaaaactaatataaaagcattatccctatccctgcagcctgtg

SEQ ID NO: 367631 - DNA, 712 bp, Homo sapiens
agcttgacttgaatggaaggagcccgagcccgcggagcgcagctgagactgggggagcgcgttcggcctgtggggcgccgctcggcgccggggcgcagcaggttccgtcagccctggcgcccaggcgcatctgactcggcaccccctgcaggcaccatggcccagagccgggtgctgctgctcctgctgctgctgccgccacagctgcacctgggacctgtgcttgccgtgagggccccaggatttggccgaagtggcggccacagcctgagccccgaagagaacgaatttgcggaggaggagccggtgctggtactgagccctgaggagcccgggcctggcctggcccaccctgctcctccaggtgctgggcagtcactctgctaagagtccctccctgccacgccctggcaggacacaggcacttttccaatgggcaagcccagtggaggcaggatgggagagccccctgggtgctgctggggccttggggcaggagtgaagcagaggtgatggggctgggctgagccagggaggaaggacccagctgcacctaggagacacctttgttcttcaggcctgtgggggaagttccgggtgcctttattttttattcttttctaaggaaaaaaatgataaaaatctcaaagctgatttttcttgttatagaaaaactaatataaaagcattatccctatccctgcagcctgtg

SEQ ID NO: 367632 - DNA, 1499 bp, Homo sapiens
tgacactctccgggcgacgttatcgctccctccgcctgcgcctggccgctctagaaaggggtgccagccatcgctggggtgccttgattctgttccaccttggtccggtttatttcagtttaatggttatgtaacaacggtccgtctctcctaccaaccggtaccccgcccacgccagcagccacgggtcgccagcgccacgcagcggaggcgggcggcatggctggcccaaggtgcgcaggcgcactagccctgggggtgcttccgtgtctgcgccctgagacatttttggcgccggccccagcctgagcggggacggcggccgggagggcgcggcccgggttcccgttccccgcggagccatgcggtacaacgagaaggagctgcaggctctgtcccggcagccggccgagatggcggccgagctgggcatgaggggccccaagaagggcagcgtgctgaagcggcggctggtgaagctggtggtgaatttcctcttctactttcggacagacgaggccgagcccgtcggagccctgctgctggagcgctgcagagtcgtccgggaagagcccggcaccttctccatcagcttcattgaggaccctgagaggaagtatcactttgagtgcagcagcgaggagcagtgtcaggagtggatggaggctctgcgtcgggccagctacgagttcatgcggagaagcctcatcttctacaggaacgaaatccggaaggtgacgggcaaggaccccctggaacagttcggcatatccgaggaggccaggttccagctgagtggcttgcaggcgtgagcgcagggcacggtggtcagcgtgcagcgggacgggactggccctgcccagccatgaatcgcttggccatgcctggatctgttttgttttggtttttggtttttgggtcagggtttcactgtgttgcccaggctagagtgcagtggtgccacagctcactgtgaccttgaccttctggactcaagtgatcctcctgcctcagcttcccaagtagcggggatcacaggcatgagccgccacacccggccatcacacctggattttcagtgggaggtttttggtttggagacatccaaagcctgaagccaggtgggtgtgggcaggggctgcattttatgaaactgcccagcaagctgcgctccctggggccccaggatccacctaactggcctggcacctggtgccacgtgctgctgccgccaggatatgcgccttcccacaggtgccctgcctgagttgtgtgcatccaggggcctggtgagcccccaggctggtggcatggcccccctgccccgtgctgaatgaatgtacagagccagacaaagctgtgaatggcctaggggctgagtcccacaccagctgtgaattctcctgcagacaggagggccctggctgtgcacctggggaagtggttgccctggggccagggtgcttgttctgttcaaataaaggtacctcttttccaca

SEQ ID NO: 367633 - DNA, 712 bp, Homo sapiens
acgctgtggatagtaagactgctgtgggggtgaagggaaggggtatgaaggctgctggggtccgaggtatgaagcctgtccaggactctggtgatacactggtggatatggcatattatactggccatacgcataaggattatagcccatgggcatgggcatttggcaatacccaggatatcctggataggtgggatagggtggtccctgcgcctgtggaggaggagctgagccaggcgtttgtgatggagctggcgcagcagtcccagcccccactggagatggagcagtagcagaaggagctcgatttgctggaagcacaggtggtggaggcgtgggtgtgggcaggggctgcattttatgaaactgcccagcaagctgcgctccctggggccccaggatccacctaactggcctggcacctggtgccacgtgctgctgccgccaggatatgcgccttcccacaggtgccctgcctgagttgtgtgcatccaggggcctggtgagcccccaggctggtggcatggcccccctgccccgtgctgaatgaatgtacagagccagacaaagctgtgaatggcctaggggctgagtcccacaccagctgtgaattctcctgcagacaggagggccctggctgtgcacctggggaagtggttgccctggggccagggtgcttgttctgttcaaataaaggtacctcttttccaca

SEQ ID NO: 367634 - DNA, 1904 bp, Homo sapiens
tgacactctccgggcgacgttatcgctccctccgcctgcgcctggccgctctagaaaggggtgccagccatcgctggggtgccttgattctgttccaccttggtccggtttatttcagtttaatggttatgtaacaacggtccgtctctcctaccaaccggtaccccgcccacgccagcagccacgggtcgccagcgccacgcagcggaggcgggcggcatggctggcccaaggtgcgcaggcgcactagccctgggggtgcttccgtgtctgcgccctgagacatttttggcgccggccccagcctgagcggggacggcggccgggagggcgcggcccgggttcccgttccccgcggagccatgcggtacaacgagaaggagctgcaggctctgtcccggcagccggccgagatggcggccgagctgggcatgaggggccccaagaagggcagcgtgctgaagcggcggctggtgaagctggtggtgaatttcctcttctactttcggacagacgaggccgagcccgtcggagccctgctgctggagcgctgcagagtcgtccgggaagagcccggcaccttctccatcagcttcattgaggaccctgagaggaagtatcactttgagtgcagcagcgaggagcagtgtcaggagtggatggaggctctgcgtcgggccagctacgagttcatgcggagaagcctcatcttctacaggaacgaaatccggaaggtgacgggcaaggaccccctggaacagttcggcatatccgaggaggccaggttccagctgagtggcttgcaggcgtgagcgcagggcacggtggtcagcgtgcagcgggacgggactggccctgcccagccatgaatcgcttggccatgcctggatctgttttgttttggtttttggtttttgggtcagggtttcactgtgttgcccaggctagagtgcagtggtgccacagctcactgtgaccttgaccttctggactcaagtgatcctcctgcctcagcttcccaagtagcggggatcacaggcatgagccgccacacccggccatcacacctggattttcagtgggaggtttttggtttggagacatccaaagcctgaagccaggtgggtgtgggcaggggctgcattttatgaaactgcccagcaagctgcgctccctggggccccaggatccacctaactggcctggcacctggtgccacgtgctgctgccgccaggatatgcgccttcccacaggtgccctgcctgagttgtgtgcatccaggggcctggtgagcccccaggctggtggcatggcccccctgccccgtgctgaatgaatgtacagagccagacaaagctgtgaatggcctaggggctgagtcccacaccagctgtgaattctcctgcagacaggagggccctggctgtgcacctggggaagtggttgccctggggccagggtgcttgttctgttcaaataaaggtacctcttttccacaaaaaaaaaaaacacaaaacacaacacaacaaaacatgtgtggggcgcacacagcgcccccagaaaaaactcttaaaaaaccaatcggtggggggcgcacgcgcgcccaaaaggcacaagcgaaccaggcgccacaaccgcggggtccccagagagaacaccgcggggcacaaacaagacgtgcgcggtgggagttcctccacccacgacagtaataaaaaagaggacgcccgccgggggggaaaaaacacagagggaggctgtacatgaggacaacaacaacgccagacaaaggagggacctgaggcgcggacacacacgaggggggggacatacaaccaagaaggagcacgctccacaagcgagcgcgcggaacaaccaaatattagacgcccggcggtctggg

SEQ ID NO: 367635 - DNA, 1431 bp, Homo sapiens
tgacactctccgggcgacgttatcgctccctccgcctgcgcctggccgctctagaaaggggtgccagccatcgctggggtgccttgattctgttccaccttggtccggtttatttcagtttaatggttatgtaacaacggtccgtctctcctaccaaccggtaccccgcccacgccagcagccacgggtcgccagcgccacgcagcggaggcgggcggcatggctggcccaaggtgcgcaggcgcactagccctgggggtgcttccgtgtctgcgccctgagacatttttggcgccggccccagcctgagcggggacggcggccgggagggcgcggcccgggttcccgttccccgcggagccatgcggtacaacgagaaggagctgcaggctctgtcccggcagccggccgagatggcggccgagctgggcatgaggggccccaagaagggcagcgcccgtcggagccctgctgctggagcgctgcagagtcgtccgggaagagcccggcaccttctccatcagcttcattgaggaccctgagaggaagtatcactttgagtgcagcagcgaggagcagtgtcaggagtggatggaggctctgcgtcgggccagctacgagttcatgcggagaagcctcatcttctacaggaacgaaatccggaaggtgacgggcaaggaccccctggaacagttcggcatatccgaggaggccaggttccagctgagtggcttgcaggcgtgagcgcagggcacggtggtcagcgtgcagcgggacgggactggccctgcccagccatgaatcgcttggccatgcctggatctgttttgttttggtttttggtttttgggtcagggtttcactgtgttgcccaggctagagtgcagtggtgccacagctcactgtgaccttgaccttctggactcaagtgatcctcctgcctcagcttcccaagtagcggggatcacaggcatgagccgccacacccggccatcacacctggattttcagtgggaggtttttggtttggagacatccaaagcctgaagccaggtgggtgtgggcaggggctgcattttatgaaactgcccagcaagctgcgctccctggggccccaggatccacctaactggcctggcacctggtgccacgtgctgctgccgccaggatatgcgccttcccacaggtgccctgcctgagttgtgtgcatccaggggcctggtgagcccccaggctggtggcatggcccccctgccccgtgctgaatgaatgtacagagccagacaaagctgtgaatggcctaggggctgagtcccacaccagctgtgaattctcctgcagacaggagggccctggctgtgcacctggggaagtggttgccctggggccagggtgcttgttctgttcaaataaaggtacctcttttccaca

SEQ ID NO: 367636 - DNA, 1591 bp, Homo sapiens
tgacactctccgggcgacgttatcgctccctccgcctgcgcctggccgctctagaaaggggtgccagccatcgctggggtgccttgattctgttccaccttggtccggtttatttcagtttaatggttatgtaacaacggtccgtctctcctaccaaccggtaccccgcccacgccagcagccacgggtcgccagcgccacgcagcggaggcgggcggcatggctggcccaaggtgcgcaggcgcactagccctgggggtgcttccgtgtctgcgccctgagacatttttggcgccggccccagcctgagcggggacggcggccgggagggcgcggcccgggttcccgttccccgcggagccatgcggtacaacgagaaggagctgcaggctctgtcccggcagccggccgagatggcggccgagctgggcatgaggggccccaagaagggcagcgtgctgaagcggcggctggtgaagctggtggtgaatttcctcttctactttcggacagacgaggccgagcccgtcggagccctgctgctggagcgctgcagagtcgtccgggaagagcccggcaccttctccatcagcttcattgaggaccctgagaggaagtatcactttgagtgcagcagcgaggagcagtgtcaggagtggatggaggctctgcgtcgggccagctacgagttcatgcggagaagcctcatcttctacaggaacgaaatccggaaggtgacgggcaaggtgtgtgcagggctgcagagggccggggtggggctgcaggtggcagaggcagtcctccagccctggctcatggccacccgtcctccccacaggaccccctggaacagttcggcatatccgaggaggccaggttccagctgagtggcttgcaggcgtgagcgcagggcacggtggtcagcgtgcagcgggacgggactggccctgcccagccatgaatcgcttggccatgcctggatctgttttgttttggtttttggtttttgggtcagggtttcactgtgttgcccaggctagagtgcagtggtgccacagctcactgtgaccttgaccttctggactcaagtgatcctcctgcctcagcttcccaagtagcggggatcacaggcatgagccgccacacccggccatcacacctggattttcagtgggaggtttttggtttggagacatccaaagcctgaagccaggtgggtgtgggcaggggctgcattttatgaaactgcccagcaagctgcgctccctggggccccaggatccacctaactggcctggcacctggtgccacgtgctgctgccgccaggatatgcgccttcccacaggtgccctgcctgagttgtgtgcatccaggggcctggtgagcccccaggctggtggcatggcccccctgccccgtgctgaatgaatgtacagagccagacaaagctgtgaatggcctaggggctgagtcccacaccagctgtgaattctcctgcagacaggagggccctggctgtgcacctggggaagtggttgccctggggccagggtgcttgttctgttcaaataaaggtacctcttttccaca

SEQ ID NO: 367637 - DNA, 1901 bp, Homo sapiens
ggcttgtggaagcgtcaccttgtcctccttgcatcacgtctgtgcccacatttccccttctacacagacgccaagcagaatttagggcccaccctgacaacccctttttacttcactttattattttatttgcttattttttgagacagggtcttggtatgtcgcccaggctggagtgcagtggtgcaatctcggctccctgtaacttccccctctcgggttcaagtgattctcctgcctcagcctcccgagtagctggtactacaggcacgcgccaccatgcccagctaatttttgtatttttagtagagacggggtttcgccatattggccaggctgctctcgaactcctgacctcaggtgatcctcccacctcggcctcccaaagtgctgggattacggtcttgagccaccgtacccggccctctttatttttgagacaggatcttttgtttccgaggctggagtgcagtggcgtgatcacagctcactgcagcctcaacccccttggctcaagcagtcctcccacttctgactccggagtggctgggcctacaaggccccaccaccacacctggctaatttttgtttttgtagagatggggattttgccatgtcacccaggctggtctcgaactcctgagctcaagcaatcctcccaccttggcctctcaaagcgctgggattataggcatgagccaccgcacctggcgacaacctcattttgactagtttatatgcaaagaccctgtttatatacagggccatactcatgggttctggggggtcaggacatgaacacatctttgtgggggccagagaagggacagtttatgggcaatggcaagaggaagctgcttgtggctgtgggtaggaccgaccacaggtgttccatccccaggcttcattgaggaccctgagaggaagtatcactttgagtgcagcagcgaggagcagtgtcaggagtggatggaggctctgcgtcgggccagctacgagttcatgcggagaagcctcatcttctacaggaacgaaatccggaaggtgacgggcaaggtgtgtgcagggctgcagagggccggggtggggctgcaggtggcagaggcagtcctccagccctggctcatggccacccgtcctccccacaggaccccctggaacagttcggcatatccgaggaggccaggttccagctgagtggcttgcaggcgtgagcgcagggcacggtggtcagcgtgcagcgggacgggactggccctgcccagccatgaatcgcttggccatgcctggatctgttttgttttggtttttggtttttgggtcagggtttcactgtgttgcccaggctagagtgcagtggtgccacagctcactgtgaccttgaccttctggactcaagtgatcctcctgcctcagcttcccaagtagcggggatcacaggcatgagccgccacacccggccatcacacctggattttcagtgggaggtttttggtttggagacatccaaagcctgaagccaggtgggtgtgggcaggggctgcattttatgaaactgcccagcaagctgcgctccctggggccccaggatccacctaactggcctggcacctggtgccacgtgctgctgccgccaggatatgcgccttcccacaggtgccctgcctgagttgtgtgcatccaggggcctggtgagcccccaggctggtggcatggcccccctgccccgtgctgaatgaatgtacagagccagacaaagctgtgaatggcctaggggctgagtcccacaccagctgtgaattctcctgcagacaggagggccctggctgtgcacctggggaagtggttgccctggggccagggtgcttgttctgttcaaataaaggtacctcttttccaca

SEQ ID NO: 367638 - DNA, 1408 bp, Homo sapiens
tgacactctccgggcgacgttatcgctccctccgcctgcgcctggccgctctagaaaggggtgccagccatcgctggggtgccttgattctgttccaccttggtccggtttatttcagtttaatggttatgtaacaacggtccgtctctcctaccaaccggtaccccgcccacgccagcagccacgggtcgccagcgccacgcagcggaggcgggcggcatggctggcccaaggtgcgcaggcgcactagccctgggggtgcttccgtgtctgcgccctgagacatttttggcgccggccccagcctgagcggggacggcggccgggagggcgcggcccgggttcccgttccccgcggagccatgcggtacaacgagaaggagctgcaggctctgtcccggcagccggccgagatggcggccgagctgggcatgaggggccccaagaagggcagcgtgctgaagcggcggctggtgaagctggtggtgaatttcctcttctactttcggacagacgaggccgagcccgtcggagccctgctgctggagcgctgcagagtcgtccgggaagagcccggcaccttctccatcactacgagttcatgcggagaagcctcatcttctacaggaacgaaatccggaaggtgacgggcaaggaccccctggaacagttcggcatatccgaggaggccaggttccagctgagtggcttgcaggcgtgagcgcagggcacggtggtcagcgtgcagcgggacgggactggccctgcccagccatgaatcgcttggccatgcctggatctgttttgttttggtttttggtttttgggtcagggtttcactgtgttgcccaggctagagtgcagtggtgccacagctcactgtgaccttgaccttctggactcaagtgatcctcctgcctcagcttcccaagtagcggggatcacaggcatgagccgccacacccggccatcacacctggattttcagtgggaggtttttggtttggagacatccaaagcctgaagccaggtgggtgtgggcaggggctgcattttatgaaactgcccagcaagctgcgctccctggggccccaggatccacctaactggcctggcacctggtgccacgtgctgctgccgccaggatatgcgccttcccacaggtgccctgcctgagttgtgtgcatccaggggcctggtgagcccccaggctggtggcatggcccccctgccccgtgctgaatgaatgtacagagccagacaaagctgtgaatggcctaggggctgagtcccacaccagctgtgaattctcctgcagacaggagggccctggctgtgcacctggggaagtggttgccctggggccagggtgcttgttctgttcaaataaaggtacctcttttccaca

SEQ ID NO: 367639 - DNA, 1366 bp, Homo sapiens
tgacactctccgggcgacgttatcgctccctccgcctgcgcctggccgctctagaaaggggtgccagccatcgctggggtgccttgattctgttccaccttggtccggtttatttcagtttaatggttatgtaacaacggtccgtctctcctaccaaccggtaccccgcccacgccagcagccacgggtcgccagcgccacgcagcggaggcgggcggcatggctggcccaaggtgcgcaggcgcactagccctgggggtgcttccgtgtctgcgccctgagacatttttggcgccggccccagcctgagcggggacggcggccgggagggcgcggcccgggttcccgttccccgcggagccatgcggtacaacgagaaggagctgcaggctctgtcccggcagccggccgagatggcggccgagctgggcatgaggggccccaagaagggcagcgtgctgaagcggcggctggtgaagctggtggtgaatttcctcttctactttcggacagacgaggccgagcccgtcggagccctgctgctggagcgctgcagagtcgtccgggaagagcccggcaccttctccatcagcttcattgaggaccctgagaggaagtatcactttgagtgcagcagcgaggagcagtgtcaggagtggatggaggctctgcgtcgggccagctacgagttcatgcggagaagcctcatcttctacaggaacgaaatccggaaggtgacgggcaaggaccccctggaacagttcggcatatccgaggaggccaggttccagctgagtggcttgcaggcgtgagcgcagggcacggtggtcagcgtgcagcgggacgggactggccctgcccagccatgaatcgcttggccatgcctggatctgttttgttttggtttttggtttttgggtcagggtttcactgtgttgcccaggctagagtgcagtggtgccacagctcactgtgaccttgaccttctggactcaagtgatcctcctgcctcagcttcccaagtagcggggatcacaggcatgagccgccacacccggccatcacacctggattttcagtgggaggtttttggtttggagacatccaaagcctgaagccaggtgccctgcctgagttgtgtgcatccaggggcctggtgagcccccaggctggtggcatggcccccctgccccgtgctgaatgaatgtacagagccagacaaagctgtgaatggcctaggggctgagtcccacaccagctgtgaattctcctgcagacaggagggccctggctgtgcacctggggaagtggttgccctggggccagggtgcttgttctgttcaaataaaggtacctcttttccaca

SEQ ID NO: 367640 - DNA, 1250 bp, Homo sapiens
tgacactctccgggcgacgttatcgctccctccgcctgcgcctggccgctctagaaaggggtgccagccatcgctggggtgccttgattctgttccaccttggtccggtttatttcagtttaatggttatgtaacaacggtccgtctctcctaccaaccggtaccccgcccacgccagcagccacgggtcgccagcgccacgcagcggaggcgggcggcatggctggcccaaggtgcgcaggcgcactagccctgggggtgcttccgtgtctgcgccctgagacatttttggcgccggccccagcctgagcggggacggcggccgggagggcgcggcccgggttcccgttccccgcggagccatgcggtacaacgagaaggagctgcaggctctgtcccggcagccggccgagatggcggccgagctgggcatgaggggccccaagaagggcagcgtgctgaagcggcggctggtgaagctggtggtgaatttcctcttctactttcggacagacgaggccgagcccgtcggagccctgctgctggagcgctgcagagtcgtccgggaagagcccggcaccttctccatcagcttcattgaggaccctgagaggaagtatcactttgagtgcagcagcgaggagcagtgtcaggagtggatggaggctctgcgtcgggccagctacgagttcatgcggagaagcctcatcttctacaggaacgaaatccggaaggtgacgggcaagaaacaccaagggacccacgacaggcctgccccgcatcgcagggcatgctgcgagccatggacagccgagaaatacaaaagtaaatgcacttgttcaacgtgcccgcgccgtcctcacagcaccatcgcgcagcacatggccagctgcgtcaccgcgcaggccccttcacatgcaagggcgcaacccacgccccggagggtgaacagtctgggggttcacagtgccggggtaaaggtgaagagctcagggcaggcgccagggcgctcaggaaggggctcaggccgcggggaggcctccgaggaatgtggtggcgacgggcctgcctttggtacgggagcagcgcgtcgggggagccggccgggcggcgtttccgagaacggggttcggcgttgtcagcgtctagtcagcaccaagcgggtggaggcaggcgcgggcctggggacgagatagcaccggggcaggctgtggcgaatccgctggcgggcccgccctgcagacacgtgt

SEQ ID NO: 367641 - DNA, 716 bp, Homo sapiens
tgacactctccgggcgacgttatcgctccctccgcctgcgcctggccgctctagaaaggggtgccagccatcgctggggtgccttgattctgttccaccttggtccggtttatttcagtttaatggttatgtaacaacggtccgtctctcctaccaaccggtaccccgcccacgccagcagccacgggtcgccagcgccacgcagcggaggcgggcggcatggctggcccaaggtgcgcaggcgcactagccctgggggtgcttccgtgtctgcgccctgagacatttttggcgccggccccagcctgagcggggacggcggccgggagggcgcggcccgggttcccgttccccgcggagccatgcggtacaacgagaaggagctgcaggctctgtcccggcagccggccgagatggcggccgagctgggcatgaggggccccaagaagggcagcgtgctgaagcggcggctggtgaagctggtggtgaatttcctcttctactttcggacagacgaggccgagcccgtcggagccctgctgctggagcgctgcagagtcgtccgggaagagcccggcaccttctccatcactacgagttcatgcggagaagcctcatcttctacaggaacgaaatccggaaggtgacgggcaagagattgccacaaccacctcaaccttcagcaagcatcatcctgatcagtcagcagccatcaa

SEQ ID NO: 367642 - DNA, 559 bp, Homo sapiens
tgacactctccgggcgacgttatcgctccctccgcctgcgcctggccgctctagaaaggggtgccagccatcgctggggtgccttgattctgttccaccttggtccggtttatttcagtttaatggttatgtaacaacggtccgtctctcctaccaaccggtaccccgcccacgccagcagccacgggtcgccagcgccacgcagcggaggcgggcggcatggctggcccaaggtgcgcaggcgcactagccctgggggtgcttccgtgtctgcgccctgagacatttttggcgccggccccagcctgagcggggacggcggccgggagggcgcggcccgggttcccgttccccgcggagccatgcggtacaacgagaaggagctgcaggctctgtcccggcagccggccgagatggcggccgagctgggcatgaggggccccaagaagggcagcgtgagcgggacccgggagaccgagacagtgccaggggcgggaggccggggccggggtctgggcgggggtgccggaggccggagtccgggtcggggcgccgggga

SEQ ID NO: 367643 - DNA, 1809 bp, Homo sapiens
ggcttgtggaagcgtcaccttgtcctccttgcatcacgtctgtgcccacatttccccttctacacagacgccaagcagaatttagggcccaccctgacaacccctttttacttcactttattattttatttgcttattttttgagacagggtcttggtatgtcgcccaggctggagtgcagtggtgcaatctcggctccctgtaacttccccctctcgggttcaagtgattctcctgcctcagcctcccgagtagctggtactacaggcacgcgccaccatgcccagctaatttttgtatttttagtagagacggggtttcgccatattggccaggctgctctcgaactcctgacctcaggtgatcctcccacctcggcctcccaaagtgctgggattacggtcttgagccaccgtacccggccctctttatttttgagacaggatcttttgtttccgaggctggagtgcagtggcgtgatcacagctcactgcagcctcaacccccttggctcaagcagtcctcccacttctgactccggagtggctgggcctacaaggccccaccaccacacctggctaatttttgtttttgtagagatggggattttgccatgtcacccaggctggtctcgaactcctgagctcaagcaatcctcccaccttggcctctcaaagcgctgggattataggcatgagccaccgcacctggcgacaacctcattttgactagtttatatgcaaagaccctgtttatatacagggccatactcatgggttctggggggtcaggacatgaacacatctttgtgggggccagagaagggacagtttatgggcaatggcaagaggaagctgcttgtggctgtgggtaggaccgaccacaggtgttccatccccaggcttcattgaggaccctgagaggaagtatcactttgagtgcagcagcgaggagcagtgtcaggagtggatggaggctctgcgtcgggccagctacgagttcatgcggagaagcctcatcttctacaggaacgaaatccggaaggtgacgggcaaggaccccctggaacagttcggcatatccgaggaggccaggttccagctgagtggcttgcaggcgtgagcgcagggcacggtggtcagcgtgcagcgggacgggactggccctgcccagccatgaatcgcttggccatgcctggatctgttttgttttggtttttggtttttgggtcagggtttcactgtgttgcccaggctagagtgcagtggtgccacagctcactgtgaccttgaccttctggactcaagtgatcctcctgcctcagcttcccaagtagcggggatcacaggcatgagccgccacacccggccatcacacctggattttcagtgggaggtttttggtttggagacatccaaagcctgaagccaggtgggtgtgggcaggggctgcattttatgaaactgcccagcaagctgcgctccctggggccccaggatccacctaactggcctggcacctggtgccacgtgctgctgccgccaggatatgcgccttcccacaggtgccctgcctgagttgtgtgcatccaggggcctggtgagcccccaggctggtggcatggcccccctgccccgtgctgaatgaatgtacagagccagacaaagctgtgaatggcctaggggctgagtcccacaccagctgtgaattctcctgcagacaggagggccctggctgtgcacctggggaagtggttgccctggggccagggtgcttgttctgttcaaataaaggtacctcttttccaca

SEQ ID NO: 367644 - DNA, 1471 bp, Homo sapiens
tgacactctccgggcgacgttatcgctccctccgcctgcgcctggccgctctagaaaggggtgccagccatcgctggggtgccttgattctgttccaccttggtccggtttatttcagtttaatggttatgtaacaacggtccgtctctcctaccaaccggtaccccgcccacgccagcagccacgggtcgccagcgccacgcagcggaggcgggcggcatggctggcccaaggtgcgcaggcgcactagccctgggggtgcttccgtgtctgcgccctgagacatttttggcgccggccccagcctgagcggggacggcggccgggagggcgcggcccgggttcccgttccccgcggagccatgcggtacaacgagaaggagctgcaggctctgtcccggcagccggccgagatggcggccgagctgggcatgaggggccccaagaagggcagcgtgctgaagcggcggctggtgaagctggtggtgaatttcctcttctactttcggacagacgaggccgagcccgtcggagccctgctgctggagcgctgcagagtcgtccgggaagagcccggcaccttctccatcagcttcattgaggaccctgagaggaagtatcactttgagtgcagcagcgaggagcagtgtcaggagtggatggaggctctgcgtcgggccagctacgagttcatgcggagaagcctcatcttctacaggaacgaaatccggaaggtgacgggcaaggaccccctggaacagttcggcatatccgaggaggccaggttccagctgagtggcttgcaggcgtgagcgcagggcacggtggtcagcgtgcagcgggacgggactggccctgcccagccatgaatcgcttggccatgcctggatctgttttgttttggtttttggtttttgggtcagggtttcactgtgttgcccaggctagagtgcagtggtgccacagctcactgtgaccttgaccttctggactcaagtgatcctcctgcctcagcttcccaagtagcggggatcacaggcatgagccgccacacccggccatcacacctggattttcagtgggaggtttttggtttggagacatccaaagcctgaagccaggtgggtgtgggcaggggctgcattttatgaaactgcccagcaagctgcgctccctggggccccaggatccacctaactggcctggcacctggtgccacgtgctgctgccgccaggatatgcgccttcccacaggtgccctgcctgagttgtgtgcatccaggggcctgccctgccccgtgctgaatgaatgtacagagccagacaaagctgtgaatggcctaggggctgagtcccacaccagctgtgaattctcctgcagacaggagggccctggctgtgcacctggggaagtggttgccctggggccagggtgcttgttctgttcaaataaaggtacctcttttccaca

SEQ ID NO: 367645 - DNA, 1037 bp, Homo sapiens
tgacactctccgggcgacgttatcgctccctccgcctgcgcctggccgctctagaaaggggtgccagccatcgctggggtgccttgattctgttccaccttggtccggtttatttcagtttaatggttatgtaacaacggtccgtctctcctaccaaccggtaccccgcccacgccagcagccacgggtcgccagcgccacgcagcggaggcgggcggcatggctggcccaaggtgcgcaggcgcactagccctgggggtgcttccgtgtctgcgccctgagacatttttggcgccggccccagcctgagcggggacggcggccgggagggcgcggcccgggttcccgttccccgcggagccatgcggtacaacgagaaggagctgcaggctctgtcccggcagccggccgagatggcggccgagctgggcatgaggggccccaagaagggcagcgtgctgaagcggcggctggtgaagctggtggtgaatttcctcttctactttcggacagacgaggccgagcccgtcggagccctgctgctggagcgctgcagagtcgtccgggaagagcccggcaccttctccatcagcttcattgaggaccctgagaggaagtatcactttgagtgcagcagcgaggagcagtgtcaggagtggatggaggctctgcgtcgggccagctacgagttcatgcggagaagcctcatcttctacaggaacgaaatccggaaggtgacgggcaaggaccccctggaacagttcggcatatccgaggaggccaggttccagctgagtggcttgcaggcgtgagcgcagggcacggtggtcagcgtgcagcgggacgggactggccccctgccccgtgctgaatgaatgtacagagccagacaaagctgtgaatggcctaggggctgagtcccacaccagctgtgaattctcctgcagacaggagggccctggctgtgcacctggggaagtggttgccctggggccagggtgcttgttctgttcaaataaaggtacctcttttccaca

SEQ ID NO: 367646 - DNA, 722 bp, Homo sapiens
agctcactgcagcctcaacccccttggctcaagcagtcctcccacttctgactccggagtggctgggcctacaaggccccaccaccacacctggctaatttttgtttttgtagagatggggattttgccatgtcacccaggctggtctcgaactcctgagctcaagcaatcctcccaccttggcctctcaaagcgctgggattataggcatgagccaccgcacctggcgacaacctcattttgactagtttatatgcaaagaccctgtttatatacagggccatactcatgggttctggggggtcaggacatgaacacatctttgtgggggccagagaagggacagtttatgggcaatggcaagaggaagctgcttgtggctgtgggtaggaccgaccacaggtgttccatccccaggcttcattgaggaccctgagaggaagtatcactttgagtgcagcagcgaggagcagtgtcaggagtggatggaggctctgcgtcgggccaggtggggccaggcggtggtgggcactgctggggtgggcacagcagccatgcagagcgggcatttgaccccgtgccacccttttccccagctacgagttcatgcggagaagcctcatcttctacaggaacgaaatccggaaggtgacgggcaaggtgtgtgcagggctgcagagggccggggtggggctgcaggtggcagaggcagtcctccagcc

SEQ ID NO: 367647 - DNA, 317 bp, Homo sapiens
tcatggctgtggagaacagatcctgcatgccttttgtcttctgtgagcatctgccactctggtatggccaccaaatgctcttctccctggtgcatgccagggagctttgcgcacagcattccacagatagcatggactagggaacacaccccaggtggacatgtgacaggcagaagacttgtgcagcgtgctgttcagggcgagtgtgcaaagacaggccacctcttggggagacggcccatagcgcggaaagaagtcatcttcctttccggccattctctttttctctacacacgagccctgcaataggactcagt

SEQ ID NO: 367648 - DNA, 5762 bp, Homo sapiens
cgcgcgcgcggctcggagaggcggcggcagcggcggaagcggcgagggcggcgggcgtccggctctgaggtggtggaggcggcggaggcggcggcggaggcggcggcggctcgggactgggctcggctggaagcagcgagggtcagagcgccgcagcaagcgccgatctcccggctcgaccatccgcctgccgcccggacgcctgggccgcggagtttgtgtcccggctcggaccccggcgcccagcccggagccgtaaccttgaggcggcggcggcggggccgggccgggccgggctggggggcggtggcgctggatccgcggctgcccgatcgttggcgggagatgtcgaaccccgggacacgcaggaacggctccagcatcaagatccgtctgacagtgttatgtgccaagaaccttgcaaagaaagacttcttcaggctccctgacccttttgcaaagattgtcgtggatgggtctgggcagtgccactcaaccgacactgtgaaaaacacattggacccaaagtggaaccagcactatgatctatatgttgggaaaacggattcgataaccattagcgtgtggaaccataagaaaattcacaagaaacagggagctggcttcctgggctgtgtgcggctgctctccaatgccatcagcagattaaaagataccggataccagcgtttggatctatgcaaactaaacccctcagatactgatgcagttcgtggccagatagtggtcagtttacagacacgagacagaataggaaccggcggctcggtggtggactgcagaggactgttagaaaatgaaggaacggtgtatgaagactccgggcctgggaggccgctcagctgcttcatggaggaaccagccccttacacagatagcaccggtgctgctgctggaggagggaattgcaggttcgtggagtccccaagtcaagatcaaagacttcaggcacagcggcttcgaaaccctgatgtgcgaggttcactacagacgccccagaaccgaccacacggccaccagtccccggaactgcccgaaggctacgaacaaagaacaacagtccagggccaagtttactttttgcatacacagactggagttagcacgtggcacgaccccaggataccaagtccctcggggaccattcctgggggagatgcagcttttctatacgaattccttctacaaggccatacatctgagcccagagaccttaacagtgtgaactgtgatgaacttggaccactgccgccaggctgggaagtcagaagtacagtttctgggaggatatattttgtagatcataataaccgaacaacccagtttacagacccaaggttacaccacatcatgaatcaccagtgccaactcaaggagcccagccagccgctgccactgcccagtgagggctctctggaggacgaggagcttcctgcccagagatacgaaagagatctagtccagaagctgaaagtcctcagacacgaactgtcgcttcagcagccccaagctggtcattgccgcatcgaagtgtccagagaagaaatctttgaggagtcttaccgccagataatgaagatgcgaccgaaagacttgaaaaaacggctgatggtgaaattccgtggggaagaaggtttggattacggtggtgtggccagggagtggctttacttgctgtgccatgaaatgctgaatccttattacgggctcttccagtattctacggacaatatttacatgttgcaaataaatccggattcttcaatcaaccccgaccacttgtcttatttccactttgtggggcggatcatggggctggctgtgttccatggacactacatcaacgggggcttcacagtgcccttctacaagcagctgctggggaagcccatccagctctcagatctggaatctgtggacccagagctgcataagagcttggtgtggatcctagagaacgacatcacgcctgtactggaccacaccttctgcgtggaacacaacgccttcgggcggatcctgcagcatgaactgaaacccaatggcagaaatgtgccagtcacagaggagaataagaaagaatacgtccggttgtatgtaaactggaggtttatgagaggaatcgaagcccagttcttagctctgcagaaggggttcaatgagctcatccctcaacatctgctgaagccttttgaccagaaggaactggagctgatcataggcggcctggataaaatagacttgaacgactggaagtcgaacacgcggctgaagcactgtgtggccgacagcaacatcgtgcggtggttctggcaagcggtggagacgttcgatgaagaaaggagggccaggctcctgcagtttgtgactgggtccacgcgagtcccgctccaaggcttcaaggctttgcaaggttctacaggcgcggcagggccccggctgttcaccatccacctgatagacgcgaacacagacaaccttccgaaggcccatacctgctttaaccggatcgacattccaccatatgagtcctatgagaagctctacgagaagctgctgacagccgtggaggagacctgcgggtttgctgtggagtgaaaagcaaccaaaggcaacagagtctagctcatggccaccagaccaaaagcatccagcttctgtgcacctcctgcaaagctggcagaggccctggaattccagatcacctgaggggaaagggttgtctctctcctttctgttgggggagggggatgggggacttttgttggtggctcccacccatatatccctcctttaccatagtactcccacccacttccatcacccatccaataaaatgcagccaggtttagcctttggctttggtcacacaggatattctgctgtgttgcaacccatgtggtgataaggctcacagccctgagctctttacgggagcatcaactcacagttaggggactgggcgtggctgattgagggtttggaactggtggctatgccagctattccatctcaaaacagccttgaggccccttttcaatttgagcagctgctagatatcttatcagagctcagattccagatttcacatcccagcagccggttctgggtagcagatcaatttccaactggaaaataactatataatgtatgcttattggaattctgccacagcaggaagcttgagtcaaaatgtgtttcccctttgaaaggagaaggaattggagcagcttttcctggaggcccaggatatttcttttctgggtatcttggctgaaaattttgttttacatagagaaaaacgatcttttaagggtcccttttgctgcattatctgtccagtttgacttttttttcagtgaaaacaccatgtcatggagtgtaggaaagagcagaccaaaatcagccctagagccaaccagtcagtcccaaagctgtgacctctgtgccactgttgtccatagaagagcatcgactgtgtcacttaaaatattagtaaaccatgatgcagcaactgctaagagctaaactaacaaaattgtgtcatcatagctgctggcttggtgtgaactcgcttaaaagcaatggtgaaaggataacctcgatgatgtaaatccacccaaagatactgttctacaaaaagtagggtgtggacgcaaacctgtgacagcagagggggacgacttcacactcactgcctcatgtggcccctttcccagtggcagctggtgacactaacgattgctactcggttcacttgcccagatgtcttcatatgatgagcaaggccagaagcaaggctagattcgaagtttctgacaccatttccagtttgcacaaaagtcagtattttatcttaaagtggcttgatttccaatagctgaacttgggcagaaaacagcaggccaatgttcctatgtggtttctttgttgttgtttttgtttggggtgggggcaagtacagggtaattcatgagcaagacatttcactgctgtcgaagtctctgggatcccgctgtgggtctgagatggcctgggaaggaccttgtggacaatggttttatctgttctttttgtcactgttaatttctgggctgctgaggttctagaatagaagggctgccaaatgaggtttgctgcaggaggaaagtttaatcccccattccaaaagtccaggccaaatggtgggcttagcctctttgaaaagttctgccttgcccccacaggtgggcacatcctgtgtctcattcaccatgatgcttcctgagggtgttctagaagcccgttccccagtggctgtatccagcctttccttgcatcatcttcctcttgaaggtgaggaagtgaaaactacagacctcccccggacagcccactctctatcacgagcctaacccgcgggaggcggaagagacatccattcgagaactgaagcggcctccgggatgaggtcagaggccccacctgattttcctggtggtggtatccaaaatcttcagtaactaggaaggaaaccagggtctcatggtttaaaagactttgaagcaggaatgttgcatttgacgcctttaaaactacctttttgctgttgggaggagtcgggggcgagccttagcagctgcaccgccatccccatgctggttggtgctgccctgcctctcgtgccgggtgttgcttcagcccagagccagagggctgggtcccgggtcctccacaggtgaccccggtggacacacgcgttcccatcctggcctccgtctctgcttttccacttctacctgcgtgtgggtttgccgccttgtcatcggttgtgtgagtgtcgcagacctttccagagctccggttcactctttccaaacaggcctccctgtcggtggcactgcactcctagaaccttcagtttctacgatggtttgtttggtccttttgaaccaccccaaagaactcaacatggcaaagcaaatggtaaaagcttcccgactgttctactttgggtccgcgcgaagcccactcacgtgtgatctgtgttgcccctctcggtggtcccaggcgatccagccatgccccctgcccctctgcccagatgcttcaggggcccggcttttcaggcttgccctcaccagcggccgtcagccgacactcagggatgtagctaacaccactccgccagtgctttcagtaggaagagctgaggctgcctgggaggcccggggcgaccggaaaagggctctctcaagttctgaaaagagaatctgccaccagatcgaatttcgacccctgagcttgttcggacgtatggtccaaattcagattaaggtggtcacccaacccgagatgtcaggaaaggccttctgcagagaaaatgtccccccacccgccatctgcagccaggtgtgtgccacacggcagccttcccgaaacatagtatggattttaaaaatgtgtttatttttgtttctcaaccactttataacgtattttttaatttattttgtaatgtcttgttttgaagtattgctgctatccttgttatccttcccactgtttttatcactgatttattttgtgaaagttgtacactaatgttctatgtcaaaatcaaaagtatttaatgaaatactagttctatttaatgtggttatggaaccagctggaaacacaaaacaaacagtgattgtacagcaggctgggcccaggaggtcaggttcattttgttacatatgcaataaactcacgacttt

SEQ ID NO: 367649 - DNA, 415 bp, Homo sapiens
cctctgggacacttttcccaagaagcttggggacagcacgagattcccacattggccggcaccatgctgacaaattcgtgttctctggtgccccctacaggaccacttgtcttatttccactttgtggggcggatcatggggctggctgtgttccatggacactacatcaacgggggcttcacagtgcccttctacaagcagctgctggggaagcccatccagctctcagatctggaatctgtggacccagagctgcataagagcttggtgtggatcctgtaagtattgactgacggccggtcacctggcttagggcccaccaccacgtctatcgtatgtatgcgcgtgcgcgcgcgcgcgcgtgtgtgtgtattttggggatgtgtgtgaagccattgtattataacctgaaac

SEQ ID NO: 367650 - DNA, 391 bp, Homo sapiens
gctgggcacagtggctcatgcctgtaatcccagcactgtgggaggccaaggtgggaggatggcttgaacccaggagctcaagaccacctgggcgacagagtgagactccatctcagggaaaaaaaaaaaatgtagaaattttagcgcgtctcaaatgcatttttgttgtttgctcccagggagtggctttacttgctgtgccatgaaatgctgaatccttattacgggctcttccagtattctacggacaatatttacatgttgcaaataaatccggattcttcaatcaaccccgtaagtatgaatgaacaaagaggtagggaattgagttggagaagttttgagatggattttcagtttcattctcagtccttggtctatttgttgtaga

SEQ ID NO: 367651 - DNA, 5684 bp, Homo sapiens
cgcgcgcgcggctcggagaggcggcggcagcggcggaagcggcgagggcggcgggcgtccggctctgaggtggtggaggcggcggaggcggcggcggaggcggcggcggctcgggactgggctcggctggaagcagcgagggtcagagcgccgcagcaagcgccgatctcccggctcgaccatccgcctgccgcccggacgcctgggccgcggagtttgtgtcccggctcggaccccggcgcccagcccggagccgtaaccttgaggcggcggcggcggggccgggccgggccgggctggggggcggtggcgctggatccgcggctgcccgatcgttggcgggagatgtcgaaccccgggacacgcaggaacggctccagcatcaagatccgtctgacagtgttatgtgccaagaaccttgcaaagaaagacttcttcaggctccctgacccttttgcaaagattgtcgtggatgggtctgggcagtgccactcaaccgacactgtgaaaaacacattggacccaaagtggaaccagcactatgatctatatgttgggaaaacggattcgataaccattagcgtgtggaaccataagaaaattcacaagaaacagggagctggcttcctgggctgtgtgcggctgctctccaatgccatcagcagattaaaagataccggataccagcgtttggatctatgcaaactaaacccctcagatactgatgcagttcgtggccagatagtggtcagtttacagacacgagacagaataggaaccggcggctcggtggtggactgcagaggactgttagaaaatgaaggaacggtgtatgaagactccgggcctgggaggccgctcagctgcttcatggaggaaccagccccttacacagatagcaccggtgctgctgctggaggagggaattgcaggttcgtggagtccccaagtcaagatcaaagacttcaggcacagcggcttcgaaaccctgatgtgcgaggttcactacagacgccccagaaccgaccacacggccaccagtccccggaactgcccgaaggctacgaacaaagaacaacagtccagggccaagtttactttttgcatacacagactggagttagcacgtggcacgaccccaggataccaagagaccttaacagtgtgaactgtgatgaacttggaccactgccgccaggctgggaagtcagaagtacagtttctgggaggatatattttgtagatcataataaccgaacaacccagtttacagacccaaggttacaccacatcatgaatcaccagtgccaactcaaggagcccagccagccgctgccactgcccagtgagggctctctggaggacgaggagcttcctgcccagagatacgaaagagatctagtccagaagctgaaagtcctcagacacgaactgtcgcttcagcagccccaagctggtcattgccgcatcgaagtgtccagagaagaaatctttgaggagtcttaccgccagataatgaagatgcgaccgaaagacttgaaaaaacggctgatggtgaaattccgtggggaagaaggtttggattacggtggtgtggccagggagtggctttacttgctgtgccatgaaatgctgaatccttattacgggctcttccagtattctacggacaatatttacatgttgcaaataaatccggattcttcaatcaaccccgaccacttgtcttatttccactttgtggggcggatcatggggctggctgtgttccatggacactacatcaacgggggcttcacagtgcccttctacaagcagctgctggggaagcccatccagctctcagatctggaatctgtggacccagagctgcataagagcttggtgtggatcctagagaacgacatcacgcctgtactggaccacaccttctgcgtggaacacaacgccttcgggcggatcctgcagcatgaactgaaacccaatggcagaaatgtgccagtcacagaggagaataagaaagaatacgtccggttgtatgtaaactggaggtttatgagaggaatcgaagcccagttcttagctctgcagaaggggttcaatgagctcatccctcaacatctgctgaagccttttgaccagaaggaactggagctgatcataggcggcctggataaaatagacttgaacgactggaagtcgaacacgcggctgaagcactgtgtggccgacagcaacatcgtgcggtggttctggcaagcggtggagacgttcgatgaagaaaggagggccaggctcctgcagtttgtgactgggtccacgcgagtcccgctccaaggcttcaaggctttgcaaggttctacaggcgcggcagggccccggctgttcaccatccacctgatagacgcgaacacagacaaccttccgaaggcccatacctgctttaaccggatcgacattccaccatatgagtcctatgagaagctctacgagaagctgctgacagccgtggaggagacctgcgggtttgctgtggagtgaaaagcaaccaaaggcaacagagtctagctcatggccaccagaccaaaagcatccagcttctgtgcacctcctgcaaagctggcagaggccctggaattccagatcacctgaggggaaagggttgtctctctcctttctgttgggggagggggatgggggacttttgttggtggctcccacccatatatccctcctttaccatagtactcccacccacttccatcacccatccaataaaatgcagccaggtttagcctttggctttggtcacacaggatattctgctgtgttgcaacccatgtggtgataaggctcacagccctgagctctttacgggagcatcaactcacagttaggggactgggcgtggctgattgagggtttggaactggtggctatgccagctattccatctcaaaacagccttgaggccccttttcaatttgagcagctgctagatatcttatcagagctcagattccagatttcacatcccagcagccggttctgggtagcagatcaatttccaactggaaaataactatataatgtatgcttattggaattctgccacagcaggaagcttgagtcaaaatgtgtttcccctttgaaaggagaaggaattggagcagcttttcctggaggcccaggatatttcttttctgggtatcttggctgaaaattttgttttacatagagaaaaacgatcttttaagggtcccttttgctgcattatctgtccagtttgacttttttttcagtgaaaacaccatgtcatggagtgtaggaaagagcagaccaaaatcagccctagagccaaccagtcagtcccaaagctgtgacctctgtgccactgttgtccatagaagagcatcgactgtgtcacttaaaatattagtaaaccatgatgcagcaactgctaagagctaaactaacaaaattgtgtcatcatagctgctggcttggtgtgaactcgcttaaaagcaatggtgaaaggataacctcgatgatgtaaatccacccaaagatactgttctacaaaaagtagggtgtggacgcaaacctgtgacagcagagggggacgacttcacactcactgcctcatgtggcccctttcccagtggcagctggtgacactaacgattgctactcggttcacttgcccagatgtcttcatatgatgagcaaggccagaagcaaggctagattcgaagtttctgacaccatttccagtttgcacaaaagtcagtattttatcttaaagtggcttgatttccaatagctgaacttgggcagaaaacagcaggccaatgttcctatgtggtttctttgttgttgtttttgtttggggtgggggcaagtacagggtaattcatgagcaagacatttcactgctgtcgaagtctctgggatcccgctgtgggtctgagatggcctgggaaggaccttgtggacaatggttttatctgttctttttgtcactgttaatttctgggctgctgaggttctagaatagaagggctgccaaatgaggtttgctgcaggaggaaagtttaatcccccattccaaaagtccaggccaaatggtgggcttagcctctttgaaaagttctgccttgcccccacaggtgggcacatcctgtgtctcattcaccatgatgcttcctgagggtgttctagaagcccgttccccagtggctgtatccagcctttccttgcatcatcttcctcttgaaggtgaggaagtgaaaactacagacctcccccggacagcccactctctatcacgagcctaacccgcgggaggcggaagagacatccattcgagaactgaagcggcctccgggatgaggtcagaggccccacctgattttcctggtggtggtatccaaaatcttcagtaactaggaaggaaaccagggtctcatggtttaaaagactttgaagcaggaatgttgcatttgacgcctttaaaactacctttttgctgttgggaggagtcgggggcgagccttagcagctgcaccgccatccccatgctggttggtgctgccctgcctctcgtgccgggtgttgcttcagcccagagccagagggctgggtcccgggtcctccacaggtgaccccggtggacacacgcgttcccatcctggcctccgtctctgcttttccacttctacctgcgtgtgggtttgccgccttgtcatcggttgtgtgagtgtcgcagacctttccagagctccggttcactctttccaaacaggcctccctgtcggtggcactgcactcctagaaccttcagtttctacgatggtttgtttggtccttttgaaccaccccaaagaactcaacatggcaaagcaaatggtaaaagcttcccgactgttctactttgggtccgcgcgaagcccactcacgtgtgatctgtgttgcccctctcggtggtcccaggcgatccagccatgccccctgcccctctgcccagatgcttcaggggcccggcttttcaggcttgccctcaccagcggccgtcagccgacactcagggatgtagctaacaccactccgccagtgctttcagtaggaagagctgaggctgcctgggaggcccggggcgaccggaaaagggctctctcaagttctgaaaagagaatctgccaccagatcgaatttcgacccctgagcttgttcggacgtatggtccaaattcagattaaggtggtcacccaacccgagatgtcaggaaaggccttctgcagagaaaatgtccccccacccgccatctgcagccaggtgtgtgccacacggcagccttcccgaaacatagtatggattttaaaaatgtgtttatttttgtttctcaaccactttataacgtattttttaatttattttgtaatgtcttgttttgaagtattgctgctatccttgttatccttcccactgtttttatcactgatttattttgtgaaagttgtacactaatgttctatgtcaaaatcaaaagtatttaatgaaatactagttctatttaatgtggttatggaaccagctggaaacacaaaacaaacagtgattgtacagcaggctgggcccaggaggtcaggttcattttgttacatatgcaataaactcacgacttt

SEQ ID NO: 367652 - DNA, 5540 bp, Homo sapiens
ggctccttgattcattttgtcttcaatgaaaagtccgtgtttcctgggtggctctgtagtgccaccttcaaggaattcaaggtctaaattgacatatttgggaagagcagggtgttggggaaacagaactgctgagaagctgccattgatggtgaaagactttaatctaaatttagattctcttcagaggtttcgtggaatacttccttaaattaagccacagactgcaaaagctgctgctgagtggggcttccagtgttatgtgccaagaaccttgcaaagaaagacttcttcaggctccctgacccttttgcaaagattgtcgtggatgggtctgggcagtgccactcaaccgacactgtgaaaaacacattggacccaaagtggaaccagcactatgatctatatgttgggaaaacggattcgataaccattagcgtgtggaaccataagaaaattcacaagaaacagggagctggcttcctgggctgtgtgcggctgctctccaatgccatcagcagattaaaagataccggataccagcgtttggatctatgcaaactaaacccctcagatactgatgcagttcgtggccagatagtggtcagtttacagacacgagacagaataggaaccggcggctcggtggtggactgcagaggactgttagaaaatgaaggaacggtgtatgaagactccgggcctgggaggccgctcagctgcttcatggaggaaccagccccttacacagatagcaccggtgctgctgctggaggagggaattgcaggttcgtggagtccccaagtcaagatcaaagacttcaggcacagcggcttcgaaaccctgatgtgcgaggttcactacagacgccccagaaccgaccacacggccaccagtccccggaactgcccgaaggctacgaacaaagaacaacagtccagggccaagtttactttttgcatacacagactggagttagcacgtggcacgaccccaggataccaagagaccttaacagtgtgaactgtgatgaacttggaccactgccgccaggctgggaagtcagaagtacagtttctgggaggatatattttgtagatcataataaccgaacaacccagtttacagacccaaggttacaccacatcatgaatcaccagtgccaactcaaggagcccagccagccgctgccactgcccagtgagggctctctggaggacgaggagcttcctgcccagagatacgaaagagatctagtccagaagctgaaagtcctcagacacgaactgtcgcttcagcagccccaagctggtcattgccgcatcgaagtgtccagagaagaaatctttgaggagtcttaccgccagataatgaagatgcgaccgaaagacttgaaaaaacggctgatggtgaaattccgtggggaagaaggtttggattacggtggtgtggccagggagtggctttacttgctgtgccatgaaatgctgaatccttattacgggctcttccagtattctacggacaatatttacatgttgcaaataaatccggattcttcaatcaaccccgaccacttgtcttatttccactttgtggggcggatcatggggctggctgtgttccatggacactacatcaacgggggcttcacagtgcccttctacaagcagctgctggggaagcccatccagctctcagatctggaatctgtggacccagagctgcataagagcttggtgtggatcctagagaacgacatcacgcctgtactggaccacaccttctgcgtggaacacaacgccttcgggcggatcctgcagcatgaactgaaacccaatggcagaaatgtgccagtcacagaggagaataagaaagaatacgtccggttgtatgtaaactggaggtttatgagaggaatcgaagcccagttcttagctctgcagaaggggttcaatgagctcatccctcaacatctgctgaagccttttgaccagaaggaactggagctgatcataggcggcctggataaaatagacttgaacgactggaagtcgaacacgcggctgaagcactgtgtggccgacagcaacatcgtgcggtggttctggcaagcggtggagacgttcgatgaagaaaggagggccaggctcctgcagtttgtgactgggtccacgcgagtcccgctccaaggcttcaaggctttgcaaggttctacaggcgcggcagggccccggctgttcaccatccacctgatagacgcgaacacagacaaccttccgaaggcccatacctgctttaaccggatcgacattccaccatatgagtcctatgagaagctctacgagaagctgctgacagccgtggaggagacctgcgggtttgctgtggagtgaaaagcaaccaaaggcaacagagtctagctcatggccaccagaccaaaagcatccagcttctgtgcacctcctgcaaagctggcagaggccctggaattccagatcacctgaggggaaagggttgtctctctcctttctgttgggggagggggatgggggacttttgttggtggctcccacccatatatccctcctttaccatagtactcccacccacttccatcacccatccaataaaatgcagccaggtttagcctttggctttggtcacacaggatattctgctgtgttgcaacccatgtggtgataaggctcacagccctgagctctttacgggagcatcaactcacagttaggggactgggcgtggctgattgagggtttggaactggtggctatgccagctattccatctcaaaacagccttgaggccccttttcaatttgagcagctgctagatatcttatcagagctcagattccagatttcacatcccagcagccggttctgggtagcagatcaatttccaactggaaaataactatataatgtatgcttattggaattctgccacagcaggaagcttgagtcaaaatgtgtttcccctttgaaaggagaaggaattggagcagcttttcctggaggcccaggatatttcttttctgggtatcttggctgaaaattttgttttacatagagaaaaacgatcttttaagggtcccttttgctgcattatctgtccagtttgacttttttttcagtgaaaacaccatgtcatggagtgtaggaaagagcagaccaaaatcagccctagagccaaccagtcagtcccaaagctgtgacctctgtgccactgttgtccatagaagagcatcgactgtgtcacttaaaatattagtaaaccatgatgcagcaactgctaagagctaaactaacaaaattgtgtcatcatagctgctggcttggtgtgaactcgcttaaaagcaatggtgaaaggataacctcgatgatgtaaatccacccaaagatactgttctacaaaaagtagggtgtggacgcaaacctgtgacagcagagggggacgacttcacactcactgcctcatgtggcccctttcccagtggcagctggtgacactaacgattgctactcggttcacttgcccagatgtcttcatatgatgagcaaggccagaagcaaggctagattcgaagtttctgacaccatttccagtttgcacaaaagtcagtattttatcttaaagtggcttgatttccaatagctgaacttgggcagaaaacagcaggccaatgttcctatgtggtttctttgttgttgtttttgtttggggtgggggcaagtacagggtaattcatgagcaagacatttcactgctgtcgaagtctctgggatcccgctgtgggtctgagatggcctgggaaggaccttgtggacaatggttttatctgttctttttgtcactgttaatttctgggctgctgaggttctagaatagaagggctgccaaatgaggtttgctgcaggaggaaagtttaatcccccattccaaaagtccaggccaaatggtgggcttagcctctttgaaaagttctgccttgcccccacaggtgggcacatcctgtgtctcattcaccatgatgcttcctgagggtgttctagaagcccgttccccagtggctgtatccagcctttccttgcatcatcttcctcttgaaggtgaggaagtgaaaactacagacctcccccggacagcccactctctatcacgagcctaacccgcgggaggcggaagagacatccattcgagaactgaagcggcctccgggatgaggtcagaggccccacctgattttcctggtggtggtatccaaaatcttcagtaactaggaaggaaaccagggtctcatggtttaaaagactttgaagcaggaatgttgcatttgacgcctttaaaactacctttttgctgttgggaggagtcgggggcgagccttagcagctgcaccgccatccccatgctggttggtgctgccctgcctctcgtgccgggtgttgcttcagcccagagccagagggctgggtcccgggtcctccacaggtgaccccggtggacacacgcgttcccatcctggcctccgtctctgcttttccacttctacctgcgtgtgggtttgccgccttgtcatcggttgtgtgagtgtcgcagacctttccagagctccggttcactctttccaaacaggcctccctgtcggtggcactgcactcctagaaccttcagtttctacgatggtttgtttggtccttttgaaccaccccaaagaactcaacatggcaaagcaaatggtaaaagcttcccgactgttctactttgggtccgcgcgaagcccactcacgtgtgatctgtgttgcccctctcggtggtcccaggcgatccagccatgccccctgcccctctgcccagatgcttcaggggcccggcttttcaggcttgccctcaccagcggccgtcagccgacactcagggatgtagctaacaccactccgccagtgctttcagtaggaagagctgaggctgcctgggaggcccggggcgaccggaaaagggctctctcaagttctgaaaagagaatctgccaccagatcgaatttcgacccctgagcttgttcggacgtatggtccaaattcagattaaggtggtcacccaacccgagatgtcaggaaaggccttctgcagagaaaatgtccccccacccgccatctgcagccaggtgtgtgccacacggcagccttcccgaaacatagtatggattttaaaaatgtgtttatttttgtttctcaaccactttataacgtattttttaatttattttgtaatgtcttgttttgaagtattgctgctatccttgttatccttcccactgtttttatcactgatttattttgtgaaagttgtacactaatgttctatgtcaaaatcaaaagtatttaatgaaatactagttctatttaatgtggttatggaaccagctggaaacacaaaacaaacagtgattgtacagcaggctgggcccaggaggtcaggttcattttgttacatatgcaataaactcacgacttt

SEQ ID NO: 367653 - DNA, 5341 bp, Homo sapiens
cgcgcgcgcggctcggagaggcggcggcagcggcggaagcggcgagggcggcgggcgtccggctctgaggtggtggaggcggcggaggcggcggcggaggcggcggcggctcgggactgggctcggctggaagcagcgagggtcagagcgccgcagcaagcgccgatctcccggctcgaccatccgcctgccgcccggacgcctgggccgcggagtttgtgtcccggctcggaccccggcgcccagcccggagccgtaaccttgaggcggcggcggcggggccgggccgggccgggctggggggcggtggcgctggatccgcggctgcccgatcgttggcgggagatgtcgaaccccgggacacgcaggaacggctccagcatcaagatccgtctgacagtgttatgtgccaagaaccttgcaaagaaagacttcttcaggctccctgacccttttgcaaagattgtcgtggatgggtctgggcagtgccactcaaccgacactgtgaaaaacacattggacccaaagtggaaccagcactatgatctatatgttgggaaaacggattcgataaccattagcgtgtggaaccataagaaaattcacaagaaacagggagctggcttcctgggctgtgtgcggctgctctccaatgccatcagcagattaaaagataccggataccagcgtttggatctatgcaaactaaacccctcagatactgatgcagttcgtggccagatagtggtcagtttacagacacgagacagaataggaaccggcggctcggtggtggactgcagaggactgttagaaaatgaaggaacggtgtatgaagactccgggcctgggaggccgctcagctgcttcatggaggaaccagccccttacacagatagcaccggtgctgctgctggaggagggaattgcaggttcgtggagtccccaagtcaagatcaaagacttcaggcacagcggcttcgaaaccctgatgtgcgaggttcactacagacgccccagaaccgaccacacggccaccagtccccggaactgcccgaaggctacgaacaaagaacaacagtccagggccaagtttactttttgcatacacagactggagttagcacgtggcacgaccccaggataccaagagaccttaacagtgtgaactgtgatgaacttggaccactgccgccaggctgggaagtcagaagtacagtttctgggaggatatattttgtagatcataataaccgaacaacccagtttacagacccaaggttacaccacatcatgaatcaccagtgccaactcaaggagcccagccagccgctgccactgcccagtgagggctctctggaggacgaggagcttcctgcccagagatacgaaagagatctagtccagaagctgaaagtcctcagacacgaactgtcgcttcagcagccccaagctggtcattgccgcatcgaagtgtccagagaagaaatctttgaggagtcttaccgccagataatgaagatgcgaccgaaagacttgaaaaaacggctgatggtgaaattccgtggggaagaaggtttggattacggtggtgtggccagggagtggctttacttgctgtgccatgaaatgctgaatccttattacgggctcttccagtattctacggacaatatttacatgttgcaaataaatccggattcttcaatcaaccccgaccacttgtcttatttccactttgtggggcggatcatggggctggctgtgttccatggacactacatcaacgggggcttcacagtgcccttctacaagcagctgctggggaagcccatccagctctcagatctggaatctgtggacccagagctgcataagagcttggtgtggatcctagagaacgacatcacgcctgtactggaccacaccttctgcgtggaacacaacgccttcgggcggatcctgcagcatgaactgaaacccaatggcagaaatgtgccagtcacagaggagaataagaaagaatacgtccggttgtatgtaaactggaggtttatgagaggaatcgaagcccagttcttagctctgcagaaggggttcaatgagctcatccctcaacatctgctgaagccttttgaccagaaggaactggagctgatcataggcggcctggataaaatagacttgaacgactggaagtcgaacacgcggctgaagcactgtgtggccgacagcaacatcgtgcggtggttctggcaagcggtggagacgttcgatgaagaaaggagggccaggctcctgcagtttgtgactgggtccacgcgagtcccgctccaaggcttcaaggctttgcaaggttctacaggcgcggcagggccccggctgttcaccatccacctgatagacgcgaacacagacaaccttccgaaggcccatacctgctttaaccggatcgacattccaccatatgagtcctatgagaagctctacgagaagctgctgacagccgtggaggagacctgcgggtttgctgtggagtgaaaagcaaccaaaggcaacagagtctagctcatggccaccagaccaaaagcatccagcttctgtgcacctcctgcaaagctggcagaggccctggaattccagatcacctgaggggaaagggttgtctctctcctttctgttgggggagggggatgggggacttttgttggtggctcccacccatatatccctcctttaccatagtactcccacccacttccatcacccatccaataaaatgcagccaggtttagcctttggctttggtcacacaggatattctgctgtgttgcaacccatgtggtgataaggctcacagccctgagctctttacgggagcatcaactcacagttaggggactgggcgtggctgattgagggtttggaactggtggctatgccagctattccatctcaaaacagccttgaggccccttttcaatttgagcagctgctagatatcttatcagagctcagattccagatttcacatcccagcagccggttctgggtagcagatcaatttccaactggaaaataactatataatgtatgcttattggaattctgccacagcaggaagcttgagtcaaaatgtgtttcccctttgaaaggagaaggaattggagcagcttttcctggaggcccaggatatttcttttctgggtatcttggctgaaaattttgttttacatagagaaaaacgatcttttaagggtcccttttgctgcattatctgtccagtttgacttttttttcagtgaaaacaccatgtcatggagtgtaggaaagagcagaccaaaatcagccctagagccaaccagtcagtcccaaagctgtgacctctgtgccactgttgtccatagaagagcatcgactgtgtcacttaaaatattagtaaaccatgatgcagcaactgctaagagctaaactaacaaaattgtgtcatcatagctgctggcttggtgtgaactcgcttaaaagcaatggtgaaaggataacctcgatgatgtaaatccacccaaagatactgttctacaaaaagtagggtgtggacgcaaacctgtgacagcagagggggacgacttcacactcactgcctcatgtggcccctttcccagtggcagctggtgacactaacgattgctactcggttcacttgcccagatgtcttcatatgatgagcaaggccagaagcaaggctagattcgaagtttctgacaccatttccagtttgcacaaaagtcagtattttatcttaaagtggcttgatttccaatagctgaacttgggcagaaaacagcaggccaatgttcctatgtggtttctttgttgttgtttttgtttggggtgggggcaagtacagggtaattcatgagcaagacatttcactgctgtcgaagtctctgggatcccgctgtgggtctgagatggcctgggaaggaccttgtggacaatggttttatctgttctttttgtcactgttaatttctgggctgctgaggttctagaatagaagggctgccaaatgaggtttgctgcaggaggaaagtttaatcccccattccaaaagtccaggccaaatggtgggcttagcctctttgaaaagttctgccttgcccccacaggtgggcacatcctgtgtctcattcaccatgatgcttcctgagggtgttctagaagcccgttccccagtggctgtatccagcctttccttgcatcatcttcctcttgaaggtgaggaagtgaaaactacagacctcccccggacagcccactctctatcacgagcctaacccgcgggaggcggaagagacatccattcgagaactgaagcggcctccgggatgaggtcagaggccccacctgattttcctggtggtggtatccaaaatcttcagtaactaggaaggaaaccagggtctcatggtttaaaagactttgaagcaggaatgttgcatttgacgcctttaaaactacctttttgctgttgggaggagtcgggggcgagccttagcagctgcaccgccatccccatgctggttggtgctgccctgcctctcgtgccgggtgttgcttcagcccagagccagagggctgggtcccgggcgatccagccatgccccctgcccctctgcccagatgcttcaggggcccggcttttcaggcttgccctcaccagcggccgtcagccgacactcagggatgtagctaacaccactccgccagtgctttcagtaggaagagctgaggctgcctgggaggcccggggcgaccggaaaagggctctctcaagttctgaaaagagaatctgccaccagatcgaatttcgacccctgagcttgttcggacgtatggtccaaattcagattaaggtggtcacccaacccgagatgtcaggaaaggccttctgcagagaaaatgtccccccacccgccatctgcagccaggtgtgtgccacacggcagccttcccgaaacatagtatggattttaaaaatgtgtttatttttgtttctcaaccactttataacgtattttttaatttattttgtaatgtcttgttttgaagtattgctgctatccttgttatccttcccactgtttttatcactgatttattttgtgaaagttgtacactaatgttctatgtcaaaatcaaaagtatttaatgaaatactagttctatttaatgtggttatggaaccagctggaaacacaaaacaaacagtgattgtacagcaggctgggcccaggaggtcaggttcattttgttacatatgcaataaactcacgacttt

SEQ ID NO: 367654 - DNA, 3393 bp, Homo sapiens
tgttgtttttttttgagatggagtctctgccaaaatatttttgtcatcatcagaactcaaaagccacagcactcactgcctgtccttggccttgaggttggtcctagggctggactgcccacacggtgactctcttttgtcctttttcagctttaaccggatcgacattccaccatatgagtcctatgagaagctctacgagaagctgctgacagccgtggaggagacctgcgggtttgctgtggagtgaaaagcaaccaaaggcaacagagtctagctcatggccaccagaccaaaagcatccagcttctgtgcacctcctgcaaagctggcagaggccctggaattccagatcacctgaggggaaagggttgtctctctcctttctgttgggggagggggatgggggacttttgttggtggctcccacccatatatccctcctttaccatagtactcccacccacttccatcacccatccaataaaatgcagccaggtttagcctttggctttggtcacacaggatattctgctgtgttgcaacccatgtggtgataaggctcacagccctgagctctttacgggagcatcaactcacagttaggggactgggcgtggctgattgagggtttggaactggtggctatgccagctattccatctcaaaacagccttgaggccccttttcaatttgagcagctgctagatatcttatcagagctcagattccagatttcacatcccagcagccggttctgggtagcagatcaatttccaactggaaaataactatataatgtatgcttattggaattctgccacagcaggaagcttgagtcaaaatgtgtttcccctttgaaaggagaaggaattggagcagcttttcctggaggcccaggatatttcttttctgggtatcttggctgaaaattttgttttacatagagaaaaacgatcttttaagggtcccttttgctgcattatctgtccagtttgacttttttttcagtgaaaacaccatgtcatggagtgtaggaaagagcagaccaaaatcagccctagagccaaccagtcagtcccaaagctgtgacctctgtgccactgttgtccatagaagagcatcgactgtgtcacttaaaatattagtaaaccatgatgcagcaactgctaagagctaaactaacaaaattgtgtcatcatagctgctggcttggtgtgaactcgcttaaaagcaatggtgaaaggataacctcgatgatgtaaatccacccaaagatactgttctacaaaaagtagggtgtggacgcaaacctgtgacagcagagggggacgacttcacactcactgcctcatgtggcccctttcccagtggcagctggtgacactaacgattgctactcggttcacttgcccagatgtcttcatatgatgagcaaggccagaagcaaggctagattcgaagtttctgacaccatttccagtttgcacaaaagtcagtattttatcttaaagtggcttgatttccaatagctgaacttgggcagaaaacagcaggccaatgttcctatgtggtttctttgttgttgtttttgtttggggtgggggcaagtacagggtaattcatgagcaagacatttcactgctgtcgaagtctctgggatcccgctgtgggtctgagatggcctgggaaggaccttgtggacaatggttttatctgttctttttgtcactgttaatttctgggctgctgaggttctagaatagaagggctgccaaatgaggtttgctgcaggaggaaagtttaatcccccattccaaaagtccaggccaaatggtgggcttagcctctttgaaaagttctgccttgcccccacaggtgggcacatcctgtgtctcattcaccatgatgcttcctgagggtgttctagaagcccgttccccagtggctgtatccagcctttccttgcatcatcttcctcttgaaggtgaggaagtgaaaactacagacctcccccggacagcccactctctatcacgagcctaacccgcgggaggcggaagagacatccattcgagaactgaagcggcctccgggatgaggtcagaggccccacctgattttcctggtggtggtatccaaaatcttcagtaactaggaaggaaaccagggtctcatggtttaaaagactttgaagcaggaatgttgcatttgacgcctttaaaactacctttttgctgttgggaggagtcgggggcgagccttagcagctgcaccgccatccccatgctggttggtgctgccctgcctctcgtgccgggtgttgcttcagcccagagccagagggctgggtcccgggtcctccacaggtgaccccggtggacacacgcgttcccatcctggcctccgtctctgcttttccacttctacctgcgtgtgggtttgccgccttgtcatcggttgtgtgagtgtcgcagacctttccagagctccggttcactctttccaaacaggcctccctgtcggtggcactgcactcctagaaccttcagtttctacgatggtttgtttggtccttttgaaccaccccaaagaactcaacatggcaaagcaaatggtaaaagcttcccgactgttctactttgggtccgcgcgaagcccactcacgtgtgatctgtgttgcccctctcggtggtcccaggcgatccagccatgccccctgcccctctgcccagatgcttcaggggcccggcttttcaggcttgccctcaccagcggccgtcagccgacactcagggatgtagctaacaccactccgccagtgctttcagtaggaagagctgaggctgcctgggaggcccggggcgaccggaaaagggctctctcaagttctgaaaagagaatctgccaccagatcgaatttcgacccctgagcttgttcggacgtatggtccaaattcagattaaggtggtcacccaacccgagatgtcaggaaaggccttctgcagagaaaatgtccccccacccgccatctgcagccaggtgtgtgccacacggcagccttcccgaaacatagtatggattttaaaaatgtgtttatttttgtttctcaaccactttataacgtattttttaatttattttgtaatgtcttgttttgaagtattgctgctatccttgttatccttcccactgtttttatcactgatttattttgtgaaagttgtacactaatgttctatgtcaaaatcaaaagtatttaatgaaatactagttctatttaatgtggttatggaaccagctggaaacacaaaacaaacagtgattgtacagcaggctgggcccaggaggtcaggttcattttgttacatatgcaataaactcacgacttt

SEQ ID NO: 367655 - DNA, 4041 bp, Homo sapiens
cgcgcgcgcggctcggagaggcggcggcagcggcggaagcggcgagggcggcgggcgtccggctctgaggtggtggaggcggcggaggcggcggcggaggcggcggcggctcgggactgggctcggctggaagcagcgagggtcagagcgccgcagcaagcgccgatctcccggctcgaccatccgcctgccgcccggacgcctgggccgcggagtttgtgtcccggctcggaccccggcgcccagcccggagccgtaaccttgaggcggcggcggcggggccgggccgggccgggctggggggcggtggcgctggatccgcggctgcccgatcgttggcgggagatgtcgaaccccgggacacgcaggaacggctccagcatcaagatccgtctgacagaacttgttaggtttttccatttgttcaaccctcgggcggatcacgaggtcaagagtcggaggttgcagtgagctgagatcgcgccactgcactccagcctggtgacacagcaggactccatctcaaaaataaataaatatcaattaataaataaaaagtctacttaaagaaataattcaagtgttatgtgccaagaaccttgcaaagaaagacttcttcaggctccctgacccttttgcaaagattgtcgtggatgggtctgggcagtgccactcaaccgacactgtgaaaaacacattggacccaaagtggaaccagcactatgatctatatgttgggaaaacggattcgataaccattagcgtgtggaaccataagaaaattcacaagaaacagggagctggcttcctgggctgtgtgcggctgctctccaatgccatcagcagattaaaagataccggataccagcgtttggatctatgcaaactaaacccctcagatactgatgcagttcgtggccagatagtggtcagtttacagacacgagacagaataggaaccggcggctcggtggtggactgcagaggactgttagaaaatgaaggaacggtgtatgaagactccgggcctgggaggccgctcagctgcttcatggaggaaccagccccttacacagatagcaccggtgctcctttaccatagtactcccacccacttccatcacccatccaataaaatgcagccaggtttagcctttggctttggtcacacaggatattctgctgtgttgcaacccatgtggtgataaggctcacagccctgagctctttacgggagcatcaactcacagttaggggactgggcgtggctgattgagggtttggaactggtggctatgccagctattccatctcaaaacagccttgaggccccttttcaatttgagcagctgctagatatcttatcagagctcagattccagatttcacatcccagcagccggttctgggtagcagatcaatttccaactggaaaataactatataatgtatgcttattggaattctgccacagcaggaagcttgagtcaaaatgtgtttcccctttgaaaggagaaggaattggagcagcttttcctggaggcccaggatatttcttttctgggtatcttggctgaaaattttgttttacatagagaaaaacgatcttttaagggtcccttttgctgcattatctgtccagtttgacttttttttcagtgaaaacaccatgtcatggagtgtaggaaagagcagaccaaaatcagccctagagccaaccagtcagtcccaaagctgtgacctctgtgccactgttgtccatagaagagcatcgactgtgtcacttaaaatattagtaaaccatgatgcagcaactgctaagagctaaactaacaaaattgtgtcatcatagctgctggcttggtgtgaactcgcttaaaagcaatggtgaaaggataacctcgatgatgtaaatccacccaaagatactgttctacaaaaagtagggtgtggacgcaaacctgtgacagcagagggggacgacttcacactcactgcctcatgtggcccctttcccagtggcagctggtgacactaacgattgctactcggttcacttgcccagatgtcttcatatgatgagcaaggccagaagcaaggctagattcgaagtttctgacaccatttccagtttgcacaaaagtcagtattttatcttaaagtggcttgatttccaatagctgaacttgggcagaaaacagcaggccaatgttcctatgtggtttctttgttgttgtttttgtttggggtgggggcaagtacagggtaattcatgagcaagacatttcactgctgtcgaagtctctgggatcccgctgtgggtctgagatggcctgggaaggaccttgtggacaatggttttatctgttctttttgtcactgttaatttctgggctgctgaggttctagaatagaagggctgccaaatgaggtttgctgcaggaggaaagtttaatcccccattccaaaagtccaggccaaatggtgggcttagcctctttgaaaagttctgccttgcccccacaggtgggcacatcctgtgtctcattcaccatgatgcttcctgagggtgttctagaagcccgttccccagtggctgtatccagcctttccttgcatcatcttcctcttgaaggtgaggaagtgaaaactacagacctcccccggacagcccactctctatcacgagcctaacccgcgggaggcggaagagacatccattcgagaactgaagcggcctccgggatgaggtcagaggccccacctgattttcctggtggtggtatccaaaatcttcagtaactaggaaggaaaccagggtctcatggtttaaaagactttgaagcaggaatgttgcatttgacgcctttaaaactacctttttgctgttgggaggagtcgggggcgagccttagcagctgcaccgccatccccatgctggttggtgctgccctgcctctcgtgccgggtgttgcttcagcccagagccagagggctgggtcccgggtcctccacaggtgaccccggtggacacacgcgttcccatcctggcctccgtctctgcttttccacttctacctgcgtgtgggtttgccgccttgtcatcggttgtgtgagtgtcgcagacctttccagagctccggttcactctttccaaacaggcctccctgtcggtggcactgcactcctagaaccttcagtttctacgatggtttgtttggtccttttgaaccaccccaaagaactcaacatggcaaagcaaatggtaaaagcttcccgactgttctactttgggtccgcgcgaagcccactcacgtgtgatctgtgttgcccctctcggtggtcccaggcgatccagccatgccccctgcccctctgcccagatgcttcaggggcccggcttttcaggcttgccctcaccagcggccgtcagccgacactcagggatgtagctaacaccactccgccagtgctttcagtaggaagagctgaggctgcctgggaggcccggggcgaccggaaaagggctctctcaagttctgaaaagagaatctgccaccagatcgaatttcgacccctgagcttgttcggacgtatggtccaaattcagattaaggtggtcacccaacccgagatgtcaggaaaggccttctgcagagaaaatgtccccccacccgccatctgcagccaggtgtgtgccacacggcagccttcccgaaacatagtatggattttaaaaatgtgtttatttttgtttctcaaccactttataacgtattttttaatttattttgtaatgtcttgttttgaagtattgctgctatccttgttatccttcccactgtttttatcactgatttattttgtgaaagttgtacactaatgttctatgtcaaaatcaaaagtatttaatgaaatactagttctatttaatgtggttatggaaccagctggaaacacaaaacaaacagtgattgtacagcaggctgggcccaggaggtcaggttcattttgttacatatgcaataaactcacgacttt

SEQ ID NO: 367656 - DNA, 3109 bp, Homo sapiens
  misc_feature (123)..(123): n is a, c, g, or t
atagtgttgtgacggtcatcaacctgccaggctagtcacatcttcgtgtctagcacgtgcgctcgtagggttcgatgacatcgaaacctgtgtatcagccctcaaaataggaatctagactgngtttagggtttgatgaagggtttgatgacggtcatcctttaccatagtactcccacccacttccatcacccatccaataaaatgcagccaggtttagcctttggctttggtcacacaggatattctgctgtgttgcaacccatgtggtgataaggctcacagccctgagctctttacgggagcatcaactcacagttaggggactgggcgtggctgattgagggtttggaactggtggctatgccagctattccatctcaaaacagccttgaggccccttttcaatttgagcagctgctagatatcttatcagagctcagattccagatttcacatcccagcagccggttctgggtagcagatcaatttccaactggaaaataactatataatgtatgcttattggaattctgccacagcaggaagcttgagtcaaaatgtgtttcccctttgaaaggagaaggaattggagcagcttttcctggaggcccaggatatttcttttctgggtatcttggctgaaaattttgttttacatagagaaaaacgatcttttaagggtcccttttgctgcattatctgtccagtttgacttttttttcagtgaaaacaccatgtcatggagtgtaggaaagagcagaccaaaatcagccctagagccaaccagtcagtcccaaagctgtgacctctgtgccactgttgtccatagaagagcatcgactgtgtcacttaaaatattagtaaaccatgatgcagcaactgctaagagctaaactaacaaaattgtgtcatcatagctgctggcttggtgtgaactcgcttaaaagcaatggtgaaaggataacctcgatgatgtaaatccacccaaagatactgttctacaaaaagtagggtgtggacgcaaacctgtgacagcagagggggacgacttcacactcactgcctcatgtggcccctttcccagtggcagctggtgacactaacgattgctactcggttcacttgcccagatgtcttcatatgatgagcaaggccagaagcaaggctagattcgaagtttctgacaccatttccagtttgcacaaaagtcagtattttatcttaaagtggcttgatttccaatagctgaacttgggcagaaaacagcaggccaatgttcctatgtggtttctttgttgttgtttttgtttggggtgggggcaagtacagggtaattcatgagcaagacatttcactgctgtcgaagtctctgggatcccgctgtgggtctgagatggcctgggaaggaccttgtggacaatggttttatctgttctttttgtcactgttaatttctgggctgctgaggttctagaatagaagggctgccaaatgaggtttgctgcaggaggaaagtttaatcccccattccaaaagtccaggccaaatggtgggcttagcctctttgaaaagttctgccttgcccccacaggtgggcacatcctgtgtctcattcaccatgatgcttcctgagggtgttctagaagcccgttccccagtggctgtatccagcctttccttgcatcatcttcctcttgaaggtgaggaagtgaaaactacagacctcccccggacagcccactctctatcacgagcctaacccgcgggaggcggaagagacatccattcgagaactgaagcggcctccgggatgaggtcagaggccccacctgattttcctggtggtggtatccaaaatcttcagtaactaggaaggaaaccagggtctcatggtttaaaagactttgaagcaggaatgttgcatttgacgcctttaaaactacctttttgctgttgggaggagtcgggggcgagccttagcagctgcaccgccatccccatgctggttggtgctgccctgcctctcgtgccgggtgttgcttcagcccagagccagagggctgggtcccgggtcctccacaggtgaccccggtggacacacgcgttcccatcctggcctccgtctctgcttttccacttctacctgcgtgtgggtttgccgccttgtcatcggttgtgtgagtgtcgcagacctttccagagctccggttcactctttccaaacaggcctccctgtcggtggcactgcactcctagaaccttcagtttctacgatggtttgtttggtccttttgaaccaccccaaagaactcaacatggcaaagcaaatggtaaaagcttcccgactgttctactttgggtccgcgcgaagcccactcacgtgtgatctgtgttgcccctctcggtggtcccaggcgatccagccatgccccctgcccctctgcccagatgcttcaggggcccggcttttcaggcttgccctcaccagcggccgtcagccgacactcagggatgtagctaacaccactccgccagtgctttcagtaggaagagctgaggctgcctgggaggcccggggcgaccggaaaagggctctctcaagttctgaaaagagaatctgccaccagatcgaatttcgacccctgagcttgttcggacgtatggtccaaattcagattaaggtggtcacccaacccgagatgtcaggaaaggccttctgcagagaaaatgtccccccacccgccatctgcagccaggtgtgtgccacacggcagccttcccgaaacatagtatggattttaaaaatgtgtttatttttgtttctcaaccactttataacgtattttttaatttattttgtaatgtcttgttttgaagtattgctgctatccttgttatccttcccactgtttttatcactgatttattttgtgaaagttgtacactaatgttctatgtcaaaatcaaaagtatttaatgaaatactagttctatttaatgtggttatggaaccagctggaaacacaaaacaaacagtgattgtacagcaggctgggcccaggaggtcaggttcattttgttacatatgcaataaactcacgacttt

SEQ ID NO: 367657 - DNA, 2574 bp, Homo sapiens
cgcgcgcgcggctcggagaggcggcggcagcggcggaagcggcgagggcggcgggcgtccggctctgaggtggtggaggcggcggaggcggcggcggaggcggcggcggctcgggactgggctcggctggaagcagcgagggtcagagcgccgcagcaagcgccgatctcccggctcgaccatccgcctgccgcccggacgcctgggccgcggagtttgtgtcccggctcggaccccggcgcccagcccggagccgtaaccttgaggcggcggcggcggggccgggccgggccgggctggggggcggtggcgctggatccgcggctgcccgatcgttggcgggagatgtcgaaccccgggacacgcaggaacggctccagcatcaagatccgtctgacagaacttgttaggtttttccatttgttcaaccctcgggcggatcacgaggtcaagagtcggaggttgcagtgagctgagatcgcgccactgcactccagcctggtgacacagcaggactccatctcaaaaataaataaatatcaattaataaataaaaagtctacttaaagaaataattcaagtgttatgtgccaagaaccttgcaaagaaagacttcttcaggctccctgacccttttgcaaagattgtcgtggatgggtctgggcagtgccactcaaccgacactgtgaaaaacacattggacccaaagtggaaccagcactatgatctatatgttgggaaaacggattcgataaccattagcgtgtggaaccataagaaaattcacaagaaacagggagctggcttcctgggctgtgtgcggctgctctccaatgccatcagcagattaaaagataccggataccagcgtttggatctatgcaaactaaacccctcagatactgatgcagttcgtggccagatagtggtcagtttacagacacgagacagaataggaaccggcggctcggtggtggactgcagaggactgttagaaaatgaaggaacggtgtatgaagactccgggcctgggaggccgctcagctgcttcatggaggaaccagccccttacacagatagcaccggtgctgctgctggaggagggaattgcaggttcgtggagtccccaagtcaagatcaaagacttcaggcacagcggcttcgaaaccctgatgtgcgaggttcactacagacgccccagaaccgaccacacggccaccagtccccggaactgcccgaaggctacgaacaaagaacaacagtccagggccaagtttactttttgcatacacagactggagttagcacgtggcacgaccccaggataccaagagaccttaacagtgtgaactgtgatgaacttggaccactgccgccaggctgggaagtcagaagtacagtttctgggaggatatattttgtagatcataataaccgaacaacccagtttacagacccaaggttacaccacatcatgaatcaccagtgccaactcaaggagcccagccagccgctgccactgcccagtgagggctctctggaggacgaggagcttcctgcccagagatacgaaagagatctagtccagaagctgaaagtcctcagacacgaactgtcgcttcagcagccccaagctggtcattgccgcatcgaagtgtccagagaagaaatctttgaggagtcttaccgccagataatgaagatgcgaccgaaagacttgaaaaaacggctgatggtgaaattccgtggggaagaaggtttggattacggtggtgtggccagggagtggctttacttgctgtgccatgaaatgctgaatccttattacgggctcttccagtattctacggacaatatttacatgttgcaaataaatccggattcttcaatcaaccccgaccacttgtcttatttccactttgtggggcggatcatggggctggctgtgttccatggacactacatcaacgggggcttcacagtgcccttctacaagcagctgctggggaagcccatccagctctcagatctggaatctgtggacccagagctgcataagagcttggtgtggatcctagagaacgacatcacgcctgtactggaccacaccttctgcgtggaacacaacgccttcgggcggatcctgcagcatgaactgaaacccaatggcagaaatgtgccagtcacagaggagaataagaaagaatacgtccggttgtatgtaaactggaggtttatgagaggaatcgaagcccagttcttagctctgcagaaggggttcaatgagctcatccctcaacatctgctgaagccttttgaccagaaggaactggagctgatcataggcggcctggataaaatagacttgaacgactggaagtcgaacacgcggctgaagcactgtgtggccgacagcaacatcgtgcggtggttctggcaagcggtggagacgttcgatgaagaaaggagggccaggctcctgcagtttgtgactgggtccacgcgagtcccgctccaaggcttcaaggctttgcaaggttctacagccggggccctgccgcgcctggtcgacgc

SEQ ID NO: 367658 - DNA, 2560 bp, Homo sapiens
cgcgcgcgcggctcggagaggcggcggcagcggcggaagcggcgagggcggcgggcgtccggctctgaggtggtggaggcggcggaggcggcggcggaggcggcggcggctcgggactgggctcggctggaagcagcgagggtcagagcgccgcagcaagcgccgatctcccggctcgaccatccgcctgccgcccggacgcctgggccgcggagtttgtgtcccggctcggaccccggcgcccagcccggagccgtaaccttgaggcggcggcggcggggccgggccgggccgggctggggggcggtggcgctggatccgcggctgcccgatcgttggcgggagatgtcgaaccccgggacacgcaggaacggctccagcatcaagatccgtctgacagaacttgttaggtttttccatttgttcaaccctcgggcggatcacgaggtcaagagtcggaggttgcagtgagctgagatcgcgccactgcactccagcctggtgacacagcaggactccatctcaaaaataaataaatatcaattaataaataaaaagtctacttaaagaaataattcaagtgttatgtgccaagaaccttgcaaagaaagacttcttcaggctccctgacccttttgcaaagattgtcgtggatgggtctgggcagtgccactcaaccgacactgtgaaaaacacattggacccaaagtggaaccagcactatgatctatatgttgggaaaacggattcgataaccattagcgtgtggaaccataagaaaattcacaagaaacagggagctggcttcctgggctgtgtgcggctgctctccaatgccatcagcagattaaaagataccggataccagcgtttggatctatgcaaactaaacccctcagatactgatgcagttcgtggccagatagtggtcagtttacagacacgagacagaataggaaccggcggctcggtggtggactgcagaggactgttagaaaatgaaggaacggtgtatgaagactccgggcctgggaggccgctcagctgcttcatggaggaaccagccccttacacagatagcaccggtgctgctgctggaggagggaattgcaggttcgtggagtccccaagtcaagatcaaagacttcaggcacagcggcttcgaaaccctgatgtgcgaggttcactacagacgccccagaaccgaccacacggccaccagtccccggaactgcccgaaggctacgaacaaagaacaacagtccagggccaagtttactttttgcatacacagactggagttagcacgtggcacgaccccaggataccaagtccctcggggaccattcctgggggagatgcagcttttctatacgaattccttctacaaggccatacatctgagcccagagaccttaacagtgtgaactgtgatgaacttggaccactgccgccaggctgggaagtcagaagtacagtttctgggaggatatattttgtagatcataataaccgaacaacccagtttacagacccaaggttacaccacatcatgaagtaagactttaaaaatattttttgctgacctctttcattggtaatcgaatgctttcttggactggtatttttgtgaatttattgactgtcttgctggttggataataagcatggtcaaaatgatgttaaatatctggcggataattgcatattttaaactcttaaattagctgtgaagagcactgaagccctatgttgttgctacccttttcttacttgcagcctacataaaatttaccgagatggcagtattaggcggctgcacgaaggaagtttccgcacgcagcgctctcatgagacacgtggcccttaggttgagaagtagagatacgtgctatccccctagtgcctgcacggtggggaactggataccttggaactgggaattatcttggatcccatatttagtgttccaggcctgtcgtgttctcagagccaaacattccacatagctctttttttttttttttttgagacagagtccagctctgtcacccaggctggagtgcagtggcacaatctctgctcactgcaccctccacctcctgggttcaagtgattctcctgcctcagcctcctgagtagctgggattacaggcgcccgccaccatgcccagctaattattgtatttttagtagagatgggattttgccatgttggccaggctggtcccaaattcctgactgcgggtgatccgcctgccttggcctcccgaagtgctgggattataggcatgagccactgcgcctgcccccgacatagctcttttaaccgacagctctgtgtctcagtggcaaaacttgaacaggacaaatgccactttgtcaccgtactaatcctactccttttactgaaattttgctctcaatgagcaggtgtagaaatctcttggcggtaaaaatgagggatggttttcattagatttcactcgagcggtctgctgttgtgcctatcatgagatttcatttgagttctccactgttacctcctttaaaatttttt

SEQ ID NO: 367659 - DNA, 2212 bp, Homo sapiens
cgcgcgcgcggctcggagaggcggcggcagcggcggaagcggcgagggcggcgggcgtccggctctgaggtggtggaggcggcggaggcggcggcggaggcggcggcggctcgggactgggctcggctggaagcagcgagggtcagagcgccgcagcaagcgccgatctcccggctcgaccatccgcctgccgcccggacgcctgggccgcggagtttgtgtcccggctcggaccccggcgcccagcccggagccgtaaccttgaggcggcggcggcggggccgggccgggccgggctggggggcggtggcgctggatccgcggctgcccgatcgttggcgggagatgtcgaaccccgggacacgcaggaacggctccagcatcaagatccgtctgacagaacttgttaggtttttccatttgttcaaccctcgggcggatcacgaggtcaagagtcggaggttgcagtgagctgagatcgcgccactgcactccagcctggtgacacagcaggactccatctcaaaaataaataaatatcaattaataaataaaaagtctacttaaagaaataattcaagtgttatgtgccaagaaccttgcaaagaaagacttcttcaggctccctgacccttttgcaaagattgtcgtggatgggtctgggcagtgccactcaaccgacactgtgaaaaacacattggacccaaagtggaaccagcactatgatctatatgttgggaaaacggattcgataaccattagcgtgtggaaccataagaaaattcacaagaaacagggagctggcttcctgggctgtgtgcggctgctctccaatgccatcagcagattaaaagataccggataccagcgtttggatctatgcaaactaaacccctcagatactgatgcagttcgtggccagatagtggtcagtttacagacacgagacagaataggaaccggcggctcggtggtggactgcagaggactgttagaaaatgaaggaacggtgtatgaagactccgggcctgggaggccgctcagctgcttcatggaggaaccagccccttacacagatagcaccggtgctgctgctggaggagggaattgcaggttcgtggagtccccaagtcaagatcaaagacttcaggcacagcggcttcgaaaccctgatgtgcgaggttcactacagacgccccagaaccgaccacacggccaccagtccccggaactgcccgaaggctacgaacaaagaacaacagtccagggccaagtttactttttgcatacacagactggagttagcacgtggcacgaccccaggataccaagagaccttaacagtgtgaactgtgatgaacttggaccactgccgccaggctgggaagtcagaagtacagtttctgggaggatatattttgtagatcataataaccgaacaacccagtttacagacccaaggttacaccacatcatgaatcaccagtgccaactcaaggagcccagccagccgctgccactgcccagtgagggctctctggaggacgaggagcttcctgcccagagatacgaaagagatctagtccagaagctgaaagtcctcagacacgaactgtcgcttcagcagccccaagctggtcattgccgcatcgaagtgtccagagaagaaatctttgaggagtcttaccgccagataatgaagatgcgaccgaaagacttgaaaaaacggctgatggtgaaattccgtggggaagaaggtttggattacggtggtgtggccagggagtggctttacttgctgtgccatgaaatgctgaatccttattacgggctcttccagtattctacggacaatatttacatgttgcaaataaatccggattcttcaatcaaccccgaccacttgtcttatttccactttgtggggcggatcatggggctggctgtgttccatggacactacatcaacgggggcttcacagtgcccttctacaagcagctgctggggaagcccatccagctctcagatctggaatctgtggacccagagctgcataagagcttggtgtggatcctgtaagtattgactgacggccggtcacctggcttagggcccaccaccacgtctatcgtatgtatgcgcgtgcgcgcgcgcgcgcgtgtgtgtgtattttggggatgtgtgtgaagccattgtattataacctgaaac

SEQ ID NO: 367660 - DNA, 404 bp, Homo sapiens
cccactttaatagaaatttgaatgtaagcctttttttttttcagtcactttcttttctaccctctaaaaatctgagtatggaggcatactaggctctcttagaaagctcaatagacataacttattttgctgattgaaattatcctgaaattagagaacacgaattgtgtgttctgtgtcacatggatggatgtgaggtctcatctaggtgtgggtctcctctctcctctagggctccctgacccttttgcaaagattgtcgtggatgggtctgggcagtgccactcaaccgacactgtgaaaaacacattggacccaaagtggaaccagcactatgatctgtgagttgaatgttctgtaagccccatgcggagcggcaggaaagcaggtgtctaccttttacg

SEQ ID NO: 367661 - DNA, 365 bp, Homo sapiens
ccaggagtttgagagcagcctgggcaacctagcgagaccctgtctctaccaaaaagcaaaaacaaattacaaatctttgtattagaagcagaaaaacacaggggacatggagaactcatcaccaaccctgccccaccccccattcctctcccctcccacatatacttctcactgcctgtccttggccttgaggttggtcctagggctggactgcccacacggtgactctcttttgtcctttttcagctttaaccggatcgacattccaccatatgagtcctatgagaagctctacgagaagctgctgacagccgtggaggagacctgcgggtttgctgtggagtgaaaagcaaccaaaggcaaca

SEQ ID NO: 367662 - DNA, 5865 bp, Homo sapiens
cgcgcgcgcggctcggagaggcggcggcagcggcggaagcggcgagggcggcgggcgtccggctctgaggtggtggaggcggcggaggcggcggcggaggcggcggcggctcgggactgggctcggctggaagcagcgagggtcagagcgccgcagcaagcgccgatctcccggctcgaccatccgcctgccgcccggacgcctgggccgcggagtttgtgtcccggctcggaccccggcgcccagcccggagccgtaaccttgaggcggcggcggcggggccgggccgggccgggctggggggcggtggcgctggatccgcggctgcccgatcgttggcgggagatgtcgaaccccgggacacgcaggaacggctccagcatcaagatccgtctgacagaacttgttaggtttttccatttgttcaaccctcgggcggatcacgaggtcaagagtcggaggttgcagtgagctgagatcgcgccactgcactccagcctggtgacacagcaggactccatctcaaaaataaataaatatcaattaataaataaaaagtctacttaaagaaataattcaagtgttatgtgccaagaaccttgcaaagaaagacttcttcaggctccctgacccttttgcaaagattgtcgtggatgggtctgggcagtgccactcaaccgacactgtgaaaaacacattggacccaaagtggaaccagcactatgatctatatgttgggaaaacggattcgataaccattagcgtgtggaaccataagaaaattcacaagaaacagggagctggcttcctgggctgtgtgcggctgctctccaatgccatcagcagattaaaagataccggataccagcgtttggatctatgcaaactaaacccctcagatactgatgcagttcgtggccagatagtggtcagtttacagacacgagacagaataggaaccggcggctcggtggtggactgcagaggactgttagaaaatgaaggaacggtgtatgaagactccgggcctgggaggccgctcagctgcttcatggaggaaccagccccttacacagatagcaccggtgctgctgctggaggagggaattgcaggttcgtggagtccccaagtcaagatcaaagacttcaggcacagcggcttcgaaaccctgatgtgcgaggttcactacagacgccccagaaccgaccacacggccaccagtccccggaactgcccgaaggctacgaacaaagaacaacagtccagggccaagtttactttttgcatacacagactggagttagcacgtggcacgaccccaggataccaagagaccttaacagtgtgaactgtgatgaacttggaccactgccgccaggctgggaagtcagaagtacagtttctgggaggatatattttgtagatcataataaccgaacaacccagtttacagacccaaggttacaccacatcatgaatcaccagtgccaactcaaggagcccagccagccgctgccactgcccagtgagggctctctggaggacgaggagcttcctgcccagagatacgaaagagatctagtccagaagctgaaagtcctcagacacgaactgtcgcttcagcagccccaagctggtcattgccgcatcgaagtgtccagagaagaaatctttgaggagtcttaccgccagataatgaagatgcgaccgaaagacttgaaaaaacggctgatggtgaaattccgtggggaagaaggtttggattacggtggtgtggccagggagtggctttacttgctgtgccatgaaatgctgaatccttattacgggctcttccagtattctacggacaatatttacatgttgcaaataaatccggattcttcaatcaaccccgaccacttgtcttatttccactttgtggggcggatcatggggctggctgtgttccatggacactacatcaacgggggcttcacagtgcccttctacaagcagctgctggggaagcccatccagctctcagatctggaatctgtggacccagagctgcataagagcttggtgtggatcctagagaacgacatcacgcctgtactggaccacaccttctgcgtggaacacaacgccttcgggcggatcctgcagcatgaactgaaacccaatggcagaaatgtgccagtcacagaggagaataagaaagaatacgtccggttgtatgtaaactggaggtttatgagaggaatcgaagcccagttcttagctctgcagaaggggttcaatgagctcatccctcaacatctgctgaagccttttgaccagaaggaactggagctgatcataggcggcctggataaaatagacttgaacgactggaagtcgaacacgcggctgaagcactgtgtggccgacagcaacatcgtgcggtggttctggcaagcggtggagacgttcgatgaagaaaggagggccaggctcctgcagtttgtgactgggtccacgcgagtcccgctccaaggcttcaaggctttgcaaggttctacaggcgcggcagggccccggctgttcaccatccacctgatagacgcgaacacagacaaccttccgaaggcccatacctgctttaaccggatcgacattccaccatatgagtcctatgagaagctctacgagaagctgctgacagccgtggaggagacctgcgggtttgctgtggagtgaaaagcaaccaaaggcaacagagtctagctcatggccaccagaccaaaagcatccagcttctgtgcacctcctgcaaagctggcagaggccctggaattccagatcacctgaggggaaagggttgtctctctcctttctgttgggggagggggatgggggacttttgttggtggctcccacccatatatccctcctttaccatagtactcccacccacttccatcacccatccaataaaatgcagccaggtttagcctttggctttggtcacacaggatattctgctgtgttgcaacccatgtggtgataaggctcacagccctgagctctttacgggagcatcaactcacagttaggggactgggcgtggctgattgagggtttggaactggtggctatgccagctattccatctcaaaacagccttgaggccccttttcaatttgagcagctgctagatatcttatcagagctcagattccagatttcacatcccagcagccggttctgggtagcagatcaatttccaactggaaaataactatataatgtatgcttattggaattctgccacagcaggaagcttgagtcaaaatgtgtttcccctttgaaaggagaaggaattggagcagcttttcctggaggcccaggatatttcttttctgggtatcttggctgaaaattttgttttacatagagaaaaacgatcttttaagggtcccttttgctgcattatctgtccagtttgacttttttttcagtgaaaacaccatgtcatggagtgtaggaaagagcagaccaaaatcagccctagagccaaccagtcagtcccaaagctgtgacctctgtgccactgttgtccatagaagagcatcgactgtgtcacttaaaatattagtaaaccatgatgcagcaactgctaagagctaaactaacaaaattgtgtcatcatagctgctggcttggtgtgaactcgcttaaaagcaatggtgaaaggataacctcgatgatgtaaatccacccaaagatactgttctacaaaaagtagggtgtggacgcaaacctgtgacagcagagggggacgacttcacactcactgcctcatgtggcccctttcccagtggcagctggtgacactaacgattgctactcggttcacttgcccagatgtcttcatatgatgagcaaggccagaagcaaggctagattcgaagtttctgacaccatttccagtttgcacaaaagtcagtattttatcttaaagtggcttgatttccaatagctgaacttgggcagaaaacagcaggccaatgttcctatgtggtttctttgttgttgtttttgtttggggtgggggcaagtacagggtaattcatgagcaagacatttcactgctgtcgaagtctctgggatcccgctgtgggtctgagatggcctgggaaggaccttgtggacaatggttttatctgttctttttgtcactgttaatttctgggctgctgaggttctagaatagaagggctgccaaatgaggtttgctgcaggaggaaagtttaatcccccattccaaaagtccaggccaaatggtgggcttagcctctttgaaaagttctgccttgcccccacaggtgggcacatcctgtgtctcattcaccatgatgcttcctgagggtgttctagaagcccgttccccagtggctgtatccagcctttccttgcatcatcttcctcttgaaggtgaggaagtgaaaactacagacctcccccggacagcccactctctatcacgagcctaacccgcgggaggcggaagagacatccattcgagaactgaagcggcctccgggatgaggtcagaggccccacctgattttcctggtggtggtatccaaaatcttcagtaactaggaaggaaaccagggtctcatggtttaaaagactttgaagcaggaatgttgcatttgacgcctttaaaactacctttttgctgttgggaggagtcgggggcgagccttagcagctgcaccgccatccccatgctggttggtgctgccctgcctctcgtgccgggtgttgcttcagcccagagccagagggctgggtcccgggtcctccacaggtgaccccggtggacacacgcgttcccatcctggcctccgtctctgcttttccacttctacctgcgtgtgggtttgccgccttgtcatcggttgtgtgagtgtcgcagacctttccagagctccggttcactctttccaaacaggcctccctgtcggtggcactgcactcctagaaccttcagtttctacgatggtttgtttggtccttttgaaccaccccaaagaactcaacatggcaaagcaaatggtaaaagcttcccgactgttctactttgggtccgcgcgaagcccactcacgtgtgatctgtgttgcccctctcggtggtcccaggcgatccagccatgccccctgcccctctgcccagatgcttcaggggcccggcttttcaggcttgccctcaccagcggccgtcagccgacactcagggatgtagctaacaccactccgccagtgctttcagtaggaagagctgaggctgcctgggaggcccggggcgaccggaaaagggctctctcaagttctgaaaagagaatctgccaccagatcgaatttcgacccctgagcttgttcggacgtatggtccaaattcagattaaggtggtcacccaacccgagatgtcaggaaaggccttctgcagagaaaatgtccccccacccgccatctgcagccaggtgtgtgccacacggcagccttcccgaaacatagtatggattttaaaaatgtgtttatttttgtttctcaaccactttataacgtattttttaatttattttgtaatgtcttgttttgaagtattgctgctatccttgttatccttcccactgtttttatcactgatttattttgtgaaagttgtacactaatgttctatgtcaaaatcaaaagtatttaatgaaatactagttctatttaatgtggttatggaaccagctggaaacacaaaacaaacagtgattgtacagcaggctgggcccaggaggtcaggttcattttgttacatatgcaataaactcacgacttt

SEQ ID NO: 367663 - DNA, 4487 bp, Homo sapiens
ttgaggcagatctgtgttcaggcctaggcacttgcggcctaggcacttgcagctgagactatgtgggcacgtctgtgtgccacgctgtcctgtgctgtactttcaaatgtacttttacacatttaaacaatttttaaatttttacatggtcttgctatgttgccaggctggtctcgaacccctggcctcaagcaatcctcttgcttccgcctcccaaggggctggcattgcaggcgtgagccgccatgcctggccagaacatgctttcacattgcagcaattgatgtgacagatcaggttcaatcctcctgttttcgcgagcaaatcggaatgaatcagggcacgtgctgagtcatttttaacgtgatgccaaggtttggtactactagctggtggtgtgtttgtctgtcttggagagatccggggagtggggggctcagtgtgttcccatgtttgtcagactgtgatatcagaacctgctcacaggtcgggcgcagtggctcatgcctgtaatcccaacactttgggagaccgaggcgggcggatcacctgaggtcaggagctcgagaccagccatggccaacatggtgaaaccccatctccactaaaaatacaaaaattagccaggtgtggtggtgggtgcctgtaatcctagctactggggagggtgaggcagaagaattgcttgaacccaggaggctgaggttgcagtgagccgagattgagccattgcactccagcctgggtgacagagtgagaccctgtctccaaaaaaaacctgcccatggcggaaaatccacttggtgttgcatccaacttgcgagtttttcttccaggttgtatgtaaactggaggtttatgagaggaatcgaagcccagttcttagctctgcagaaggggttcaatgagctcatccctcaacatctgctgaagccttttgaccagaaggaactggagctgatcataggcggcctggataaaatagacttgaacgactggaagtcgaacacgcggctgaagcactgtgtggccgacagcaacatcgtgcggtggttctggcaagcggtggagacgttcgatgaagaaaggagggccaggctcctgcagtttgtgactgggtccacgcgagtcccgctccaaggcttcaaggctttgcaaggttctacaggcgcggcagggccccggctgttcaccatccacctgatagacgcgaacacagacaaccttccgaaggcccatacctgctttaaccggatcgacattccaccatatgagtcctatgagaagctctacgagaagctgctgacagccgtggaggagacctgcgggtttgctgtggagtgaaaagcaaccaaaggcaacagagtctagctcatggccaccagaccaaaagcatccagcttctgtgcacctcctgcaaagctggcagaggccctggaattccagatcacctgaggggaaagggttgtctctctcctttctgttgggggagggggatgggggacttttgttggtggctcccacccatatatccctcctttaccatagtactcccacccacttccatcacccatccaataaaatgcagccaggtttagcctttggctttggtcacacaggatattctgctgtgttgcaacccatgtggtgataaggctcacagccctgagctctttacgggagcatcaactcacagttaggggactgggcgtggctgattgagggtttggaactggtggctatgccagctattccatctcaaaacagccttgaggccccttttcaatttgagcagctgctagatatcttatcagagctcagattccagatttcacatcccagcagccggttctgggtagcagatcaatttccaactggaaaataactatataatgtatgcttattggaattctgccacagcaggaagcttgagtcaaaatgtgtttcccctttgaaaggagaaggaattggagcagcttttcctggaggcccaggatatttcttttctgggtatcttggctgaaaattttgttttacatagagaaaaacgatcttttaagggtcccttttgctgcattatctgtccagtttgacttttttttcagtgaaaacaccatgtcatggagtgtaggaaagagcagaccaaaatcagccctagagccaaccagtcagtcccaaagctgtgacctctgtgccactgttgtccatagaagagcatcgactgtgtcacttaaaatattagtaaaccatgatgcagcaactgctaagagctaaactaacaaaattgtgtcatcatagctgctggcttggtgtgaactcgcttaaaagcaatggtgaaaggataacctcgatgatgtaaatccacccaaagatactgttctacaaaaagtagggtgtggacgcaaacctgtgacagcagagggggacgacttcacactcactgcctcatgtggcccctttcccagtggcagctggtgacactaacgattgctactcggttcacttgcccagatgtcttcatatgatgagcaaggccagaagcaaggctagattcgaagtttctgacaccatttccagtttgcacaaaagtcagtattttatcttaaagtggcttgatttccaatagctgaacttgggcagaaaacagcaggccaatgttcctatgtggtttctttgttgttgtttttgtttggggtgggggcaagtacagggtaattcatgagcaagacatttcactgctgtcgaagtctctgggatcccgctgtgggtctgagatggcctgggaaggaccttgtggacaatggttttatctgttctttttgtcactgttaatttctgggctgctgaggttctagaatagaagggctgccaaatgaggtttgctgcaggaggaaagtttaatcccccattccaaaagtccaggccaaatggtgggcttagcctctttgaaaagttctgccttgcccccacaggtgggcacatcctgtgtctcattcaccatgatgcttcctgagggtgttctagaagcccgttccccagtggctgtatccagcctttccttgcatcatcttcctcttgaaggtgaggaagtgaaaactacagacctcccccggacagcccactctctatcacgagcctaacccgcgggaggcggaagagacatccattcgagaactgaagcggcctccgggatgaggtcagaggccccacctgattttcctggtggtggtatccaaaatcttcagtaactaggaaggaaaccagggtctcatggtttaaaagactttgaagcaggaatgttgcatttgacgcctttaaaactacctttttgctgttgggaggagtcgggggcgagccttagcagctgcaccgccatccccatgctggttggtgctgccctgcctctcgtgccgggtgttgcttcagcccagagccagagggctgggtcccgggtcctccacaggtgaccccggtggacacacgcgttcccatcctggcctccgtctctgcttttccacttctacctgcgtgtgggtttgccgccttgtcatcggttgtgtgagtgtcgcagacctttccagagctccggttcactctttccaaacaggcctccctgtcggtggcactgcactcctagaaccttcagtttctacgatggtttgtttggtccttttgaaccaccccaaagaactcaacatggcaaagcaaatggtaaaagcttcccgactgttctactttgggtccgcgcgaagcccactcacgtgtgatctgtgttgcccctctcggtggtcccaggcgatccagccatgccccctgcccctctgcccagatgcttcaggggcccggcttttcaggcttgccctcaccagcggccgtcagccgacactcagggatgtagctaacaccactccgccagtgctttcagtaggaagagctgaggctgcctgggaggcccggggcgaccggaaaagggctctctcaagttctgaaaagagaatctgccaccagatcgaatttcgacccctgagcttgttcggacgtatggtccaaattcagattaaggtggtcacccaacccgagatgtcaggaaaggccttctgcagagaaaatgtccccccacccgccatctgcagccaggtgtgtgccacacggcagccttcccgaaacatagtatggattttaaaaatgtgtttatttttgtttctcaaccactttataacgtattttttaatttattttgtaatgtcttgttttgaagtattgctgctatccttgttatccttcccactgtttttatcactgatttattttgtgaaagttgtacactaatgttctatgtcaaaatcaaaagtatttaatgaaatactagttctatttaatgtggttatggaaccagctggaaacacaaaacaaacagtgattgtacagcaggctgggcccaggaggtcaggttcattttgttacatatgcaataaactcacgacttt

SEQ ID NO: 367664 - DNA, 3452 bp, Homo sapiens
aggcccaagacttactttactgtgtgttgattgggcacagtggctcccagcacgttgagagggcaaggcaggaggttcacttgaggccaggagtttgagagcagcctgggcaacctagcgagaccctgtcttcactgcctgtccttggccttgaggttggtcctagggctggactgcccacacggtgactctcttttgtcctttttcagctttaaccggatcgacattccaccatatgagtcctatgagaagctctacgagaagctgctgacagccgtggaggagacctgcgggtttgctgtggagtgaaaagcaaccaaaggcaacagagtctagctcatggccaccagaccaaaagcatccagcttctgtgcacctcctgcaaagctggcagaggccctggaattccagatcacctgaggggaaagggttgtctctctcctttctgttgggggagggggatgggggacttttgttggtggctcccacccatatatccctcctttaccatagtactcccacccacttccatcacccatccaataaaatgcagccaggtttagcctttggctttggtcacacaggatattctgctgtgttgcaacccatgtggtgataaggctcacagccctgagctctttacgggagcatcaactcacagttaggggactgggcgtggctgattgagggtttggaactggtggctatgccagctattccatctcaaaacagccttgaggccccttttcaatttgagcagctgctagatatcttatcagagctcagattccagatttcacatcccagcagccggttctgggtagcagatcaatttccaactggaaaataactatataatgtatgcttattggaattctgccacagcaggaagcttgagtcaaaatgtgtttcccctttgaaaggagaaggaattggagcagcttttcctggaggcccaggatatttcttttctgggtatcttggctgaaaattttgttttacatagagaaaaacgatcttttaagggtcccttttgctgcattatctgtccagtttgacttttttttcagtgaaaacaccatgtcatggagtgtaggaaagagcagaccaaaatcagccctagagccaaccagtcagtcccaaagctgtgacctctgtgccactgttgtccatagaagagcatcgactgtgtcacttaaaatattagtaaaccatgatgcagcaactgctaagagctaaactaacaaaattgtgtcatcatagctgctggcttggtgtgaactcgcttaaaagcaatggtgaaaggataacctcgatgatgtaaatccacccaaagatactgttctacaaaaagtagggtgtggacgcaaacctgtgacagcagagggggacgacttcacactcactgcctcatgtggcccctttcccagtggcagctggtgacactaacgattgctactcggttcacttgcccagatgtcttcatatgatgagcaaggccagaagcaaggctagattcgaagtttctgacaccatttccagtttgcacaaaagtcagtattttatcttaaagtggcttgatttccaatagctgaacttgggcagaaaacagcaggccaatgttcctatgtggtttctttgttgttgtttttgtttggggtgggggcaagtacagggtaattcatgagcaagacatttcactgctgtcgaagtctctgggatcccgctgtgggtctgagatggcctgggaaggaccttgtggacaatggttttatctgttctttttgtcactgttaatttctgggctgctgaggttctagaatagaagggctgccaaatgaggtttgctgcaggaggaaagtttaatcccccattccaaaagtccaggccaaatggtgggcttagcctctttgaaaagttctgccttgcccccacaggtgggcacatcctgtgtctcattcaccatgatgcttcctgagggtgttctagaagcccgttccccagtggctgtatccagcctttccttgcatcatcttcctcttgaaggtgaggaagtgaaaactacagacctcccccggacagcccactctctatcacgagcctaacccgcgggaggcggaagagacatccattcgagaactgaagcggcctccgggatgaggtcagaggccccacctgattttcctggtggtggtatccaaaatcttcagtaactaggaaggaaaccagggtctcatggtttaaaagactttgaagcaggaatgttgcatttgacgcctttaaaactacctttttgctgttgggaggagtcgggggcgagccttagcagctgcaccgccatccccatgctggttggtgctgccctgcctctcgtgccgggtgttgcttcagcccagagccagagggctgggtcccgggtcctccacaggtgaccccggtggacacacgcgttcccatcctggcctccgtctctgcttttccacttctacctgcgtgtgggtttgccgccttgtcatcggttgtgtgagtgtcgcagacctttccagagctccggttcactctttccaaacaggcctccctgtcggtggcactgcactcctagaaccttcagtttctacgatggtttgtttggtccttttgaaccaccccaaagaactcaacatggcaaagcaaatggtaaaagcttcccgactgttctactttgggtccgcgcgaagcccactcacgtgtgatctgtgttgcccctctcggtggtcccaggcgatccagccatgccccctgcccctctgcccagatgcttcaggggcccggcttttcaggcttgccctcaccagcggccgtcagccgacactcagggatgtagctaacaccactccgccagtgctttcagtaggaagagctgaggctgcctgggaggcccggggcgaccggaaaagggctctctcaagttctgaaaagagaatctgccaccagatcgaatttcgacccctgagcttgttcggacgtatggtccaaattcagattaaggtggtcacccaacccgagatgtcaggaaaggccttctgcagagaaaatgtccccccacccgccatctgcagccaggtgtgtgccacacggcagccttcccgaaacatagtatggattttaaaaatgtgtttatttttgtttctcaaccactttataacgtattttttaatttattttgtaatgtcttgttttgaagtattgctgctatccttgttatccttcccactgtttttatcactgatttattttgtgaaagttgtacactaatgttctatgtcaaaatcaaaagtatttaatgaaatactagttctatttaatgtggttatggaaccagctggaaacacaaaacaaacagtgattgtacagcaggctgggcccaggaggtcaggttcattttgttacatatgcaataaactcacgacttt

SEQ ID NO: 367665 - DNA, 5081 bp, Homo sapiens
cgcgcgcgcggctcggagaggcggcggcagcggcggaagcggcgagggcggcgggcgtccggctctgaggtggtggaggcggcggaggcggcggcggaggcggcggcggctcgggactgggctcggctggaagcagcgagggtcagagcgccgcagcaagcgccgatctcccggctcgaccatccgcctgccgcccggacgcctgggccgcggagtttgtgtcccggctcggaccccggcgcccagcccggagccgtaaccttgaggcggcggcggcggggccgggccgggccgggctggggggcggtggcgctggatccgcggctgcccgatcgttggcgggagatgtcgaaccccgggacacgcaggaacggctccagcatcaagatccgtctgacagtgttatgtgccaagaaccttgcaaagaaagacttcttcaggctccctgacccttttgcaaagattgtcgtggatgggtctgggcagtgccactcaaccgacactgtgaaaaacacattggacccaaagtggaaccagcactatgatctatatgttgggaaaacggattcgataaccattagcgtgtggaaccataagaaaattcacaagaaacagggagctggcttcctgggctgtgtgcggctgctctccaatgccatcagcagattaaaagataccggataccagcgtttggatctatgcaaactaaacccctcagatactgatgcagttcgtggccagatagtggtcagtttacagacacgagacagaataggaaccggcggctcggtggtggactgcagaggactgttagaaaatgaaggaacggtgtatgaagactccgggcctgggaggccgctcagctgcttcatggaggaaccagccccttacacagatagcaccggtgctgctgctggaggagggaattgcaggttcgtggagtccccaagtcaagatcaaagacttcaggcacagcggcttcgaaaccctgatgtgcgaggttcactacagacgccccagaaccgaccacacggccaccagtccccggaactgcccgaaggctacgaacaaagaacaacagtccagggccaagtttactttttgcatacacagactggagttagcacgtggcacgaccccaggataccaagagaccttaacagtgtgaactgtgatgaacttggaccactgccgccaggctgggaagtcagaagtacagtttctgggaggatatattttgtagatcataataaccgaacaacccagtttacagacccaaggttacaccacatcatgaatcaccagtgccaactcaaggagcccagccagccgctgccactgcccagtgagggctctctggaggacgaggagcttcctgcccagagatacgaaagagatctagtccagaagctgaaagtcctcagacacgaactgtcgcttcagcagccccaagctggtcattgccgcatcgaagtgtccagagaagaaatctttgaggagtcttaccgccagataatgaagatgcgaccgaaagacttgaaaaaacggctgatggtgaaattccgtggggaagaaggtttggattacggtggtgtggccagggagtggctttacttgctgtgccatgaaatgctgaatccttattacgggctcttccagtattctacggacaatatttacatgttgcaaataaatccggattcttcaatcaaccccgaccacttgtcttatttccactttgtggggcggatcatggggctggctgtgttccatggacactacatcaacgggggcttcacagtgcccttctacaagcagctgctggggaagcccatccagctctcagatctggaatctgtggacccagagctgcataagagcttggtgtggatcctagagaacgacatcacgcctgtactggaccacaccttctgcgtggaacacaacgccttcgggcggatcctgcagcatgaactgaaacccaatggcagaaatgtgccagtcacagaggagaataagaaagaatacgtccggttgtatgtaaactggaggtttatgagaggaatcgaagcccagttcttagctctgcagaaggggttcaatgagctcatccctcaacatctgctgaagccttttgaccagaaggaactggagctgatcataggcggcctggataaaatagacttgaacgactggaagtcgaacacgcggctgaagcactgtgtggccgacagcaacatcgtgcggtggttctggcaagcggtggagacgttcgatgaagaaaggagggccaggctcctgcagtttgtgactgggtccacgcgagtcccgctccaaggcttcaaggctttgcaaggttctacaggcgcggcagggccccggctgttcaccatccacctgatagacgcgaacacagacaaccttccgaaggcccatacctgctttaaccggatcgacattccaccatatgagtcctatgagaagctctacgagaagctgctgacagccgtggaggagacctgcgggtttgctgtggagtgaaaagcaaccaaaggcaacagagtctagctcatggccaccagaccaaaagcatccagcttctgtgcacctcctgcaaagctggcagaggccctggaattccagatcacctgaggggaaagggttgtctctctcctttctgttgggggagggggatgggggacttttgttggtggctcccacccatatatccctcctttaccatagtactcccacccacttccatcacccatccaataaaatgcagccaggtttagcctttggctttggtcacacaggatattctgctgtgttgcaacccatgtggtgataaggctcacagccctgagctctttacgggagcatcaactcacagttaggggactgggcgtggctgattgagggtttggaactggtggctatgccagctattccatctcaaaacagccttgaggccccttttcaatttgagcagctgctagatatcttatcagagctcagattccagatttcacatcccagcagccggttctgggtagcagatcaatttccaactggaaaataactatataatgtatgcttattggaattctgccacagcaggaagcttgagtcaaaatgtgtttcccctttgaaaggagaaggaattggagcagcttttcctggaggcccaggatatttcttttctgggtatcttggctgaaaattttgttttacatagagaaaaacgatcttttaagggtcccttttgctgcattatctgtccagtttgacttttttttcagtgaaaacaccatgtcatggagtgtaggaaagagcagaccaaaatcagccctagagccaaccagtcagtcccaaagctgtgacctctgtgccactgttgtccatagaagagcatcgactgtgtcacttaaaatattagtaaaccatgatgcagcaactgctaagagctaaactaacaaaattgtgtcatcatagctgctggcttggtgtgaactcgcttaaaagcaatggtgaaaggataacctcgatgatgtaaatccacccaaagatactgttctacaaaaagtagggtgtggacgcaaacctgtgacagcagagggggacgacttcacactcactgcctcatgtggcccctttcccagtggcagctggtgacactaacgattgctactcggttcacttgcccagatgtcttcatatgatgagcaaggccagaagcaaggctagattcgaagtttctgacaccatttccagtttgcacaaaagtcagtattttatcttaaagtggcttgatttccaatagctgaacttgggcagaaaacagcaggccaatgttcctatgtggtttctttgttgttgtttttgtttggggtgggggcaagtacagggtaattcatgagcaagacatttcactgctgtcgaagtctctgggatcccgctgtgggtctgagatggcctgggaaggaccttgtggacaatggttttatctgttctttttgtcactgttaatttctgggctgctgaggttctagaatagaagggctgccaaatgaggtttgctgcaggaggaaagtttaatcccccattccaaaagtccaggccaaatggtgggcttagcctctttgaaaagttctgccttgcccccacaggtgggcacatcctgtgtctcattcaccatgatgcttcctgagggtgttctagaagcccgttccccagtggctgtatccagcctttccttgcatcatcttcctcttgaaggtgaggaagtgaaaactacagacctcccccggacagcccactctctatcacgagcctaacccgcgggaggcggaagagacatccattcgagaactgaagcggcctccgggatgaggtcagaggccccacctgattttcctggtggtggtatccaaaatcttcagtaactaggaaggaaaccagggtctcatggtttaaaagactttgaagcaggaatgttgcatttgacgcctttaaaactacctttttgctgttgggaggagtcgggggcgagccttagcagctgcaccgccatccccatgctggttggtgctgccctgcctctcgtgccgggtgttgcttcagcccagagccagagggctgggtcccgggtcctccacaggtgaccccggtggacacacgcgttcccatcctggcctccgtctctgcttttccaccgccatctgcagccaggtgtgtgccacacggcagccttcccgaaacatagtatggattttaaaaatgtgtttatttttgtttctcaaccactttataacgtattttttaatttattttgtaatgtcttgttttgaagtattgctgctatccttgttatccttcccactgtttttatcactgatttattttgtgaaagttgtacactaatgttctatgtcaaaatcaaaagtatttaatgaaatactagttctatttaatgtggttatggaaccagctggaaacacaaaacaaacagtgattgtacagcaggctgggcccaggaggtcaggttcattttgttacatatgcaataaactcacgacttt

SEQ ID NO: 367666 - DNA, 5095 bp, Homo sapiens
cgcgcgcgcggctcggagaggcggcggcagcggcggaagcggcgagggcggcgggcgtccggctctgaggtggtggaggcggcggaggcggcggcggaggcggcggcggctcgggactgggctcggctggaagcagcgagggtcagagcgccgcagcaagcgccgatctcccggctcgaccatccgcctgccgcccggacgcctgggccgcggagtttgtgtcccggctcggaccccggcgcccagcccggagccgtaaccttgaggcggcggcggcggggccgggccgggccgggctggggggcggtggcgctggatccgcggctgcccgatcgttggcgggagatgtcgaaccccgggacacgcaggaacggctccagcatcaagatccgtctgacagtgttatgtgccaagaaccttgcaaagaaagacttcttcaggctccctgacccttttgcaaagattgtcgtggatgggtctgggcagtgccactcaaccgacactgtgaaaaacacattggacccaaagtggaaccagcactatgatctatatgttgggaaaacggattcgataaccattagcgtgtggaaccataagaaaattcacaagaaacagggagctggcttcctgggctgtgtgcggctgctctccaatgccatcagcagattaaaagataccggataccagcgtttggatctatgcaaactaaacccctcagatactgatgcagttcgtggccagatagtggtcagtttacagacacgagacagaataggaaccggcggctcggtggtggactgcagaggactgttagaaaatgaaggaacggtgtatgaagactccgggcctgggaggccgctcagctgcttcatggaggaaccagccccttacacagatagcaccggtgctgctgctggaggagggaattgcaggttcgtggagtccccaagtcaagatcaaagacttcaggcacagcggcttcgaaaccctgatgtgcgaggttcactacagacgccccagaaccgaccacacggccaccagtccccggaactgcccgaaggctacgaacaaagaacaacagtccagggccaagtttactttttgcatacacagactggagttagcacgtggcacgaccccaggataccaagagaccttaacagtgtgaactgtgatgaacttggaccactgccgccaggctgggaagtcagaagtacagtttctgggaggatatattttgtagatcataataaccgaacaacccagtttacagacccaaggttacaccacatcatgaatcaccagtgccaactcaaggagcccagccagccgctgccactgcccagtgagggctctctggaggacgaggagcttcctgcccagagatacgaaagagatctagtccagaagctgaaagtcctcagacacgaactgtcgcttcagcagccccaagctggtcattgccgcatcgaagtgtccagagaagaaatctttgaggagtcttaccgccagataatgaagatgcgaccgaaagacttgaaaaaacggctgatggtgaaattccgtggggaagaaggtttggattacggtggtgtggccagggagtggctttacttgctgtgccatgaaatgctgaatccttattacgggctcttccagtattctacggacaatatttacatgttgcaaataaatccggattcttcaatcaaccccgaccacttgtcttatttccactttgtggggcggatcatggggctggctgtgttccatggacactacatcaacgggggcttcacagtgcccttctacaagcagctgctggggaagcccatccagctctcagatctggaatctgtggacccagagctgcataagagcttggtgtggatcctagagaacgacatcacgcctgtactggaccacaccttctgcgtggaacacaacgccttcgggcggatcctgcagcatgaactgaaacccaatggcagaaatgtgccagtcacagaggagaataagaaagaatacgtccggttgtatgtaaactggaggtttatgagaggaatcgaagcccagttcttagctctgcagaaggggttcaatgagctcatccctcaacatctgctgaagccttttgaccagaaggaactggagctgatcataggcggcctggataaaatagacttgaacgactggaagtcgaacacgcggctgaagcactgtgtggccgacagcaacatcgtgcggtggttctggcaagcggtggagacgttcgatgaagaaaggagggccaggctcctgcagtttgtgactgggtccacgcgagtcccgctccaaggcttcaaggctttgcaaggttctacaggcgcggcagggccccggctgttcaccatccacctgatagacgcgaacacagacaaccttccgaaggcccatacctgctttaaccggatcgacattccaccatatgagtcctatgagaagctctacgagaagctgctgacagccgtggaggagacctgcgggtttgctgtggagtgaaaagcaaccaaaggcaacagagtctagctcatggccaccagaccaaaagcatccagcttctgtgcacctcctgcaaagctggcagaggccctggaattccagatcacctgaggggaaagggttgtctctctcctttctgttgggggagggggatgggggacttttgttggtggctcccacccatatatccctcctttaccatagtactcccacccacttccatcacccatccaataaaatgcagccaggtttagcctttggctttggtcacacaggatattctgctgtgttgcaacccatgtggtgataaggctcacagccctgagctctttacgggagcatcaactcacagttaggggactgggcgtggctgattgagggtttggaactggtggctatgccagctattccatctcaaaacagccttgaggccccttttcaatttgagcagctgctagatatcttatcagagctcagattccagatttcacatcccagcagccggttctgggtagcagatcaatttccaactggaaaataactatataatgtatgcttattggaattctgccacagcaggaagcttgagtcaaaatgtgtttcccctttgaaaggagaaggaattggagcagcttttcctggaggcccaggatatttcttttctgggtatcttggctgaaaattttgttttacatagagaaaaacgatcttttaagggtcccttttgctgcattatctgtccagtttgacttttttttcagtgaaaacaccatgtcatggagtgtaggaaagagcagaccaaaatcagccctagagccaaccagtcagtcccaaagctgtgacctctgtgccactgttgtccatagaagagcatcgactgtgtcacttaaaatattagtaaaccatgatgcagcaactgctaagagctaaactaacaaaattgtgtcatcatagctgctggcttggtgtgaactcgcttaaaagcaatggtgaaaggataacctcgatgatgtaaatccacccaaagatactgttctacaaaaagtagggtgtggacgcaaacctgtgacagcagagggggacgacttcacactcactgcctcatgtggcccctttcccagtggcagctggtgacactaacgattgctactcggttcacttgcccagatgtcttcatatgatgagcaaggccagaagcaaggctagattcgaagtttctgacaccatttccagtttgcacaaaagtcagtattttatcttaaagtggcttgatttccaatagctgaacttgggcagaaaacagcaggccaatgttcctatgtggtttctttgttgttgtttttgtttggggtgggggcaagtacagggtaattcatgagcaagacatttcactgctgtcgaagtctctgggatcccgctgtgggtctgagatggcctgggaaggaccttgtggacaatggttttatctgttctttttgtcactgttaatttctgggctgctgaggttctagaatagaagggctgccaaatgaggtttgctgcaggaggaaagtttaatcccccattccaaaagtccaggccaaatggtgggcttagcctctttgaaaagttctgccttgcccccacaggtgggcacatcctgtgtctcattcaccatgatgcttcctgagggtgttctagaagcccgttccccagtggctgtatccagcctttccttgcatcatcttcctcttgaaggtgaggaagtgaaaactacagacctcccccggacagcccactctctatcacgagcctaacccgcgggaggcggaagagacatccattcgagaactgaagcggcctccgggatgaggtcagaggccccacctgattttcctggtggtggtatccaaaatcttcagtaactaggaaggaaaccagggtctcatggtttaaaagactttgaagcaggaatgttgcatttgacgcctttaaaactacctttttgctgttgggaggagtcgggggcgagccttagcagctgcaccgccatccccatgctggttggtgctgccctgcctctcgtgccgggtgttgcttcagcccagagccagagggctgggtcccgggtcctccacaggtgaccccggtggacacacgcgttcccatcctggcctccgtctctgcttttccacttctacctgcgtgtgggtttgccgccttgtcatcggttgtgtgagtgtcgcagacctttccagagctccggttcactctttccaaacaggcctccctgtcggtggcactgcactcctagaaccttcagtttctacgatggtttgtttggtccttttgaaccaccccaaagaactcaacatggcaaagcaaatggtaaaagcttcccgactgttctactttgggtgatttgggctgtcgtgcggatgaaggaccagggtgacaagcgaccgggagatcgtgtcagtggacatgcatccaccgaacaacccctcaccaggactaagctgcggcgggagcgccacgaatctcccagtaagaaccttgaaaacaacggccaggc

SEQ ID NO: 367667 - DNA, 1204 bp, Homo sapiens
cgcgcgcgcggctcggagaggcggcggcagcggcggaagcggcgagggcggcgggcgtccggctctgaggtggtggaggcggcggaggcggcggcggaggcggcggcggctcgggactgggctcggctggaagcagcgagggtcagagcgccgcagcaagcgccgatctcccggctcgaccatccgcctgccgcccggacgcctgggccgcggagtttgtgtcccggctcggaccccggcgcccagcccggagccgtaaccttgaggcggcggcggcggggccgggccgggccgggctggggggcggtggcgctggatccgcggctgcccgatcgttggcgggagatgtcgaaccccgggacacgcaggaacggctccagcatcaagatccgtctgacagaacttgttaggtttttccatttgttcaaccctcgggcggatcacgaggtcaagagtcggaggttgcagtgagctgagatcgcgccactgcactccagcctggtgacacagcaggactccatctcaaaaataaataaatatcaattaataaataaaaagtctacttaaagaaataattcaagtgttatgtgccaagaaccttgcaaagaaagacttcttcaggctccctgacccttttgcaaagattgtcgtggatgggtctgggcagtgccactcaaccgacactgtgaaaaacacattggacccaaagtggaaccagcactatgatctatatgttgggaaaacggattcgataaccattagcgtgtggaaccataagaaaattcacaagaaacagggagctggcttcctgggctgtgtgcggctgctctccaatgccatcagcagattaaaagataccggataccagcgtttggatctatgcaaactaaacccctcagatactgatgcagttcgtggccagatagtggtcagtttacagacacgagacagaataggaaccggcggctcggtggtggactgcagaggactgttagaaaatgaagggtacgtataaccacagcaagaggcgggctgagttctctgctgccttaacctctcggcctataggaaagcgcccttccctccttaagtcactctgcagaatgcttgagatgcataaaggatgttgggataaaactgtgaaccagtttacttggctataaaggaagctgtaaatacaaccgcagttgaagacgcagggcgt

SEQ ID NO: 367668 - DNA, 918 bp, Homo sapiens
agccaatccagaggggccttccatagttcacggttcttccaatagcggcccgggaaaggaccagaacaggcggcgaagactgaagcccggaggtaggagtggcaagagctcgcccagtccgcgaagggtaaactcgcgcatgcgcactggccttcaaccaagccaagcgccttggcttctgtcctggatgctcagtgttttgcggtttacgatgcgcatcgttttcccggctctggcaccagatccatactattctgtaaactgaggcggcgatgcccaaaaattggaagcaattactctaagatatcaaaagattgaagcaagccatgaaacctctgcgcggagagagccgagcccgaggcggcggggagccagcacgtgtgcgcagctccgccctcttttggcgaagcacctaggcctggcccctcccgcgacctgtagcgcggcggagcaagcgcggaaggctgggagggctgcgcgggctgcgcgtcgccatggagcccgacgggacttacgagccgggcttcgtgggtattcgcttctgccaggaatgtaacaacatgctgtaccccaaggaagacaaggagaaccgcattctgctctacgcgtgccggaactgtgattaccagcaggaggccgacaacagctgcatctatgtcaacaagatcacgcacgaagtggacgaactgacccagattatcgccgacgtgtcccaggaccccacgttgccgcggaccgaggaccacccgtgccaaaagtgcggccacaaggaggctgtgttcttccagtcacacagtgcgcgggccgaggacgccatgcgcctttactacgtgtgcacagccccacactgcggccaccgctggaccgagtgacctcctctctcccccgagtgtaataaacaccagattccatgcgtga

SEQ ID NO: 367669 - DNA, 1002 bp, Homo sapiens
agccaatccagaggggccttccatagttcacggttcttccaatagcggcccgggaaaggaccagaacaggcggcgaagactgaagcccggaggtaggagtggcaagagctcgcccagtccgcgaagggtaaactcgcgcatgcgcactggccttcaaccaagccaagcgccttggcttctgtcctggatgctcagtgttttgcggtttacgatgcgcatcgttttcccggctctggcaccagatccatactattctgtaaactgaggcggcgatgcccaaaaattggaagcaattactctaagatatcaaaagattgaagcaagccatgaaacctctgcgcggagagagccgagcccgaggcggcggggagccagcacgtgtgcgcagctccgccctcttttggcgaagcacctaggcctggcccctcccgcgacctgtagcgcggcggagcaagcgcggaaggctgggagggctgcgcgggctgcgcgtcgccatggagcccgacgggacttacgagccgggcttcgtgggtattcgcttctgccaggaatggtgaggcggagggagcgggtgatgttagaaggcgggcgaggaatggctccaggactaacccctggcacctccccctccccacagtaacaacatgctgtaccccaaggaagacaaggagaaccgcattctgctctacgcgtgccggaactgtgattaccagcaggaggccgacaacagctgcatctatgtcaacaagatcacgcacgaagtggacgaactgacccagattatcgccgacgtgtcccaggaccccacgttgccgcggaccgaggaccacccgtgccaaaagtgcggccacaaggaggctgtgttcttccagtcacacagtgcgcgggccgaggacgccatgcgcctttactacgtgtgcacagccccacactgcggccaccgctggaccgagtgacctcctctctcccccgagtgtaataaacaccagattccatgcgtga

SEQ ID NO: 367670 - DNA, 944 bp, Homo sapiens
agccaatccagaggggccttccatagttcacggttcttccaatagcggcccgggaaaggaccagaacaggcggcgaagactgaagcccggaggtaggagtggcaagagctcgcccagtccgcgaagggtaaactcgcgcatgcgcactggccttcaaccaagccaagcgccttggcttctgtcctggatgctcagtgttttgcggtttacgatgcgcatcgttttcccggctctggcaccagatccatactattctgtaaactgaggcggcgatgcccaaaaattggaagcaattactctaagatatcaaaagattgaagcaagccatgaaacctctgcgcggagagagccgagcccgaggcggcggggagccagcacgtgtgcgcagctccgccctcttttggcgaagcacctaggcctggcccctcccgcgacctgtagcgcggcggagcaagcgcggaaggctgggagggctgcgcgggctgcgcgtcgccatggagcccgacgggacttacgagccgggcttcgtgggtattcgcttctgccaggaatgtaacaacatgctgtaccccaaggaagacaaggagaaccgcattctgctctacgcgtgccggaactgtgattaccagcaggaggccgacaacagctgcatctatgtcaacaagatcacgcacgaagtggacgaactgacccagattatcgccgacgtgtcccaggaccccacgttgccgcggaccgaggaccacccgtgccaaaagtgagcgttcagctggtactggggaggtgcggccacaaggaggctgtgttcttccagtcacacagtgcgcgggccgaggacgccatgcgcctttactacgtgtgcacagccccacactgcggccaccgctggaccgagtgacctcctctctcccccgagtgtaataaacaccagattccatgcgtga

SEQ ID NO: 367671 - DNA, 1164 bp, Homo sapiens
agccaatccagaggggccttccatagttcacggttcttccaatagcggcccgggaaaggaccagaacaggcggcgaagactgaagcccggaggtaggagtggcaagagctcgcccagtccgcgaagggtaaactcgcgcatgcgcactggccttcaaccaagccaagcgccttggcttctgtcctggatgctcagtgttttgcggtttacgatgcgcatcgttttcccggctctggcaccagatccatactattctgtaaactgaggcggcgatgcccaaaaattggaagcaattactctaagatatcaaaagattgaagcaagccatgaaacctctgcgcggagagagccgagcccgaggcggcggggagccagcacgtgtgcgcagctccgccctcttttggcgaagcacctaggcctggcccctcccgcgacctgtagcgcggcggagcaagcgcggaaggctgggagggctgcgcgggctgcgcgtcgccatggagcccgacgggacttacgagccgggcttcgtgggtattcgcttctgccaggaatgtaacaacatgctgtaccccaaggaagacaaggagaaccgcattctgctctacgcggtgagcgccggggtcttccccggcaggtccacctgttcccagcgtggccccgccctgccccctgcctctgtgatcggactccctgttcgccctccgctgcacctcaagtgatcctgactctcatgtcctgcccatccccaaagagagtcctgtcgtcatatcctccgggatcaccctgccctctcctcccaatcttgtctggaatccttccgtgaccccctttcccccacactcgccctctcgtagtgccggaactgtgattaccagcaggaggccgacaacagctgcatctatgtcaacaagatcacgcacgaagtggacgaactgacccagattatcgccgacgtgtcccaggaccccacgttgccgcggaccgaggaccacccgtgccaaaagtgcggccacaaggaggctgtgttcttccagtcacacagtgcgcgggccgaggacgccatgcgcctttactacgtgtgcacagccccacactgcggccaccgctggaccgagtgacctcctctctcccccgagtgtaataaacaccagattccatgcgtga

SEQ ID NO: 367672 - DNA, 863 bp, Homo sapiens
agccaatccagaggggccttccatagttcacggttcttccaatagcggcccgggaaaggaccagaacaggcggcgaagactgaagcccggaggtaggagtggcaagagctcgcccagtccgcgaagggtaaactcgcgcatgcgcactggccttcaaccaagccaagcgccttggcttctgtcctggatgctcagtgttttgcggtttacgatgcgcatcgttttcccggctctggcaccagatccatactattctgtaaactgaggcggcgatgcccaaaaattggaagcaattactctaagatatcaaaagattgaagcaagccatgaaacctctgcgcggagagagccgagcccgaggcggcggggagccagcacgtgtgcgcagctccgccctcttttggcgaagcacctaggcctggcccctcccgcgacctgtagcgcggcggagcaagcgcggaaggctgggagggctgcgcgggctgcgcgtcgccatggagcccgacgggacttacgagccgggcttcgtgggtattcgcttctgccaggaatgtgccggaactgtgattaccagcaggaggccgacaacagctgcatctatgtcaacaagatcacgcacgaagtggacgaactgacccagattatcgccgacgtgtcccaggaccccacgttgccgcggaccgaggaccacccgtgccaaaagtgcggccacaaggaggctgtgttcttccagtcacacagtgcgcgggccgaggacgccatgcgcctttactacgtgtgcacagccccacactgcggccaccgctggaccgagtgacctcctctctcccccgagtgtaataaacaccagattccatgcgtga

SEQ ID NO: 367673 - DNA, 925 bp, Homo sapiens
ctcgcccagtccgcgaagggtaaactcgcgcatgcgcactggccttcaaccaagccaagcgccttggcttctgtcctggatgctcagtgttttgcggtttacgatgcgcatcgttttcccggctctggcaccagatccatactattctgtaaactgaggcggcgatgcccaaaaattggaagcaattactctaagatatcaaaagattgaagcaagccatgaaacctctgcgcggagagagccgagcccgaggcggcggggagccagcacgtgtgcgcagctccgccctcttttggcgaagcacctaggcctggcccctcccgcgacctgtagcgcggcggagcaagcgcggaaggctgggagggctgcgcgggctgcgcgtcgccatggagcccgacgggacttacgagccgggcttcgtgggtattcgcttctgccaggaatggtgaggcggagggagcgggtgatgttagaaggcgggcgaggaatggctccaggactaacccctggcacctccccctccccacagtaacaacatgctgtaccccaaggaagacaaggagaaccgcattctgctctacgcggtgagcgccggggtcttccccggcaggtccacctgttcccagcgtggccccgccctgccccctgcctctgtgatcggactccctgttcgccctccgctgcacctcaagtgatcctgactctcatgtcctgcccatccccaaagagagtcctgtcgtcatatcctccgggatcaccctgccctctcctcccaatcttgtctggaatccttccgtgaccccctttcccccacactcgccctctcgtagtgccggaactgtgattaccagcaggaggccgacaacagctgcatctatgtcaacaagatcacgcacgaagtggagtgagtggcgggccctgagct

SEQ ID NO: 367674 - DNA, 1007 bp, Homo sapiens
  misc_feature (944)..(944): n is a, c, g, or t
  misc_feature (947)..(947): n is a, c, g, or t
  misc_feature (962)..(962): n is a, c, g, or t
  misc_feature (979)..(979): n is a, c, g, or t
  misc_feature (987)..(987): n is a, c, g, or t
agccaatccagaggggccttccatagttcacggttcttccaatagcggcccgggaaaggaccagaacaggcggcgaagactgaagcccggaggtaggagtggcaagagctcgcccagtccgcgaagggtaaactcgcgcatgcgcactggccttcaaccaagccaagcgccttggcttctgtcctggatgctcagtgttttgcggtttacgatgcgcatcgttttcccggctctggcaccagatccatactattctgtaaactgaggcggcgatgcccaaaaattggaagcaattactctaagatatcaaaagattgaagcaagccatgaaacctctgcgcggagagagccgagcccgaggcggcggggagccagcacgtgtgcgcagctccgccctcttttggcgaagcacctaggcctggcccctcccgcgacctgtagcgcggcggagcaagcgcggaaggctgggagggctgcgcgggctgcgcgtcgccatggagcccgacgggacttacgagccgggcttcgtgggtattcgcttctgccaggaatgtaacaacatgctgtaccccaaggaagacaaggagaaccgcattctgctctacgcgtgccggaactgtgattaccagcaggaggccgacaacagctgcatctatgtcaacaagatcacgcacgaagtggacgaactgacccagattatcgccgacgtgtcccaggaccccacgttgccgcggaccgaggaccacccgtgccaaaagtgcggccacaaggaggctgtgttcttccagtcacacagtgcgcgggccgaggacgccatgcgcctttactacgtgtgcacagccccacactgcggccaccgctggaccgagtgacctcctctctcccccgagtgtaataaacaccagattccatgcgtgaaaaaaaaaaaaaaaactttcatccgncanctcatgatatattcnaccggaattccgaccgnacctgagngtacactttctttatggcga

SEQ ID NO: 367675 - DNA, 1077 bp, Homo sapiens
  misc_feature (963)..(963): n is a, c, g, or t
  misc_feature (984)..(984): n is a, c, g, or t
agccaatccagaggggccttccatagttcacggttcttccaatagcggcccgggaaaggaccagaacaggcggcgaagactgaagcccggaggtaggagtggcaagagctcgcccagtccgcgaagggtaaactcgcgcatgcgcactggccttcaaccaagccaagcgccttggcttctgtcctggatgctcagtgttttgcggtttacgatgcgcatcgttttcccggctctggcaccagatccatactattctgtaaactgaggcggcgatgcccaaaaattggaagcaattactctaagatatcaaaagattgaagcaagccatgaaacctctgcgcggagagagccgagcccgaggcggcggggagccagcacgtgtgcgcagctccgccctcttttggcgaagcacctaggcctggcccctcccgcgacctgtagcgcggcggagcaagcgcggaaggctgggagggctgcgcgggctgcgcgtcgccatggagcccgacgggacttacgagccgggcttcgtgggtattcgcttctgccaggaatgtaacaacatgctgtaccccaaggaagacaaggagaaccgcattctgctctacgcgtgccggaactgtgattaccagcaggaggccgacaacagctgcatctatgtcaacaagatcacgcacgaagtggacgaactgacccagattatcgccgacgtgtcccaggaccccacgttgccgcggaccgaggaccacccgtgccaaaagtgcggccacaaggaggctgtgttcttccagtcacacagtgcgcgggccgaggacgccatgcgcctttactacgtgtgcacagccccacactgcggccaccgctggaccgagtgacctcctctctcccccgagtgtaataaacaccagattccatgcgtgaaaaaaaaaaaaaaaaaaaaaaaaaaaaaaaaaaaaaaaaaaaaanaaaaaaaaaggggggggggcnaaaaatcccccgcgagggggccacaagttgtgaggcacgaccaccacggttttgtagctaaacacagaggggtgcccgccccaagtaggggca

SEQ ID NO: 367676 - DNA, 1248 bp, Homo sapiens
agccaatccagaggggccttccatagttcacggttcttccaatagcggcccgggaaaggaccagaacaggcggcgaagactgaagcccggaggtaggagtggcaagagctcgcccagtccgcgaagggtaaactcgcgcatgcgcactggccttcaaccaagccaagcgccttggcttctgtcctggatgctcagtgttttgcggtttacgatgcgcatcgttttcccggctctggcaccagatccatactattctgtaaactgaggcggcgatgcccaaaaattggaagcaattactctaagatatcaaaagattgaagcaagccatgaaacctctgcgcggagagagccgagcccgaggcggcggggagccagcacgtgtgcgcagctccgccctcttttggcgaagcacctaggcctggcccctcccgcgacctgtagcgcggcggagcaagcgcggaaggctgggagggctgcgcgggctgcgcgtcgccatggagcccgacgggacttacgagccgggcttcgtgggtattcgcttctgccaggaatggtgaggcggagggagcgggtgatgttagaaggcgggcgaggaatggctccaggactaacccctggcacctccccctccccacagtaacaacatgctgtaccccaaggaagacaaggagaaccgcattctgctctacgcggtgagcgccggggtcttccccggcaggtccacctgttcccagcgtggccccgccctgccccctgcctctgtgatcggactccctgttcgccctccgctgcacctcaagtgatcctgactctcatgtcctgcccatccccaaagagagtcctgtcgtcatatcctccgggatcaccctgccctctcctcccaatcttgtctggaatccttccgtgaccccctttcccccacactcgccctctcgtagtgccggaactgtgattaccagcaggaggccgacaacagctgcatctatgtcaacaagatcacgcacgaagtggacgaactgacccagattatcgccgacgtgtcccaggaccccacgttgccgcggaccgaggaccacccgtgccaaaagtgcggccacaaggaggctgtgttcttccagtcacacagtgcgcgggccgaggacgccatgcgcctttactacgtgtgcacagccccacactgcggccaccgctggaccgagtgacctcctctctcccccgagtgtaataaacaccagattccatgcgtga

SEQ ID NO: 367677 - DNA, 1214 bp, Homo sapiens
agccaatccagaggggccttccatagttcacggttcttccaatagcggcccgggaaaggaccagaacaggcggcgaagactgaagcccggaggtaggagtggcaagagctcgcccagtccgcgaagggtaaactcgcgcatgcgcactggccttcaaccaagccaagcgccttggcttctgtcctggatgctcagtgttttgcggtttacgatgcgcatcgttttcccggctctggcaccagatccatactattctgtaaactgaggcggcgatgcccaaaaattggaagcaattactctaagatatcaaaagattgaagcaagccatgaaacctctgcgcggagagagccgagcccgaggcggcggggagccagcacgtgtgcgcagctccgccctcttttggcgaagcacctaggcctggcccctcccgcgacctgtagcgcggcggagcaagcgcggaaggctgggagggctgcgcgggctgcgcgtcgccatggagcccgacgggacttacgagccgggcttcgtgggtattcgcttctgccaggaatggtgaggcggagggagcgggtgatgttagaaggcgggcgaggaatggctccaggactaacccctggcacctccccctccccacagtaacaacatgctgtaccccaaggaagacaaggagaaccgcattctgctctacgcgtgccggaactgtgattaccagcaggaggccgacaacagctgcatctatgtcaacaagatcacgcacgaagtggacgaactgacccagattatcgccgacgtgtcccaggaccccacgttgccgcggaccgaggaccacccgtgccaaaagtgcggccacaaggaggctgtgttcttccagtcacacagtgcgcgggccgaggacgccatgcgcctttactacgtgtgcacagccccacactgcggccaccgctggaccgagtgacctcctctctcccccgagtgtaataaacaccagattccatgcgtgaaaaaaaaaaaaaacgaaaaaatgttgttgggcgccccgccccgaggaaaattttcgaaccatgcgttggggccggggccccagggttagtagacacggggcctacgggtcccaggaaacccgcccgagaaaggtggtggtttcccaataaaaagcgggggacaccgggttgaacatccaggggttgggccccggctccaagggccgagcgta

SEQ ID NO: 367678 - DNA, 721 bp, Homo sapiens
gacggatttcacccttggcatccaggctagtgtgcagtggcgcaacctcagctcactgcaacctccacctcccaggttcaagcgattctcctgcctcggcctcctgagtagctggaattacaggtgcccgccaccacacccggctaatttttgtatttttagtagagacagggtttcaccacgttggtcaggctggtcttgaactcctgacctcagatgatctgcccacctcggcctcccaaatgctgggattacaggtgtgagccaccgcgcccggccaagtaacaatatttctggatataatacctgaaaactcagcgcagaaagatataaagggataaaaaatttataatatagtcattacaatggaataaaatgaaatataaagcaataaaaaggaacggacagctgatatatgtaacaatatggatgaatctcaaaagcaatatcaaaagatcaaaagggtatatattacatgattccattctggaaaaggcaaaactatagggacagaaaacaagtcaatgataggcagtgggccggggggggaagtgatttattataaagaggcatgaggaaactttaggatgacataaatgttctatgtctttatatggtggtgggtacatgactgtatacttttgacagaggtatatctaaaaggggtgagttttactgtgtataaattatacctcaatgaacctgactaaaaaaaaaaaga

SEQ ID NO: 367679 - DNA, 2302 bp, Homo sapiens
tacatggagaaaggctcaatagaaatgcaaacgtgtgtgctagaataaagaagttattggtggttttacttttgattatcccgtaaatttttttaattttaaattattctttttaaaaatgtcttctactaatctttaaacattattaagtagtgagaaatattatttctactgatttataaatatatccattcttcacattcacagtgggatttgtaaaagcaatccttggatttacaacctttttttttttttttttagcaaacaaagctctcaagttggtgatcctcaggtaacatctaacctacagatattgcaccagttatttattgctacaaaaatgctgcctaagaagccacccaaagggcagtgggttacaacaataactataccttttttcttaggagtctctgcattagttggacagctcttctggaattatcttctaagtcaactgtgggttgggtaggtggctctgctgatttttcgctggacttccacatttgggaccagttggctgtcatcagctctagaaagggtgtggctgttttacattggctgttttcctcacattcctcaagcaggtaagcttaatcatgttctcatattgaagcagaaactgtttactcatttatctatttacttactgggtctcctgggcactaggtactgtaataaagaactggagaaatacagtcagatgggaagtagcccctgctgtcaaggagcttgccatctaatgggggagacaggcaagtaaaccaaagactacacagtgcagtatggtaagtgccatgattttgatgtgacagggcacagtggacgaccttccaaatcaaagcaagtaactaggggttgacaatggtaagtatcatagttgaagtatccttgaacaaggtttcaggaagaagaagaagggaatttcatgcagggaaacagccaaagctcagtgagtcaaaatatcacagcattcttggtaagcccaattgttttttctgttttgctattttggtggagagaaaggaacacataaaggaataacatgagagaaggctatttggggaagtgtagtagttaaggttctggctcaaacaacaactgcagctcataaagttgactttagtggaaggatactggggtatctcatggaatcttgggaactgttgaataaccagggaaactctgggaaactcactggtaggaatccataaactgtcctcctggtgggctgtaaacaactcaccctctatgcatctcacatcaaaattccagtttcttgggaaaacaagtctgtttgcccaatttgggtcatatttccacctccatgttactcaggcatgattcatctgcaagttatgtgtatagatattttgctactgttccacccttacgctgtgctggggagggaggtgtcactgtgagctgtgtcggtgccttaagagatatctgttgtgtcttattacttggttgcttttccccacatgtacaatgacaaaaatgccttcaacctatttgatccagccgttccagtacaactcctatacttgccatctttccaagcccaaaggtacatccagctgatggaaggagcatcttggtgttaatattcttttagtcatggtctctgaaagtaaaatgtctattcttctaattctggcacaatcttatctagctatagttcctcatggtcctgcactccatggactaaattgtaagtataattactaccaatgtactctataaataacttttggggccagggtggcaatagttgctagagaaaaaaaaaaaaaaaaaggaaggagaagaaaacagtgatagttcttattttaaaaggaaaaaaagaggcaggaggctctcttgaggccaggagtttaagaccagcctaggcagcatttcaagaccctgtctctactaaaaagtaaaaaaaaaatttagtcaggcatggtggcatgcacctgtagtcgtagctactcaggagactgaggtgggaggattgattgagctcaggagtttgaggctgcagtgagcaatcatcatgccattgcactccagcctgggcatcagagcaagaccttgtcttttaggaaaaaaaggcagggaagaggaataggtaatttttcagtgttcagacattccagcaatatgtgtggagtactcattctcactacagtttatgaggccatagctagtatgtatgactacccatccaagtttccctgcttacagttactattccaactgattggggggcttttcctaatagagtgatgtaagccttcatttttagacatctaagccc

SEQ ID NO: 367680 - DNA, 1933 bp, Homo sapiens
cagctctcgagcatcgttgccacccgacattagaagatcttcttgatcatttattgatagcagctctgggatatgagatcatcatcttccagacgaggaagccatagtaccttcctgtttctcgcgccccggcttttaaaaactccccagctctggtccactactccaccgagatttctcaaaagtcgccctcggagagtgatcccggggggtgctttgcgaagagggtgcagaaaatgaacggaggagcagctggcttgagggctgggaacactcgcgtgtgtgagagatttaggatgagtttgggaagaaagtgggggcccgaggattctagagagagcacagcccaggctgaggaggggaaagcgcggtggtccggaaatttgagcggctggggaaccaccttcgtgtctcctcagaggggcgggcgctgtcgcctaactggtccccaacggcgtcggagcagaggcaagatccaggggcactggcctcgccgcggtaccgggcgggtacccagcgggctcggctctatagagcccgaggccccgctgccgctgccgccgccgccagcagccgttgccgccgcctcggccaaaccatccttcagacacccgcgccgccgcctcacaacatgtccgccgctgccgctgccgctgccgctgctggaacggcgacggccgcctgggaactaatatggacagagccaggcacagtgggagtcgcagtggctgccgccgcggccgcgtagcccgaacgcagatcgtggaagccgaagacgcggcaacggtggtccctccagatgccagggaaggtttgcaggaagccgctcccgacaccctttgcgccaccggaagcctcgttccctcagatttccccctccctcccggaccgacttccgggtgtggctgccgcccttcccccacccacgccggcgggagccgcccgttcgcgctgccagcagcttccgcctgctacggtcctggcaagcacctcgggatcccattccttcacagggaccctagccagttaaagctgatacattcctgtgggtcaactatgcaactaactcagattttgagcaaacaaagctctcaagttggtgatcctcaggagtctctgcattagttggacagctcttctggaattatcttctaagtcaactgtgggttgggtaggtggctctgctgatttttcgctggacttccacatttgggaccagttggctgtcatcagctctagaaagggtgtggctgttttacattggctgttttcctcacattcctcaagcagataactgataccgtggttccagaagatttttctaacagtgtttgcaagctataaaatagtgctttcacttagaaaaggctagacgtggtggttcatgcctgtaatcccagcactttgagaggccgaggcaccatgctgggagataaggatccaacataagacaaacagtgctgatgcttttggaaagctcatattcaagctggggagacaaacaacatacaaaagttctcatcatgatactttaaggatgaggacagctgatgtggctggcctgaaaaataagaaactcactctgtcactcaggctggagtgcaatggcacgatctcggctcactgcaacctctgcctcccgagttcaggagggctctgagagatttcatttctgtcctgctgatgaagtctacgttcattcagggcctgctgtggaagaccagccccaaaggaatgagactacatacactaaaaaaccaaaaagcctaaaaaaagagatgatattttaatttcaaaagcttaataatttgctgaacagaagacttttgagagtcagcagaaatcttccactttgcatggttctcttgatgtgaaatcatctatatagccccagaattggaaaagaaaaaaataaaaaaatggaaggaactgg

SEQ ID NO: 367681 - DNA, 800 bp, Homo sapiens
gggatgttggaatttctaaaaactaaacaagacactgttgaaatccattttgtcactttggttcatcagattcattactcttgatacatatgatggcaactggcttgttgacagtgttttcttaaaacgttctgtctgagccctatatgctgctctcaagaagacattacagtttattatgctattttttcatttagcattttctgcaggacaacttactggttctttaatttctgaagtgtagacacttgtttttcagtgctactaaatttagtcaaaacaaaatttctttgattaaaaacagtattttaattaaattttcttcaggctgggcatggtggctcatgcttgtaataccagcacatgttggccaggatggtcttgatctcttgacctcgtgatctgcccgcctcggcctcccaaagttctgggattacagacgtgagccaccatgcccggcatatatgaagttttaaaaaatcagaatacagaacaaaatttattgggagatgagcttctttctttctctcttcaacaccatcgccacatcacctccacatatacacacactgaaaagatactgaaaagacataataaccatgggaaatggagattactggattgttaaatgttctttttgcctgtctttattctctaactttgctataatgaacagaaattattttttgataagcaaaaaatattttaaatttaaacatgtaaagtaacttagtagttgtcttttcaaaatatgtaagaatcattagttcactagttggttaaatatgtttttaatccca

SEQ ID NO: 367682 - DNA, 331 bp, Homo sapiens
ccgggttcaagcaattctccacctcagcctcctgagcagctgggattacaggggagaaagggacatgctgctgctgatatacaacaggcagaaacaaatgatgccagatgtcctgtatcttgcacggttgttccacatgacagaactatctggctggcaattctactagactttgctagtctgtttatgctttcctactctccaaattgctgaacagaagacttttgagagtcagcagaaatcttccactttgcatggttctcttgatgtgaaatcatctatatagccccagaattggaaaagaaaaaaataaaaaaatggaaggaactgg

SEQ ID NO: 367683 - DNA, 298 bp, Homo sapiens
tctcccatcacaagcctggatatctaggaggaaaaaatggttttgtgggccaggctcagagccccactgctctgtgcagcctcaagacggggtgacctgtattgctgttgcttcagctccacccatggctaaaaggggtcaaggtacagctcagaccatttacacactctttctctcctgctgccatgtaagacatgccttgctttcccttaaccttctgccatgattgtaagtttcccgaggtgtccccagccatgtgaaactgtgagttaattaaagctcttttctttataaatta

SEQ ID NO: 367684 - DNA, 3008 bp, Homo sapiens
cagctctcgagcatcgttgccacccgacattagaagatcttcttgatcatttattgatagcagctctgggatatgagatcatcatcttccagacgaggaagccatagtaccttcctgtttctcgcgccccggcttttaaaaactccccagctctggtccactactccaccgagatttctcaaaagtcgccctcggagagtgatcccggggggtgctttgcgaagagggtgcagaaaatgaacggaggagcagctggcttgagggctgggaacactcgcgtgtgtgagagatttaggatgagtttgggaagaaagtgggggcccgaggattctagagagagcacagcccaggctgaggaggggaaagcgcggtggtccggaaatttgagcggctggggaaccaccttcgtgtctcctcagaggggcgggcgctgtcgcctaactggtccccaacggcgtcggagcagaggcaagatccaggggcactggcctcgccgcggtaccgggcgggtacccagcgggctcggctctatagagcccgaggccccgctgccgctgccgccgccgccagcagccgttgccgccgcctcggccaaaccatccttcagacacccgcgccgccgcctcacaacatgtccgccgctgccgctgccgctgccgctgctggaacggcgacggccgcctgggaactaatatggacagagccaggcacagtgggagtcgcagtggctgccgccgcggccgcgtagcccgaacgcagatcgtggaagccgaagacgcggcaacggtggtccctccagatgccagggaaggtttgcaggaagccgctcccgacaccctttgcgccaccggaagcctcgttccctcagatttccccctccctcccggaccgacttccgggtgtggctgccgcccttcccccacccacgccggcgggagccgcccgttcgcgctgccagcagcttccgcctgctacggtcctggcaagcacctcgggatcccattccttcacagggaccctagccagttaaagctgatacattcctgtgggtcaactatgcaactaactcagattttgagcaaacaaagctctcaagttggtgatcctcaggagtctctgcattagttggacagctcttctggaattatcttctaagtcaactgtgggttgggtaggtggctctgctgatttttcgctggacttccacatttgggaccagttggctgtcatcagctctagaaagggtgtggctgttttacattggctgttttcctcacattcctcaagcaggtaagcttaatcatgttctcatattgaagcagaaactgtttactcatttatctatttacttactgggtctcctgggcactaggtactgtaataaagaactggagaaatacagtcagatgggaagtagcccctgctgtcaaggagcttgccatctaatgggggagacaggcaagtaaaccaaagactacacagtgcagtatggtaagtgccatgattttgatgtgacagggcacagtggacgaccttccaaatcaaagcaagtaactaggggttgacaatggtaagtatcatagttgaagtatccttgaacaaggtttcaggaagaagaagaagggaatttcatgcagggaaacagccaaagctcagtgagtcaaaatatcacagcattcttggtaagcccaattgttttttctgttttgctattttggtggagagaaaggaacacataaaggaataacatgagagaaggctatttggggaagtgtagtagttaaggttctggctcaaacaacaactgcagctcataaagttgactttagtggaaggatactggggtatctcatggaatcttgggaactgttgaataaccagggaaactctgggaaactcactggtaggaatccataaactgtcctcctggtgggctgtaaacaactcaccctctatgcatctcacatcaaaattccagtttcttgggaaaacaagtctgtttgcccaatttgggtcatatttccacctccatgttactcaggcatgattcatctgcaagttatgtgtatagatattttgctactgttccacccttacgctgtgctggggagggaggtgtcactgtgagctgtgtcggtgccttaagagatatctgttgtgtcttattacttggttgcttttccccacatgtacaatgacaaaaatgccttcaacctatttgatccagccgttccagtacaactcctatacttgccatctttccaagcccaaaggtacatccagctgatggaaggagcatcttggtgttaatattcttttagtcatggtctctgaaagtaaaatgtctattcttctaattctggcacaatcttatctagctatagttcctcatggtcctgcactccatggactaaattgtaagtataattactaccaatgtactctataaataacttttggggccagggtggcaatagttgctagagaaaaaaaaaaaaaaaaaggaaggagaagaaaacagtgatagttcttattttaaaaggaaaaaaagaggcaggaggctctcttgaggccaggagtttaagaccagcctaggcagcatttcaagaccctgtctctactaaaaagtaaaaaaaaaatttagtcaggcatggtggcatgcacctgtagtcgtagctactcaggagactgaggtgggaggattgattgagctcaggagtttgaggctgcagtgagcaatcatcatgccattgcactccagcctgggcatcagagcaagaccttgtcttttaggaaaaaaaggcagggaagaggaataggtaatttttcagtgttcagacattccagcaatatgtgtggagtactcattctcactacagtttatgaggccatagctagtatgtatgactacccatccaagtttccctgcttacagttactattccaactgattggggggcttttcctaatagagtgatgtaagccttcatttttagacatctaagccc

SEQ ID NO: 367685 - DNA, 3004 bp, Homo sapiens
cagctctcgagcatcgttgccacccgacattagaagatcttcttgatcatttattgatagcagctctgggatatgagatcatcatcttccagacgaggaagccatagtaccttcctgtttctcgcgccccggcttttaaaaactccccagctctggtccactactccaccgagatttctcaaaagtcgccctcggagagtgatcccggggggtgctttgcgaagagggtgcagaaaatgaacggaggagcagctggcttgagggctgggaacactcgcgtgtgtgagagatttaggatgagtttgggaagaaagtgggggcccgaggattctagagagagcacagcccaggctgaggaggggaaagcgcggtggtccggaaatttgagcggctggggaaccaccttcgtgtctcctcagaggggcgggcgctgtcgcctaactggtccccaacggcgtcggagcagaggcaagatccaggggcactggcctcgccgcggtaccgggcgggtacccagcgggctcggctctatagagcccgaggccccgctgccgctgccgccgccgccagcagccgttgccgccgcctcggccaaaccatccttcagacacccgcgccgccgcctcacaacatgtccgccgctgccgctgccgctgccgctgctggaacggcgacggccgcctgggaactaatatggacagagccaggcacagtgggagtcgcagtggctgccgccgcggccgcgtagcccgaacgcagatcgtggaagccgaagacgcggcaacggtggtccctccagatgccagggaaggtttgcaggaagccgctcccgacaccctttgcgccaccggaagcctcgttccctcagatttccccctccctcccggaccgacttccgggtgtggctgccgcccttcccccacccacgccggcgggagccgcccgttcgcgctgccagcagcttccgcctgctacggtcctggcaagcacctcgggatcccattccttcacagggaccctagccaggcaagcgcgcgcctcactgtaccggagagctccaagcacgcgcttggtctggggcccggacgctacatctgggaagggttaaagctgatacattcctgtgggtcaactatgcaactaactcagattttgagcaaacaaagctctcaagttggtgatcctcaggagtctctgcattagttggacagctcttctggaattatcttctaagtcaactgtgggttgggtaggtggctctgctgatttttcgctggacttccacatttgggaccagttggctgtcatcagctctagaaagggtgtggctgttttacattggctgttttcctcacattcctcaagcaggtactgtaataaagaactggagaaatacagtcagatgggaagtagcccctgctgtcaaggagcttgccatctaatgggggagacaggcaagtaaaccaaagactacacagtgcagtatggtaagtgccatgattttgatgtgacagggcacagtggacgaccttccaaatcaaagcaagtaactaggggttgacaatggtaagtatcatagttgaagtatccttgaacaaggtttcaggaagaagaagaagggaatttcatgcagggaaacagccaaagctcagtgagtcaaaatatcacagcattcttggtaagcccaattgttttttctgttttgctattttggtggagagaaaggaacacataaaggaataacatgagagaaggctatttggggaagtgtagtagttaaggttctggctcaaacaacaactgcagctcataaagttgactttagtggaaggatactggggtatctcatggaatcttgggaactgttgaataaccagggaaactctgggaaactcactggtaggaatccataaactgtcctcctggtgggctgtaaacaactcaccctctatgcatctcacatcaaaattccagtttcttgggaaaacaagtctgtttgcccaatttgggtcatatttccacctccatgttactcaggcatgattcatctgcaagttatgtgtatagatattttgctactgttccacccttacgctgtgctggggagggaggtgtcactgtgagctgtgtcggtgccttaagagatatctgttgtgtcttattacttggttgcttttccccacatgtacaatgacaaaaatgccttcaacctatttgatccagccgttccagtacaactcctatacttgccatctttccaagcccaaaggtacatccagctgatggaaggagcatcttggtgttaatattcttttagtcatggtctctgaaagtaaaatgtctattcttctaattctggcacaatcttatctagctatagttcctcatggtcctgcactccatggactaaattgtaagtataattactaccaatgtactctataaataacttttggggccagggtggcaatagttgctagagaaaaaaaaaaaaaaaaaggaaggagaagaaaacagtgatagttcttattttaaaaggaaaaaaagaggcaggaggctctcttgaggccaggagtttaagaccagcctaggcagcatttcaagaccctgtctctactaaaaagtaaaaaaaaaatttagtcaggcatggtggcatgcacctgtagtcgtagctactcaggagactgaggtgggaggattgattgagctcaggagtttgaggctgcagtgagcaatcatcatgccattgcactccagcctgggcatcagagcaagaccttgtcttttaggaaaaaaaggcagggaagaggaataggtaatttttcagtgttcagacattccagcaatatgtgtggagtactcattctcactacagtttatgaggccatagctagtatgtatgactacccatccaagtttccctgcttacagttactattccaactgattggggggcttttcctaatagagtgatgtaagccttcatttttagacatctaagccc

SEQ ID NO: 367686 - DNA, 2159 bp, Homo sapiens
cagctctcgagcatcgttgccacccgacattagaagatcttcttgatcatttattgatagcagctctgggatatgagatcatcatcttccagacgaggaagccatagtaccttcctgtttctcgcgccccggcttttaaaaactccccagctctggtccactactccaccgagatttctcaaaagtcgccctcggagagtgatcccggggggtgctttgcgaagagggtgcagaaaatgaacggaggagcagctggcttgagggctgggaacactcgcgtgtgtgagagatttaggatgagtttgggaagaaagtgggggcccgaggattctagagagagcacagcccaggctgaggaggggaaagcgcggtggtccggaaatttgagcggctggggaaccaccttcgtgtctcctcagaggggcgggcgctgtcgcctaactggtccccaacggcgtcggagcagaggcaagatccaggggcactggcctcgccgcggtaccgggcgggtacccagcgggctcggctctatagagcccgaggccccgctgccgctgccgccgccgccagcagccgttgccgccgcctcggccaaaccatccttcagacacccgcgccgccgcctcacaacatgtccgccgctgccgctgccgctgccgctgctggaacggcgacggccgcctgggaactaatatggacagagccaggcacagtgggagtcgcagtggctgccgccgcggccgcgtagcccgaacgcagatcgtggaagccgaagacgcggcaacggtggtccctccagatgccagggaaggtttgcaggaagccgctcccgacaccctttgcgccaccggaagcctcgttccctcagatttccccctccctcccggaccgacttccgggtgtggctgccgcccttcccccacccacgccggcgggagccgcccgttcgcgctgccagcagcttccgcctgctacggtcctggcaagcacctcgggatcccattccttcacagggaccctagccagttaaagctgatacattcctgtgggtcaactatgcaactaactcagattttgagcaaacaaagctctcaagttggtgatcctcaggagtctctgcattagttggacagctcttctggaattatcttctaagtcaactgtgggttgggtaggtggctctgctgatttttcgctggacttccacatttgggaccagttggctgtcatcagctctagaaagggtgtggctgttttacattggctgttttcctcacattcctcaagcaggtactgtaataaagaactggagaaatacagtcagatgggaagtagcccctgctgtcaaggagcttgccatctaatgggggagacaggcaagtaaaccaaagactacacagtgcagtatgaatttcctttcatctctggtaaaagtcagctctctaactactgcatctcacagctgaacagataactgataccgtggttccagaagatttttctaacagtgtttgcaagctataaaatagtgctttcacttagaaaaggctagacgtggtggttcatgcctgtaatcccagcactttgagaggccgaggcaccatgctgggagataaggatccaacataagacaaacagtgctgatgcttttggaaagctcatattcaagctggggagacaaacaacatacaagctcatagatggaaggcttgtctcagataagactttggacttggacttttgggttaatgctggaatgagttaagactttggggttctgttgggaaggcatgattgtgttttgaaatgtgagaaggacaagagatctgggaggggccagggttggaatgatatggcttggctctgtgtccccacccgaatctcatctcaaattgtaatcctcacatgtggaggaaggtacctggtgggagctgattggatcatgggggtggttcccccaagctgttctcatgatagtaagttcattctcatgagatctgatggtttaaaagtgtggcatttacacactctttctctcctgctgccatgtaagacatgccttgctttcccttaaccttctgccatgattgtaagtttcccgaggtgtccccagccatgtgaaactgtgagttaattaaagctcttttctttataaatta

SEQ ID NO: 367687 - DNA, 2214 bp, Homo sapiens
cagctctcgagcatcgttgccacccgacattagaagatcttcttgatcatttattgatagcagctctgggatatgagatcatcatcttccagacgaggaagccatagtaccttcctgtttctcgcgccccggcttttaaaaactccccagctctggtccactactccaccgagatttctcaaaagtcgccctcggagagtgatcccggggggtgctttgcgaagagggtgcagaaaatgaacggaggagcagctggcttgagggctgggaacactcgcgtgtgtgagagatttaggatgagtttgggaagaaagtgggggcccgaggattctagagagagcacagcccaggctgaggaggggaaagcgcggtggtccggaaatttgagcggctggggaaccaccttcgtgtctcctcagaggggcgggcgctgtcgcctaactggtccccaacggcgtcggagcagaggcaagatccaggggcactggcctcgccgcggtaccgggcgggtacccagcgggctcggctctatagagcccgaggccccgctgccgctgccgccgccgccagcagccgttgccgccgcctcggccaaaccatccttcagacacccgcgccgccgcctcacaacatgtccgccgctgccgctgccgctgccgctgctggaacggcgacggccgcctgggaactaatatggacagagccaggcacagtgggagtcgcagtggctgccgccgcggccgcgtagcccgaacgcagatcgtggaagccgaagacgcggcaacggtggtccctccagatgccagggaaggtttgcaggaagccgctcccgacaccctttgcgccaccggaagcctcgttccctcagatttccccctccctcccggaccgacttccgggtgtggctgccgcccttcccccacccacgccggcgggagccgcccgttcgcgctgccagcagcttccgcctgctacggtcctggcaagcacctcgggatcccattccttcacagggaccctagccagttaaagctgatacattcctgtgggtcaactatgcaactaactcagattttgagcaaacaaagctctcaagttggtgatcctcaggagtctctgcattagttggacagctcttctggaattatcttctaagtcaactgtgggttgggtaggtggctctgctgatttttcgctggacttccacatttgggaccagttggctgtcatcagctctagaaagggtgtggctgttttacattggctgttttcctcacattcctcaagcaggtactgtaataaagaactggagaaatacagtcagatgggaagtagcccctgctgtcaaggagcttgccatctaatgggggagacaggcaagtaaaccaaagactacacagtgcagtatgaatttcctttcatctctggtaaaagtcagctctctaactactgcatctcacagctgaacagataactgataccgtggttccagaagatttttctaacagtgtttgcaagctataaaatagtgctttcacttagaaaaggctagacgtggtggttcatgcctgtaatcccagcactttgagaggccgaggcaccatgctgggagataaggatccaacataagacaaacagtgctgatgcttttggaaagctcatattcaagctggggagacaaacaacatacaagctcatagatggaaggcttgtctcagataagactttggacttggacttttgggttaatgctggaatgagttaagactttggggttctgttgggaaggcatgattgtgttttgaaatgtgagaaggacaagagatctgggaggggccagggttggaatgatatggcttggctctgtgtccccacccgaatctcatctcaaattgtaatcctcacatgtggaggaaggtacctggtgggagctgattggatcatgggggtggttcccccaagctgttctcatgatagtaagttcattctcatgagatctgatggtttaaaagtgtggcatttacacactctttctctcctgctgccatgtaagacatgccttgctttcccttaaccttctgccatgattgtaagtttcccgaggtgtccccagccatgtgaaactgtgagttaattaaagctcttttctttataaattaaaaaaaaaacccaagggcggccgctctagagtatcctaggagggcccaagcttac

SEQ ID NO: 367688 - DNA, 1900 bp, Homo sapiens
cagctctcgagcatcgttgccacccgacattagaagatcttcttgatcatttattgatagcagctctgggatatgagatcatcatcttccagacgaggaagccatagtaccttcctgtttctcgcgccccggcttttaaaaactccccagctctggtccactactccaccgagatttctcaaaagtcgccctcggagagtgatcccggggggtgctttgcgaagagggtgcagaaaatgaacggaggagcagctggcttgagggctgggaacactcgcgtgtgtgagagatttaggatgagtttgggaagaaagtgggggcccgaggattctagagagagcacagcccaggctgaggaggggaaagcgcggtggtccggaaatttgagcggctggggaaccaccttcgtgtctcctcagaggggcgggcgctgtcgcctaactggtccccaacggcgtcggagcagaggcaagatccaggggcactggcctcgccgcggtaccgggcgggtacccagcgggctcggctctatagagcccgaggccccgctgccgctgccgccgccgccagcagccgttgccgccgcctcggccaaaccatccttcagacacccgcgccgccgcctcacaacatgtccgccgctgccgctgccgctgccgctgctggaacggcgacggccgcctgggaactaatatggacagagccaggcacagtgggagtcgcagtggctgccgccgcggccgcgtagcccgaacgcagatcgtggaagccgaagacgcggcaacggtggtccctccagatgccagggaaggtttgcaggaagccgctcccgacaccctttgcgccaccggaagcctcgttccctcagatttccccctccctcccggaccgacttccgggtgtggctgccgcccttcccccacccacgccggcgggagccgcccgttcgcgctgccagcagcttccgcctgctacggtcctggcaagcacctcgggatcccattccttcacagggaccctagccagttaaagctgatacattcctgtgggtcaactatgcaactaactcagattttgagcaaacaaagctctcaagttggtgatcctcaggagtctctgcattagttggacagctcttctggaattatcttctaagtcaactgtgggttgggtaggtggctctgctgatttttcgctggacttccacatttgggaccagttggctgtcatcagctctagaaagggtgtggctgttttacattggctgttttcctcacattcctcaagcaggtactgtaataaagaactggagaaatacagtcagatgggaagtagcccctgctgtcaaggagcttgccatctaatgggggagacaggcaagtaaaccaaagactacacagtgcagtatgaatttcctttcatctctggtaaaagtcagctctctaactactgcatctcacagctgaacagataactgataccgtggttccagaagatttttctaacagtgtttgcaagctataaaatagtgctttcacttagaaaaggctagacgtggtggttcatgcctgtaatcccagcactttgagaggccgaggcaccatgctgggagataaggatccaacataagacaaacagtgctgatgcttttggaaagctcatattcaagctggggagacaaacaacatacaagagggctctgagagatttcatttctgtcctgctgatgaagtctacgttcattcagggcctgctgtggaagaccagccccaaagttgctgaacagaagacttttgagagtcagcagaaatcttccactttgcatggttctcttgatgtgaaatcatctatatagccccagaattggaaaagaaaaaaataaaaaaatggaaggaactgg

SEQ ID NO: 367689 - DNA, 1910 bp, Homo sapiens
cagctctcgagcatcgttgccacccgacattagaagatcttcttgatcatttattgatagcagctctgggatatgagatcatcatcttccagacgaggaagccatagtaccttcctgtttctcgcgccccggcttttaaaaactccccagctctggtccactactccaccgagatttctcaaaagtcgccctcggagagtgatcccggggggtgctttgcgaagagggtgcagaaaatgaacggaggagcagctggcttgagggctgggaacactcgcgtgtgtgagagatttaggatgagtttgggaagaaagtgggggcccgaggattctagagagagcacagcccaggctgaggaggggaaagcgcggtggtccggaaatttgagcggctggggaaccaccttcgtgtctcctcagaggggcgggcgctgtcgcctaactggtccccaacggcgtcggagcagaggcaagatccaggggcactggcctcgccgcggtaccgggcgggtacccagcgggctcggctctatagagcccgaggccccgctgccgctgccgccgccgccagcagccgttgccgccgcctcggccaaaccatccttcagacacccgcgccgccgcctcacaacatgtccgccgctgccgctgccgctgccgctgctggaacggcgacggccgcctgggaactaatatggacagagccaggcacagtgggagtcgcagtggctgccgccgcggccgcgtagcccgaacgcagatcgtggaagccgaagacgcggcaacggtggtccctccagatgccagggaaggtttgcaggaagccgctcccgacaccctttgcgccaccggaagcctcgttccctcagatttccccctccctcccggaccgacttccgggtgtggctgccgcccttcccccacccacgccggcgggagccgcccgttcgcgctgccagcagcttccgcctgctacggtcctggcaagcacctcgggatcccattccttcacagggaccctagccagttaaagctgatacattcctgtgggtcaactatgcaactaactcagattttgagcaaacaaagctctcaagttggtgatcctcaggagtctctgcattagttggacagctcttctggaattatcttctaagtcaactgtgggttgggtaggtggctctgctgatttttcgctggacttccacatttgggaccagttggctgtcatcagctctagaaagggtgtggctgttttacattggctgttttcctcacattcctcaagcaggtactgtaataaagaactggagaaatacagtcagatgggaagtagcccctgctgtcaaggagcttgccatctaatgggggagacaggcaagtaaaccaaagactacacagtgcagtatgaatttcctttcatctctggtaaaagtcagctctctaactactgcatctcacagctgaacagataactgataccgtggttccagaagatttttctaacagtgtttgcaagctataaaatagtgctttcacttagaaaaggctagacgtggtggttcatgcctgtaatcccagcactttgagaggccgaggcaccatgctgggagataaggatccaacataagacaaacagtgctgatgcttttggaaagctcatattcaagctggggagacaaacaacatacaagagggctctgagagatttcatttctgtcctgctgatgaagtctacgttcattcagggcctgctgtggaagaccagccccaaaggtgtgttatactaagtaggcagattctatctccatctaattcctaagttaggcttttcttactcctagagttctgtatagcatggccttcttatttcttgtaacattgcttttgggaataaaatgtttgaagaaa

SEQ ID NO: 367690 - DNA, 2037 bp, Homo sapiens
cagctctcgagcatcgttgccacccgacattagaagatcttcttgatcatttattgatagcagctctgggatatgagatcatcatcttccagacgaggaagccatagtaccttcctgtttctcgcgccccggcttttaaaaactccccagctctggtccactactccaccgagatttctcaaaagtcgccctcggagagtgatcccggggggtgctttgcgaagagggtgcagaaaatgaacggaggagcagctggcttgagggctgggaacactcgcgtgtgtgagagatttaggatgagtttgggaagaaagtgggggcccgaggattctagagagagcacagcccaggctgaggaggggaaagcgcggtggtccggaaatttgagcggctggggaaccaccttcgtgtctcctcagaggggcgggcgctgtcgcctaactggtccccaacggcgtcggagcagaggcaagatccaggggcactggcctcgccgcggtaccgggcgggtacccagcgggctcggctctatagagcccgaggccccgctgccgctgccgccgccgccagcagccgttgccgccgcctcggccaaaccatccttcagacacccgcgccgccgcctcacaacatgtccgccgctgccgctgccgctgccgctgctggaacggcgacggccgcctgggaactaatatggacagagccaggcacagtgggagtcgcagtggctgccgccgcggccgcgtagcccgaacgcagatcgtggaagccgaagacgcggcaacggtggtccctccagatgccagggaaggtttgcaggaagccgctcccgacaccctttgcgccaccggaagcctcgttccctcagatttccccctccctcccggaccgacttccgggtgtggctgccgcccttcccccacccacgccggcgggagccgcccgttcgcgctgccagcagcttccgcctgctacggtcctggcaagcacctcgggatcccattccttcacagggaccctagccagttaaagctgatacattcctgtgggtcaactatgcaactaactcagattttgagcaaacaaagctctcaagttggtgatcctcaggagtctctgcattagttggacagctcttctggaattatcttctaagtcaactgtgggttgggtaggtggctctgctgatttttcgctggacttccacatttgggaccagttggctgtcatcagctctagaaagggtgtggctgttttacattggctgttttcctcacattcctcaagcaggtactgtaataaagaactggagaaatacagtcagatgggaagtagcccctgctgtcaaggagcttgccatctaatgggggagacaggcaagtaaaccaaagactacacagtgcagtatgaatttcctttcatctctggtaaaagtcagctctctaactactgcatctcacagctgaacagataactgataccgtggttccagaagatttttctaacagtgtttgcaagctataaaatagtgctttcacttagaaaaggctagacgtggtggttcatgcctgtaatcccagcactttgagaggccgaggcaccatgctgggagataaggatccaacataagacaaacagtgctgatgcttttggaaagctcatattcaagctggggagacaaacaacatacaaaagttctcatcatgatactttaaggatgaggacagctgatgtggctggcctgaaaaataagaaactcactctgtcactcaggctggagtgcaatggcacgatctcggctcactgcaacctctgcctcccgagttcaggagggctctgagagatttcatttctgtcctgctgatgaagtctacgttcattcagggcctgctgtggaagaccagccccaaagttgctgaacagaagacttttgagagtcagcagaaatcttccactttgcatggttctcttgatgtgaaatcatctatatagccccagaattggaaaagaaaaaaataaaaaaatggaaggaactgg

SEQ ID NO: 367691 - DNA, 2204 bp, Homo sapiens
cagctctcgagcatcgttgccacccgacattagaagatcttcttgatcatttattgatagcagctctgggatatgagatcatcatcttccagacgaggaagccatagtaccttcctgtttctcgcgccccggcttttaaaaactccccagctctggtccactactccaccgagatttctcaaaagtcgccctcggagagtgatcccggggggtgctttgcgaagagggtgcagaaaatgaacggaggagcagctggcttgagggctgggaacactcgcgtgtgtgagagatttaggatgagtttgggaagaaagtgggggcccgaggattctagagagagcacagcccaggctgaggaggggaaagcgcggtggtccggaaatttgagcggctggggaaccaccttcgtgtctcctcagaggggcgggcgctgtcgcctaactggtccccaacggcgtcggagcagaggcaagatccaggggcactggcctcgccgcggtaccgggcgggtacccagcgggctcggctctatagagcccgaggccccgctgccgctgccgccgccgccagcagccgttgccgccgcctcggccaaaccatccttcagacacccgcgccgccgcctcacaacatgtccgccgctgccgctgccgctgccgctgctggaacggcgacggccgcctgggaactaatatggacagagccaggcacagtgggagtcgcagtggctgccgccgcggccgcgtagcccgaacgcagatcgtggaagccgaagacgcggcaacggtggtccctccagatgccagggaaggtttgcaggaagccgctcccgacaccctttgcgccaccggaagcctcgttccctcagatttccccctccctcccggaccgacttccgggtgtggctgccgcccttcccccacccacgccggcgggagccgcccgttcgcgctgccagcagcttccgcctgctacggtcctggcaagcacctcgggatcccattccttcacagggaccctagccagttaaagctgatacattcctgtgggtcaactatgcaactaactcagattttgagcaaacaaagctctcaagttggtgatcctcaggagtctctgcattagttggacagctcttctggaattatcttctaagtcaactgtgggttgggtaggtggctctgctgatttttcgctggacttccacatttgggaccagttggctgtcatcagctctagaaagggtgtggctgttttacattggctgttttcctcacattcctcaagcaggtactgtaataaagaactggagaaatacagtcagatgggaagtagcccctgctgtcaaggagcttgccatctaatgggggagacaggcaagtaaaccaaagactacacagtgcagtatgaatttcctttcatctctggtaaaagtcagctctctaactactgcatctcacagctgaacagataactgataccgtggttccagaagatttttctaacagtgtttgcaagctataaaatagtgctttcacttagaaaaggctagacgtggtggttcatgcctgtaatcccagcactttgagaggccgaggcaccatgctgggagataaggatccaacataagacaaacagtgctgatgcttttggaaagctcatattcaagctggggagacaaacaacatacaaaagttctcatcatgatactttaaggatgaggacagctgatgtggctggcctgaaaaataagtagagatgcggtttcgccatgttggccgggctggtcttgaagtcctgacctcaggtgattcacctacctcagcttcccgacgtactgggtttacaggcatgagccaccgttcccggccaaggagggctctgagagatttcatttctgtcctgctgatgaagtctacgttcattcagggcctgctgtggaagaccagccccaaaggagaagttttgctctgttgcccaggctggagtgcagtggtgcaatctcagcttactgcagcctctgcctcccaggttcaagcaattctcctgcctcagccacctgagcagctgggattacagttgctgaacagaagacttttgagagtcagcagaaatcttccactttgcatggttctcttgatgtgaaatcatctatatagccccagaattggaaaagaaaaaaataaaaaaatggaaggaactgg

SEQ ID NO: 367692 - DNA, 2159 bp, Homo sapiens
cagctctcgagcatcgttgccacccgacattagaagatcttcttgatcatttattgatagcagctctgggatatgagatcatcatcttccagacgaggaagccatagtaccttcctgtttctcgcgccccggcttttaaaaactccccagctctggtccactactccaccgagatttctcaaaagtcgccctcggagagtgatcccggggggtgctttgcgaagagggtgcagaaaatgaacggaggagcagctggcttgagggctgggaacactcgcgtgtgtgagagatttaggatgagtttgggaagaaagtgggggcccgaggattctagagagagcacagcccaggctgaggaggggaaagcgcggtggtccggaaatttgagcggctggggaaccaccttcgtgtctcctcagaggggcgggcgctgtcgcctaactggtccccaacggcgtcggagcagaggcaagatccaggggcactggcctcgccgcggtaccgggcgggtacccagcgggctcggctctatagagcccgaggccccgctgccgctgccgccgccgccagcagccgttgccgccgcctcggccaaaccatccttcagacacccgcgccgccgcctcacaacatgtccgccgctgccgctgccgctgccgctgctggaacggcgacggccgcctgggaactaatatggacagagccaggcacagtgggagtcgcagtggctgccgccgcggccgcgtagcccgaacgcagatcgtggaagccgaagacgcggcaacggtggtccctccagatgccagggaaggtttgcaggaagccgctcccgacaccctttgcgccaccggaagcctcgttccctcagatttccccctccctcccggaccgacttccgggtgtggctgccgcccttcccccacccacgccggcgggagccgcccgttcgcgctgccagcagcttccgcctgctacggtcctggcaagcacctcgggatcccattccttcacagggaccctagccagttaaagctgatacattcctgtgggtcaactatgcaactaactcagattttgagcaaacaaagctctcaagttggtgatcctcaggagtctctgcattagttggacagctcttctggaattatcttctaagtcaactgtgggttgggtaggtggctctgctgatttttcgctggacttccacatttgggaccagttggctgtcatcagctctagaaagggtgtggctgttttacattggctgttttcctcacattcctcaagcaggtactgtaataaagaactggagaaatacagtcagatgggaagtagcccctgctgtcaaggagcttgccatctaatgggggagacaggcaagtaaaccaaagactacacagtgcagtatgaatttcctttcatctctggtaaaagtcagctctctaactactgcatctcacagctgaacagataactgataccgtggttccagaagatttttctaacagtgtttgcaagctataaaatagtgctttcacttagaaaaggctagacgtggtggttcatgcctgtaatcccagcactttgagaggccgaggcaccatgctgggagataaggatccaacataagacaaacagtgctgatgcttttggaaagctcatattcaagctggggagacaaacaacatacaaaagttctcatcatgatactttaaggatgaggacagctgatgtggctggcctgaaaaataagaaactcactctgtcactcaggctggagtgcaatggcacgatctcggctcactgcaacctctgcctcccgagttcaggagggctctgagagatttcatttctgtcctgctgatgaagtctacgttcattcagggcctgctgtggaagaccagccccaaaggagaagttttgctctgttgcccaggctggagtgcagtggtgcaatctcagcttactgcagcctctgcctcccaggttcaagcaattctcctgcctcagccacctgagcagctgggattacagttgctgaacagaagacttttgagagtcagcagaaatcttccactttgcatggttctcttgatgtgaaatcatctatatagccccagaattggaaaagaaaaaaataaaaaaatggaaggaactgg

SEQ ID NO: 367693 - DNA, 1564 bp, Homo sapiens
cagctctcgagcatcgttgccacccgacattagaagatcttcttgatcatttattgatagcagctctgggatatgagatcatcatcttccagacgaggaagccatagtaccttcctgtttctcgcgccccggcttttaaaaactccccagctctggtccactactccaccgagatttctcaaaagtcgccctcggagagtgatcccggggggtgctttgcgaagagggtgcagaaaatgaacggaggagcagctggcttgagggctgggaacactcgcgtgtgtgagagatttaggatgagtttgggaagaaagtgggggcccgaggattctagagagagcacagcccaggctgaggaggggaaagcgcggtggtccggaaatttgagcggctggggaaccaccttcgtgtctcctcagaggggcgggcgctgtcgcctaactggtccccaacggcgtcggagcagaggcaagatccaggggcactggcctcgccgcggtaccgggcgggtacccagcgggctcggctctatagagcccgaggccccgctgccgctgccgccgccgccagcagccgttgccgccgcctcggccaaaccatccttcagacacccgcgccgccgcctcacaacatgtccgccgctgccgctgccgctgccgctgctggaacggcgacggccgcctgggaactaatatggacagagccaggcacagtgggagtcgcagtggctgccgccgcggccgcgtagcccgaacgcagatcgtggaagccgaagacgcggcaacggtggtccctccagatgccagggaaggtttgcaggaagccgctcccgacaccctttgcgccaccggaagcctcgttccctcagatttccccctccctcccggaccgacttccgggtgtggctgccgcccttcccccacccacgccggcgggagccgcccgttcgcgctgccagcagcttccgcctgctacggtcctggcaagcacctcgggatcccattccttcacagggaccctagccaggcaagcgcgcgcctcactgtaccggagagctccaagcacgcgcttggtctggggcccggacgctacatctgggaaggggtgggtggctgggtagataggcgaggaaggatcgtctctaccctctctcaagtagctgaggcctccgaaaccttccctagctggatttggggacagaggagcgctgttaaagctgatacattcctgtgggtcaactatgcaactaactcagattttgaggtgaataacaaatctctttatctatagatgataagtttaaattgtgatgcaaataaatttttctttcaaatggtgtgaatgttgaatctaattcagtcctgctaattttgtttaaaaagcatttgaagcagatggaactggaaagcctacttctgtaaattccatttactcattcatgcattgctttcattcaagaaatgtttattagtgtctaccatatactttgctagttactggggttatgaggggatatggcaataaacaagaaagacaatgtctattgcctgaagaagtaatacca

SEQ ID NO: 367694 - DNA, 1269 bp, Homo sapiens
cgcatgttcccagtcctaatatacattatgtgataagacacaagtaaatcatcctgaagttaagtctttaatgagaaatgcaaataaagcatttctcaataaattatgggaagagaatcaactgaagaataaacatctttagtaaatctttggctcgtgtgcattaaccaatactcttgaaaaccaggattaatttactgtaccttcttaatattcctttgaaattccttatggcgcacaggtagcgtagaaaataactgcttcacgctgactgtggtccctctggagagggggtagggggtattctgggatgattttcccatcgtgatcaaacaccagtcgagtcccaaccttcgccgatacgtggcaggtagaaatggtgacatcattaagccttcgaagttttcttcttctaccccacatccattgcctgaaacttcaatgagatccattccatagtccttaagctttagattaactcttaggtgacaaagccaggattgaagctcatgcggtctggctccagaacaactcttcttcatagttacgttatactgcccctgcattgttggtattgaaaataactgataccgtggttccagaagatttttctaacagtgtttgcaagctataaaatagtgctttcacttagaaaaggctagacgtggtggttcatgcctgtaatcccagcactttgagaggccgaggcaccatgctgggagataaggatccaacataagacaaacagtgctgatgcttttggaaagctcatattcaagctggggagacaaacaacatacaagctcatagatggaaggcttgtctcagataagactttggacttggacttttgggttaatgctggaatgagttaagactttggggttctgttgggaaggcatgattgtgttttgaaatgtgagaaggacaagagatctgggaggggccagggttggaatgatatggcttggctctgtgtccccacccgaatctcatctcaaattgtaatcctcacatgtggaggaaggtacctggtgggagctgattggatcatgggggtggttcccccaagctgttctcatgatagtaagttcattctcatgagatctgatggtttaaaagtgtggcatttacacactctttctctcctgctgccatgtaagacatgccttgctttcccttaaccttctgccatgattgtaagtttcccgaggtgtccccagccatgtgaaactgtgagttaattaaagctcttttctttataaatta

SEQ ID NO: 367695 - DNA, 1011 bp, Homo sapiens
cgcatgttcccagtcctaatatacattatgtgataagacacaagtaaatcatcctgaagttaagtctttaatgagaaatgcaaataaagcatttctcaataaattatgggaagagaatcaactgaagaataaacatctttagtaaatctttggctcgtgtgcattaaccaatactcttgaaaaccaggattaatttactgtaccttcttaatattcctttgaaattccttatggcgcacaggtagcgtagaaaataactgcttcacgctgactgtggtccctctggagagggggtagggggtattctgggatgattttcccatcgtgatcaaacaccagtcgagtcccaaccttcgccgatacgtggcaggtagaaatggtgacatcattaagccttcgaagttttcttcttctaccccacatccattgcctgaaacttcaatgagatccattccatagtccttaagctttagattaactcttaggtgacaaagccaggattgaagctcatgcggtctggctccagaacaactcttcttcatagttacgttatactgcccctgcattgttggtattgaaaataactgataccgtggttccagaagatttttctaacagtgtttgcaagctataaaatagtgctttcacttagaaaaggcatgagccaccgttcccggccaaggtggctgtagctaccttctgcatatggatatccagttttcccagcaccacttattaaagagactgtcttttctgcagtgtatattcttggcaccgttgttgaaaatgaattcattgtaggtgtgtgggtttgtttctgggttctctattctgttcaacttgtctatgtgtctgtttttatgccagtaccgtgtcattttagttaccagagctctgcagtataatttgaaaccaggtcatgtgattcctccagttttgtggtattaggataggtttggctattctgagtcttttgtggttccatataaattttagaattttttttttcta

SEQ ID NO: 367696 - DNA, 1131 bp, Homo sapiens
cgcatgttcccagtcctaatatacattatgtgataagacacaagtaaatcatcctgaagttaagtctttaatgagaaatgcaaataaagcatttctcaataaattatgggaagagaatcaactgaagaataaacatctttagtaaatctttggctcgtgtgcattaaccaatactcttgaaaaccaggattaatttactgtaccttcttaatattcctttgaaattccttatggcgcacaggtagcgtagaaaataactgcttcacgctgactgtggtccctctggagagggggtagggggtattctgggatgattttcccatcgtgatcaaacaccagtcgagtcccaaccttcgccgatacgtggcaggtagaaatggtgacatcattaagccttcgaagttttcttcttctaccccacatccattgcctgaaacttcaatgagatccattccatagtccttaagctttagattaactcttaggtgacaaagccaggattgaagctcatgcggtctggctccagaacaactcttcttcatagttacgttatactgcccctgcattgttggtattgaaaacggagtcttgctctgtcgccaggctggagtgcagtgacacgatctcagctcactgcaacctccacctcccaggttcaagcgattctcctgcctcagcctcccaagtagctggaactacagataactgataccgtggttccagaagatttttctaacagtgtttgcaagctataaaatagtgctttcacttagaaaaggctagacgtggtggttcatgcctgtaatcccagcactttgagaggccgaggcaccatgctgggagataaggatccaacataagacaaacagtgctgatgcttttggaaagctcatattcaagctggggagacaaacaacatacaagagggctctgagagatttcatttctgtcctgctgatgaagtctacgttcattcagggcctgctgtggaagaccagccccaaagttgctgaacagaagacttttgagagtcagcagaaatcttccactttgcatggttctcttgatgtgaaatcatctatatagccccagaattggaaaagaaaaaaataaaaaaatggaaggaactgg

SEQ ID NO: 367697 - DNA, 1195 bp, Homo sapiens
cgcatgttcccagtcctaatatacattatgtgataagacacaagtaaatcatcctgaagttaagtctttaatgagaaatgcaaataaagcatttctcaataaattatgggaagagaatcaactgaagaataaacatctttagtaaatctttggctcgtgtgcattaaccaatactcttgaaaaccaggattaatttactgtaccttcttaatattcctttgaaattccttatggcgcacaggtagcgtagaaaataactgcttcacgctgactgtggtccctctggagagggggtagggggtattctgggatgattttcccatcgtgatcaaacaccagtcgagtcccaaccttcgccgatacgtggcaggtagaaatggtgacatcattaagccttcgaagttttcttcttctaccccacatccattgcctgaaacttcaatgagatccattccatagtccttaagctttagattaactcttaggtgacaaagccaggattgaagctcatgcggtctggctccagaacaactcttcttcatagttacgttatactgcccctgcattgttggtattgaaaacggagtcttgctctgtcgccaggctggagtgcagtgacacgatctcagctcactgcaacctccacctcccaggttcaagcgattctcctgcctcagcctcccaagtagctggaactacaggcacgcaccacaacacccagctaatttttgtattttcagtagagacagggtttcaccatgttggccaggatggtcttgatctcttgacctcgtgatctgcccgcctcggcctcccaaagttctgggattacagacgtgagccaccatgcccggcatatatgaagttttaaaaaatcagaatacagaacaaaatttattgggagatgagcttctttctttctctcttcaacaccatcgccacatcacctccacatatacacacactgaaaagatactgaaaagacataataaccatgggaaatggagattactggattgttaaatgttctttttgcctgtctttattctctaactttgctataatgaacagaaattattttttgataagcaaaaaatattttaaatttaaacatgtaaagtaacttagtagttgtcttttcaaaatatgtaagaatcattagttcactagttggttaaatatgtttttaatccca

SEQ ID NO: 367698 - DNA, 740 bp, Homo sapiens
aaagtatggtaaattccttcaaccaaacatcaacactattcaaccaataaaaatgacactatagttaatatatttgaaaagatgttcataatatatgaagtttttgttttgttttgttttcttagacggagtcttgctctgtcgccaggctggagtgcagtgacacgatctcagctcactgcaacctccacctcccaggttcaagcgattctcctgcctcagcctcccaagtagctggaactacaggcacgcaccacaacacccagctaatttttgtattttcagtagagacagggtttcaccatgttggccaggatggtcttgatctcttgacctcgtgatctgcccgcctcggcctcccaaagttctgggattacagacgtgagccaccatgcccggcatatatgaagttttaaaaaatcagaatacagaacaaaatttattgggagatgagcttctttctttctctcttcaacaccatcgccacatcacctccacatatacacacactgaaaagatactgaaaagacataataaccatgggaaatggagattactggattgttaaatgttctttttgcctgtctttattctctaactttgctataatgaacagaaattattttttgataagcaaaaaatattttaaatttaaacatgtaaagtaacttagtagttgtcttttcaaaatatgtaagaatcattagttcactagttggttaaatatgtttttaatccca

SEQ ID NO: 367699 - DNA, 407 bp, Homo sapiens
ccgggttcaagcaattctccacctcagcctcctgagcagctgggattacaggggagaaagggacatgctgctgctgatatacaacaggcagaaacaaatgatgccagatgtcctgtatcttgcacggttgttccacatgacagaactatctggctggcaattctactagactttgctagtctgtttatgctttcctactctccaaagaatgagactacatacactaaaaaaccaaaaagcctaaaaaaagagatgatattttaatttcaaaagcttaataatttgctgaacagaagacttttgagagtcagcagaaatcttccactttgcatggttctcttgatgtgaaatcatctatatagccccagaattggaaaagaaaaaaataaaaaaatggaaggaactgg

SEQ ID NO: 367700 - DNA, 626 bp, Homo sapiens
cgcatgttcccagtcctaatatacattatgtgataagacacaagtaaatcatcctgaagttaagtctttaatgagaaatgcaaataaagcatttctcaataaattatgggaagagaatcaactgaagaataaacatctttagtaaatctttggctcgtgtgcattaaccaatactcttgaaaaccaggattaatttactgtaccttcttaatattcctttgaaattccttatggcgcacaggtagcgtagaaaataactgcttcacgctgactgtggtccctctggagagggggtagggggtattctgggatgattttcccatcgtgatcaaacaccagtcgagtcccaaccttcgccgatacgtggcaggtagaaatggtgacatcattaagccttcgaagttttcttcttctaccccacatccattgcctgaaacttcaatgagatccattccatagtccttaagctttagattaactcttaggtgacaaagccaggattgaagctcatgcggtctggctccagaacaactcttcttcatagttacgttatactgcccctgcattgttggtattgaaagtaagtgtaggccctgggccttctatacctgggattaagtcacata

SEQ ID NO: 367701 - DNA, 418 bp, Homo sapiens
tctctggtaaaagtcagctctctaactactgcatctcacagctgaacaggtaaacatgttcactggacctgctttaaatacatatcccttaatgctgcccatagccagactatgtttccttagtccattcactcttccactacctcttgccttttcttttctcaagccttcaatacctcctccctcatcctcattctcagcagatgatcttgtttcctatttcactgtaaaaggagaagccatgggctgggcgcggtggctcattcctgaaatcccagcactttgggaggctgaggcgggtggatcacctgaggccgggagttcaagaccagcctgaccaacatgaagaaaccccatcgctactaaaaatacaaaattagccgggtgtggtggcacatgcctgtaatcccagctactc

SEQ ID NO: 367702 - DNA, 842 bp, Homo sapiens
aagtccaagcagaagtctgctgtggaggtggagccctcatggagaacctctactaaggcagtacagaggagaaatgtgaggttggagcccccacacagagtccccaccggggcactgggtagtggagctgtaagaagagggccaccattctctagaccccagaatggtagatccaccaacagcttgcaccgtgcacttggaaaagccccaggcactcaacgccagcccatgaaaacagccacaggggctgtaccctgcagaaccacaggggtggagctgcccagaactttgggagtccaccccttgcatcagtgtagcttggatgtgagacatggagtcaaaggagattattttggagctttaacatttaatgactgctccactgggtttcagatttgcatgggccttgcagcctctttgttttggcaaatttttcccatttggaaggggagcatttacccaatgcctgtacccccattgtatcttggaagtaactaacttgttttttattttataggctcatagatggaaggcttgtctcagataagactttggacttggacttttgggttaatgctggaatgagttaagactttggggttctgttgggaaggcatgattgtgttttgaaatgtgagaaggacaagagatctgggaggggccagggttggaatgatatggcttggctctgtgtccccacccgaatctcatctcaaattgtaatcctcacatgtggaggaaggtacctggtgggagctgattggatcatgggggtggttcccccaagctgttctcatgatagtaagttcattctcatgagatctgatggtttaaaagtgtgg

SEQ ID NO: 367703 - DNA, 228 bp, Homo sapiens
taaaaactttcttaaacctactgcaaaatctttttcctttaacgcacccctaaattgatctcactgagtttaccaatatctaattgacaaaaccatcagatatttttctgtccttatatttaactgtattcggtttcagaagttctcatcatgatactttaaggatgaggacagctgatgtggctggcctgaaaaataaggtaagaaccagaactaatctgcacagtc

SEQ ID NO: 367704 - DNA, 275 bp, Homo sapiens
taacagtgtttgcaagctataaaatagtgctttcacttagaaaaggctagacgtggtggttcatgcctgtaatcccagcactttgagaggccgaggtgagtgaatcacttgagatcaggagtctgagaccagcctggccaacatggcaaaaccctgcctctactaaaaatataaaaattagccaggcatgctggcacatgcctgtaatcccagctacttgggaggctgaggcaggagaattgcttgaacctaggaggcggaggttgcagtgagcc

SEQ ID NO: 367705 - DNA, 233 bp, Homo sapiens
ttactttagtaagtaatgcttcatttgcagcttcaattacttcattcctatcttggacttgttgatgcaaattgcttacagtatcctgagcttcttctaattccaattttgccttctctaactgttcgtttagttgctgaacagaagacttttgagagtcagcagaaatcttccactttgcatggttctcttgatgtgaaatcatctatatagccccagaattggaaaagaaa

SEQ ID NO: 367706 - DNA, 1069 bp, Homo sapiens
cttgcagttacgggtccgaaatcccggggtggactactactactaaaatgtcggcggcgtggaccccaatttgggtcatatttccacctccatgttactcaggcatgattcatctgcaagttatgtgtatagatattttgctactgttccacccttacgctgtgctggggagggaggtgtcactgtgagctgtgtcggtgccttaagagatatctgttgtgtcttattacttggttgcttttccccacatgtacaatgacaaaaatgccttcaacctatttgatccagccgttccagtacaactcctatacttgccatctttccaagcccaaaggtacatccagctgatggaaggagcatcttggtgttaatattcttttagtcatggtctctgaaagtaaaatgtctattcttctaattctggcacaatcttatctagctatagttcctcatggtcctgcactccatggactaaattgtaagtataattactaccaatgtactctataaataacttttggggccagggtggcaatagttgctagagaaaaaaaaaaaaaaaaaggaaggagaagaaaacagtgatagttcttattttaaaaggaaaaaaagaggcaggaggctctcttgaggccaggagtttaagaccagcctaggcagcatttcaagaccctgtctctactaaaaagtaaaaaaaaaatttagtcaggcatggtggcatgcacctgtagtcgtagctactcaggagactgaggtgggaggattgattgagctcaggagtttgaggctgcagtgagcaatcatcatgccattgcactccagcctgggcatcagagcaagaccttgtcttttaggaaaaaaaggcagggaagaggaataggtaatttttcagtgttcagacattccagcaatatgtgtggagtactcattctcactacagtttatgaggccatagctagtatgtatgactacccatccaagtttccctgcttacagttactattccaactgattggggggcttttcctaatagagtgatgtaagccttcatttttagacatctaagccc

SEQ ID NO: 367707 - DNA, 1411 bp, Homo sapiens
  misc_feature (1373)..(1374): n is a, c, g, or t
cagctctcgagcatcgttgccacccgacattagaagatcttcttgatcatttattgatagcagctctgggatatgagatcatcatcttccagacgaggaagccatagtaccttcctgtttctcgcgccccggcttttaaaaactccccagctctggtccactactccaccgagatttctcaaaagtcgccctcggagagtgatcccggggggtgctttgcgaagagggtgcagaaaatgaacggaggagcagctggcttgagggctgggaacactcgcgtgtgtgagagatttaggatgagtttgggaagaaagtgggggcccgaggattctagagagagcacagcccaggctgaggaggggaaagcgcggtggtccggaaatttgagcggctggggaaccaccttcgtgtctcctcagaggggcgggcgctgtcgcctaactggtccccaacggcgtcggagcagaggcaagatccaggggcactggcctcgccgcggtaccgggcgggtacccagcgggctcggctctatagagcccgaggccccgctgccgctgccgccgccgccagcagccgttgccgccgcctcggccaaaccatccttcagacacccgcgccgccgcctcacaacatgtccgccgctgccgctgccgctgccgctgctggaacggcgacggccgcctgggaactaatatggacagagccaggcacagtgggagtcgcagtggctgccgccgcggccgcgtagcccgaacgcagatcgtggaagccgaagacgcggcaacggtggtccctccagatgccagggaaggtttgcaggaagccgctcccgacaccctttgcgccaccggaagcctcgttccctcagatttccccctccctcccggaccgacttccgggtgtggctgccgcccttcccccacccacgccggcgggagccgcccgttcgcgctgccagcagcttccgcctgctacggtcctggcaagcacctcgggatcccattccttcacagggaccctagccaggcaagcgcgcgcctcactgtaccggagagctccaagcacgcgcttggtctggggcccggacgctacatctgggaaggggtgggtggctgggtagataggcgaggaaggatcgtctctaccctctctcaagtagctgaggcctccgaaaccttccctagctggatttggggacagaggagcgctggtattgataaaataactctctttgctattcctttaggagcccaaatgaggattgaaagtgagaagaatgggacctgggcttgggggtgggaggtggggaaagcagaaccccgtgtgcctgtttctgcgtcgtctggagaaaaagcttttcaagatgtctgatnnaccttattcggttcaaagctctctaaagtccttcacc

SEQ ID NO: 367708 - DNA, 2926 bp, Homo sapiens
cagctctcgagcatcgttgccacccgacattagaagatcttcttgatcatttattgatagcagctctgggatatgagatcatcatcttccagacgaggaagccatagtaccttcctgtttctcgcgccccggcttttaaaaactccccagctctggtccactactccaccgagatttctcaaaagtcgccctcggagagtgatcccggggggtgctttgcgaagagggtgcagaaaatgaacggaggagcagctggcttgagggctgggaacactcgcgtgtgtgagagatttaggatgagtttgggaagaaagtgggggcccgaggattctagagagagcacagcccaggctgaggaggggaaagcgcggtggtccggaaatttgagcggctggggaaccaccttcgtgtctcctcagaggggcgggcgctgtcgcctaactggtccccaacggcgtcggagcagaggcaagatccaggggcactggcctcgccgcggtaccgggcgggtacccagcgggctcggctctatagagcccgaggccccgctgccgctgccgccgccgccagcagccgttgccgccgcctcggccaaaccatccttcagacacccgcgccgccgcctcacaacatgtccgccgctgccgctgccgctgccgctgctggaacggcgacggccgcctgggaactaatatggacagagccaggcacagtgggagtcgcagtggctgccgccgcggccgcgtagcccgaacgcagatcgtggaagccgaagacgcggcaacggtggtccctccagatgccagggaaggtttgcaggaagccgctcccgacaccctttgcgccaccggaagcctcgttccctcagatttccccctccctcccggaccgacttccgggtgtggctgccgcccttcccccacccacgccggcgggagccgcccgttcgcgctgccagcagcttccgcctgctacggtcctggcaagcacctcgggatcccattccttcacagggaccctagccagttaaagctgatacattcctgtgggtcaactatgcaactaactcagattttgagcaaacaaagctctcaagttggtgatcctcaggagtctctgcattagttggacagctcttctggaattatcttctaagtcaactgtgggttgggtaggtggctctgctgatttttcgctggacttccacatttgggaccagttggctgtcatcagctctagaaagggtgtggctgttttacattggctgttttcctcacattcctcaagcaggtactgtaataaagaactggagaaatacagtcagatgggaagtagcccctgctgtcaaggagcttgccatctaatgggggagacaggcaagtaaaccaaagactacacagtgcagtatggtaagtgccatgattttgatgtgacagggcacagtggacgaccttccaaatcaaagcaagtaactaggggttgacaatggtaagtatcatagttgaagtatccttgaacaaggtttcaggaagaagaagaagggaatttcatgcagggaaacagccaaagctcagtgagtcaaaatatcacagcattcttggtaagcccaattgttttttctgttttgctattttggtggagagaaaggaacacataaaggaataacatgagagaaggctatttggggaagtgtagtagttaaggttctggctcaaacaacaactgcagctcataaagttgactttagtggaaggatactggggtatctcatggaatcttgggaactgttgaataaccagggaaactctgggaaactcactggtaggaatccataaactgtcctcctggtgggctgtaaacaactcaccctctatgcatctcacatcaaaattccagtttcttgggaaaacaagtctgtttgcccaatttgggtcatatttccacctccatgttactcaggcatgattcatctgcaagttatgtgtatagatattttgctactgttccacccttacgctgtgctggggagggaggtgtcactgtgagctgtgtcggtgccttaagagatatctgttgtgtcttattacttggttgcttttccccacatgtacaatgacaaaaatgccttcaacctatttgatccagccgttccagtacaactcctatacttgccatctttccaagcccaaaggtacatccagctgatggaaggagcatcttggtgttaatattcttttagtcatggtctctgaaagtaaaatgtctattcttctaattctggcacaatcttatctagctatagttcctcatggtcctgcactccatggactaaattgtaagtataattactaccaatgtactctataaataacttttggggccagggtggcaatagttgctagagaaaaaaaaaaaaaaaaaggaaggagaagaaaacagtgatagttcttattttaaaaggaaaaaaagaggcaggaggctctcttgaggccaggagtttaagaccagcctaggcagcatttcaagaccctgtctctactaaaaagtaaaaaaaaaatttagtcaggcatggtggcatgcacctgtagtcgtagctactcaggagactgaggtgggaggattgattgagctcaggagtttgaggctgcagtgagcaatcatcatgccattgcactccagcctgggcatcagagcaagaccttgtcttttaggaaaaaaaggcagggaagaggaataggtaatttttcagtgttcagacattccagcaatatgtgtggagtactcattctcactacagtttatgaggccatagctagtatgtatgactacccatccaagtttccctgcttacagttactattccaactgattggggggcttttcctaatagagtgatgtaagccttcatttttagacatctaagccc

SEQ ID NO: 367709 - DNA, 2977 bp, Homo sapiens
cagctctcgagcatcgttgccacccgacattagaagatcttcttgatcatttattgatagcagctctgggatatgagatcatcatcttccagacgaggaagccatagtaccttcctgtttctcgcgccccggcttttaaaaactccccagctctggtccactactccaccgagatttctcaaaagtcgccctcggagagtgatcccggggggtgctttgcgaagagggtgcagaaaatgaacggaggagcagctggcttgagggctgggaacactcgcgtgtgtgagagatttaggatgagtttgggaagaaagtgggggcccgaggattctagagagagcacagcccaggctgaggaggggaaagcgcggtggtccggaaatttgagcggctggggaaccaccttcgtgtctcctcagaggggcgggcgctgtcgcctaactggtccccaacggcgtcggagcagaggcaagatccaggggcactggcctcgccgcggtaccgggcgggtacccagcgggctcggctctatagagcccgaggccccgctgccgctgccgccgccgccagcagccgttgccgccgcctcggccaaaccatccttcagacacccgcgccgccgcctcacaacatgtccgccgctgccgctgccgctgccgctgctggaacggcgacggccgcctgggaactaatatggacagagccaggcacagtgggagtcgcagtggctgccgccgcggccgcgtagcccgaacgcagatcgtggaagccgaagacgcggcaacggtggtccctccagatgccagggaaggtttgcaggaagccgctcccgacaccctttgcgccaccggaagcctcgttccctcagatttccccctccctcccggaccgacttccgggtgtggctgccgcccttcccccacccacgccggcgggagccgcccgttcgcgctgccagcagcttccgcctgctacggtcctggcaagcacctcgggatcccattccttcacagggaccctagccagctgaggcctccgaaaccttccctagctggatttggggacagaggagcgctgttaaagctgatacattcctgtgggtcaactatgcaactaactcagattttgagcaaacaaagctctcaagttggtgatcctcaggagtctctgcattagttggacagctcttctggaattatcttctaagtcaactgtgggttgggtaggtggctctgctgatttttcgctggacttccacatttgggaccagttggctgtcatcagctctagaaagggtgtggctgttttacattggctgttttcctcacattcctcaagcaggtactgtaataaagaactggagaaatacagtcagatgggaagtagcccctgctgtcaaggagcttgccatctaatgggggagacaggcaagtaaaccaaagactacacagtgcagtatggtaagtgccatgattttgatgtgacagggcacagtggacgaccttccaaatcaaagcaagtaactaggggttgacaatggtaagtatcatagttgaagtatccttgaacaaggtttcaggaagaagaagaagggaatttcatgcagggaaacagccaaagctcagtgagtcaaaatatcacagcattcttggtaagcccaattgttttttctgttttgctattttggtggagagaaaggaacacataaaggaataacatgagagaaggctatttggggaagtgtagtagttaaggttctggctcaaacaacaactgcagctcataaagttgactttagtggaaggatactggggtatctcatggaatcttgggaactgttgaataaccagggaaactctgggaaactcactggtaggaatccataaactgtcctcctggtgggctgtaaacaactcaccctctatgcatctcacatcaaaattccagtttcttgggaaaacaagtctgtttgcccaatttgggtcatatttccacctccatgttactcaggcatgattcatctgcaagttatgtgtatagatattttgctactgttccacccttacgctgtgctggggagggaggtgtcactgtgagctgtgtcggtgccttaagagatatctgttgtgtcttattacttggttgcttttccccacatgtacaatgacaaaaatgccttcaacctatttgatccagccgttccagtacaactcctatacttgccatctttccaagcccaaaggtacatccagctgatggaaggagcatcttggtgttaatattcttttagtcatggtctctgaaagtaaaatgtctattcttctaattctggcacaatcttatctagctatagttcctcatggtcctgcactccatggactaaattgtaagtataattactaccaatgtactctataaataacttttggggccagggtggcaatagttgctagagaaaaaaaaaaaaaaaaaggaaggagaagaaaacagtgatagttcttattttaaaaggaaaaaaagaggcaggaggctctcttgaggccaggagtttaagaccagcctaggcagcatttcaagaccctgtctctactaaaaagtaaaaaaaaaatttagtcaggcatggtggcatgcacctgtagtcgtagctactcaggagactgaggtgggaggattgattgagctcaggagtttgaggctgcagtgagcaatcatcatgccattgcactccagcctgggcatcagagcaagaccttgtcttttaggaaaaaaaggcagggaagaggaataggtaatttttcagtgttcagacattccagcaatatgtgtggagtactcattctcactacagtttatgaggccatagctagtatgtatgactacccatccaagtttccctgcttacagttactattccaactgattggggggcttttcctaatagagtgatgtaagccttcatttttagacatctaagccc

SEQ ID NO: 367710 - DNA, 1979 bp, Homo sapiens
cagctctcgagcatcgttgccacccgacattagaagatcttcttgatcatttattgatagcagctctgggatatgagatcatcatcttccagacgaggaagccatagtaccttcctgtttctcgcgccccggcttttaaaaactccccagctctggtccactactccaccgagatttctcaaaagtcgccctcggagagtgatcccggggggtgctttgcgaagagggtgcagaaaatgaacggaggagcagctggcttgagggctgggaacactcgcgtgtgtgagagatttaggatgagtttgggaagaaagtgggggcccgaggattctagagagagcacagcccaggctgaggaggggaaagcgcggtggtccggaaatttgagcggctggggaaccaccttcgtgtctcctcagaggggcgggcgctgtcgcctaactggtccccaacggcgtcggagcagaggcaagatccaggggcactggcctcgccgcggtaccgggcgggtacccagcgggctcggctctatagagcccgaggccccgctgccgctgccgccgccgccagcagccgttgccgccgcctcggccaaaccatccttcagacacccgcgccgccgcctcacaacatgtccgccgctgccgctgccgctgccgctgctggaacggcgacggccgcctgggaactaatatggacagagccaggcacagtgggagtcgcagtggctgccgccgcggccgcgtagcccgaacgcagatcgtggaagccgaagacgcggcaacggtggtccctccagatgccagggaaggtttgcaggaagccgctcccgacaccctttgcgccaccggaagcctcgttccctcagatttccccctccctcccggaccgacttccgggtgtggctgccgcccttcccccacccacgccggcgggagccgcccgttcgcgctgccagcagcttccgcctgctacggtcctggcaagcacctcgggatcccattccttcacagggaccctagccagttaaagctgatacattcctgtgggtcaactatgcaactaactcagattttgagcaaacaaagctctcaagttggtgatcctcaggagtctctgcattagttggacagctcttctggaattatcttctaagtcaactgtgggttgggtaggtggctctgctgatttttcgctggacttccacatttgggaccagttggctgtcatcagctctagaaagggtgtggctgttttacattggctgttttcctcacattcctcaagcagataactgataccgtggttccagaagatttttctaacagtgtttgcaagctataaaatagtgctttcacttagaaaaggctagacgtggtggttcatgcctgtaatcccagcactttgagaggccgaggcaccatgctgggagataaggatccaacataagacaaacagtgctgatgcttttggaaagctcatattcaagctggggagacaaacaacatacaagctcatagatggaaggcttgtctcagataagactttggacttggacttttgggttaatgctggaatgagttaagactttggggttctgttgggaaggcatgattgtgttttgaaatgtgagaaggacaagagatctgggaggggccagggttggaatgatatggcttggctctgtgtccccacccgaatctcatctcaaattgtaatcctcacatgtggaggaaggtacctggtgggagctgattggatcatgggggtggttcccccaagctgttctcatgatagtaagttcattctcatgagatctgatggtttaaaagtgtggcatttacacactctttctctcctgctgccatgtaagacatgccttgctttcccttaaccttctgccatgattgtaagtttcccgaggtgtccccagccatgtgaaactgtgagttaattaaagctcttttctttataaatta

SEQ ID NO: 367711 - DNA, 2082 bp, Homo sapiens
cagctctcgagcatcgttgccacccgacattagaagatcttcttgatcatttattgatagcagctctgggatatgagatcatcatcttccagacgaggaagccatagtaccttcctgtttctcgcgccccggcttttaaaaactccccagctctggtccactactccaccgagatttctcaaaagtcgccctcggagagtgatcccggggggtgctttgcgaagagggtgcagaaaatgaacggaggagcagctggcttgagggctgggaacactcgcgtgtgtgagagatttaggatgagtttgggaagaaagtgggggcccgaggattctagagagagcacagcccaggctgaggaggggaaagcgcggtggtccggaaatttgagcggctggggaaccaccttcgtgtctcctcagaggggcgggcgctgtcgcctaactggtccccaacggcgtcggagcagaggcaagatccaggggcactggcctcgccgcggtaccgggcgggtacccagcgggctcggctctatagagcccgaggccccgctgccgctgccgccgccgccagcagccgttgccgccgcctcggccaaaccatccttcagacacccgcgccgccgcctcacaacatgtccgccgctgccgctgccgctgccgctgctggaacggcgacggccgcctgggaactaatatggacagagccaggcacagtgggagtcgcagtggctgccgccgcggccgcgtagcccgaacgcagatcgtggaagccgaagacgcggcaacggtggtccctccagatgccagggaaggtttgcaggaagccgctcccgacaccctttgcgccaccggaagcctcgttccctcagatttccccctccctcccggaccgacttccgggtgtggctgccgcccttcccccacccacgccggcgggagccgcccgttcgcgctgccagcagcttccgcctgctacggtcctggcaagcacctcgggatcccattccttcacagggaccctagccagttaaagctgatacattcctgtgggtcaactatgcaactaactcagattttgagcaaacaaagctctcaagttggtgatcctcaggagtctctgcattagttggacagctcttctggaattatcttctaagtcaactgtgggttgggtaggtggctctgctgatttttcgctggacttccacatttgggaccagttggctgtcatcagctctagaaagggtgtggctgttttacattggctgttttcctcacattcctcaagcaggtactgtaataaagaactggagaaatacagtcagatgggaagtagcccctgctgtcaaggagcttgccatctaatgggggagacaggcaagtaaaccaaagactacacagtgcagtatgaatttcctttcatctctggtaaaagtcagctctctaactactgcatctcacagctgaacagataactgataccgtggttccagaagatttttctaacagtgtttgcaagctataaaatagtgctttcacttagaaaaggctagacgtggtggttcatgcctgtaatcccagcactttgagaggccgaggcaccatgctgggagataaggatccaacataagacaaacagtgctgatgcttttggaaagctcatattcaagctggggagacaaacaacatacaaaagttctcatcatgatactttaaggatgaggacagctgatgtggctggcctgaaaaataagtagagatgcggtttcgccatgttggccgggctggtcttgaagtcctgacctcaggtgattcacctacctcagcttcccgacgtactgggtttacaggcatgagccaccgttcccggccaaggagggctctgagagatttcatttctgtcctgctgatgaagtctacgttcattcagggcctgctgtggaagaccagccccaaagttgctgaacagaagacttttgagagtcagcagaaatcttccactttgcatggttctcttgatgtgaaatcatctatatagccccagaattggaaaagaaaaaaataaaaaaatggaaggaactgg

SEQ ID NO: 367712 - DNA, 2166 bp, Homo sapiens
cagctctcgagcatcgttgccacccgacattagaagatcttcttgatcatttattgatagcagctctgggatatgagatcatcatcttccagacgaggaagccatagtaccttcctgtttctcgcgccccggcttttaaaaactccccagctctggtccactactccaccgagatttctcaaaagtcgccctcggagagtgatcccggggggtgctttgcgaagagggtgcagaaaatgaacggaggagcagctggcttgagggctgggaacactcgcgtgtgtgagagatttaggatgagtttgggaagaaagtgggggcccgaggattctagagagagcacagcccaggctgaggaggggaaagcgcggtggtccggaaatttgagcggctggggaaccaccttcgtgtctcctcagaggggcgggcgctgtcgcctaactggtccccaacggcgtcggagcagaggcaagatccaggggcactggcctcgccgcggtaccgggcgggtacccagcgggctcggctctatagagcccgaggccccgctgccgctgccgccgccgccagcagccgttgccgccgcctcggccaaaccatccttcagacacccgcgccgccgcctcacaacatgtccgccgctgccgctgccgctgccgctgctggaacggcgacggccgcctgggaactaatatggacagagccaggcacagtgggagtcgcagtggctgccgccgcggccgcgtagcccgaacgcagatcgtggaagccgaagacgcggcaacggtggtccctccagatgccagggaaggtttgcaggaagccgctcccgacaccctttgcgccaccggaagcctcgttccctcagatttccccctccctcccggaccgacttccgggtgtggctgccgcccttcccccacccacgccggcgggagccgcccgttcgcgctgccagcagcttccgcctgctacggtcctggcaagcacctcgggatcccattccttcacagggaccctagccagttaaagctgatacattcctgtgggtcaactatgcaactaactcagattttgagcaaacaaagctctcaagttggtgatcctcaggagtctctgcattagttggacagctcttctggaattatcttctaagtcaactgtgggttgggtaggtggctctgctgatttttcgctggacttccacatttgggaccagttggctgtcatcagctctagaaagggtgtggctgttttacattggctgttttcctcacattcctcaagcaggtactgtaataaagaactggagaaatacagtcagatgggaagtagcccctgctgtcaaggagcttgccatctaatgggggagacaggcaagtaaaccaaagactacacagtgcagtatgaatttcctttcatctctggtaaaagtcagctctctaactactgcatctcacagctgaacagataactgataccgtggttccagaagatttttctaacagtgtttgcaagctataaaatagtgctttcacttagaaaaggctagacgtggtggttcatgcctgtaatcccagcactttgagaggccgaggcaccatgctgggagataaggatccaacataagacaaacagtgctgatgcttttggaaagctcatattcaagctggggagacaaacaacatacaaaagttctcatcatgatactttaaggatgaggacagctgatgtggctggcctgaaaaataagtagagatgcggtttcgccatgttggccgggctggtcttgaagtcctgacctcaggctggagtgcaatggcacgatctcggctcactgcaacctctgcctcccgagttcagtagagatggggttctgccatgttgatcttgctggtctcgaactcttggcctcaagtgatctgcccacctcggcctcccaaatgctgggattacaggagggctctgagagatttcatttctgtcctgctgatgaagtctacgttcattcagggcctgctgtggaagaccagccccaaagttgctgaacagaagacttttgagagtcagcagaaatcttccactttgcatggttctcttgatgtgaaatcatctatatagccccagaattggaaaagaaaaaaataaaaaaatggaaggaactgg

SEQ ID NO: 367713 - DNA, 2285 bp, Homo sapiens
cagctctcgagcatcgttgccacccgacattagaagatcttcttgatcatttattgatagcagctctgggatatgagatcatcatcttccagacgaggaagccatagtaccttcctgtttctcgcgccccggcttttaaaaactccccagctctggtccactactccaccgagatttctcaaaagtcgccctcggagagtgatcccggggggtgctttgcgaagagggtgcagaaaatgaacggaggagcagctggcttgagggctgggaacactcgcgtgtgtgagagatttaggatgagtttgggaagaaagtgggggcccgaggattctagagagagcacagcccaggctgaggaggggaaagcgcggtggtccggaaatttgagcggctggggaaccaccttcgtgtctcctcagaggggcgggcgctgtcgcctaactggtccccaacggcgtcggagcagaggcaagatccaggggcactggcctcgccgcggtaccgggcgggtacccagcgggctcggctctatagagcccgaggccccgctgccgctgccgccgccgccagcagccgttgccgccgcctcggccaaaccatccttcagacacccgcgccgccgcctcacaacatgtccgccgctgccgctgccgctgccgctgctggaacggcgacggccgcctgggaactaatatggacagagccaggcacagtgggagtcgcagtggctgccgccgcggccgcgtagcccgaacgcagatcgtggaagccgaagacgcggcaacggtggtccctccagatgccagggaaggtttgcaggaagccgctcccgacaccctttgcgccaccggaagcctcgttccctcagatttccccctccctcccggaccgacttccgggtgtggctgccgcccttcccccacccacgccggcgggagccgcccgttcgcgctgccagcagcttccgcctgctacggtcctggcaagcacctcgggatcccattccttcacagggaccctagccagttaaagctgatacattcctgtgggtcaactatgcaactaactcagattttgagcaaacaaagctctcaagttggtgatcctcaggagtctctgcattagttggacagctcttctggaattatcttctaagtcaactgtgggttgggtaggtggctctgctgatttttcgctggacttccacatttgggaccagttggctgtcatcagctctagaaagggtgtggctgttttacattggctgttttcctcacattcctcaagcaggtactgtaataaagaactggagaaatacagtcagatgggaagtagcccctgctgtcaaggagcttgccatctaatgggggagacaggcaagtaaaccaaagactacacagtgcagtatgaatttcctttcatctctggtaaaagtcagctctctaactactgcatctcacagctgaacagataactgataccgtggttccagaagatttttctaacagtgtttgcaagctataaaatagtgctttcacttagaaaaggctagacgtggtggttcatgcctgtaatcccagcactttgagaggccgaggcaccatgctgggagataaggatccaacataagacaaacagtgctgatgcttttggaaagctcatattcaagctggggagacaaacaacatacaaaagttctcatcatgatactttaaggatgaggacagctgatgtggctggcctgaaaaataagaaactcactctgtcactcaggctggagtgcaatggcacgatctcggctcactgcaacctctgcctcccgagttcaggagggctctgagagatttcatttctgtcctgctgatgaagtctacgttcattcagggcctgctgtggaagaccagccccaaaggcggagtctcactctgtcgcccaggctggagtgcaagggcacgattgcagctcactgcaacctccacctcttgggttcaagcaattcttgtgtctcagcctcctcagtagctggggttacaggcatgtgccacaatgcctggctaagttttgtatttttagtagagacgaggtttggccatgttggccaggctcgtctcgaactcctgacctcaggtgatccgcctgcctcagcctcccaaagtgctggaattatgggcacgagccacggcatctggccaaacagcaatttaaaaaactaacgaaaaatctattcatgattttaaaaatttctatttcatacaaataaaacaatcttgggctaataatatata

SEQ ID NO: 367714 - DNA, 2388 bp, Homo sapiens
cagctctcgagcatcgttgccacccgacattagaagatcttcttgatcatttattgatagcagctctgggatatgagatcatcatcttccagacgaggaagccatagtaccttcctgtttctcgcgccccggcttttaaaaactccccagctctggtccactactccaccgagatttctcaaaagtcgccctcggagagtgatcccggggggtgctttgcgaagagggtgcagaaaatgaacggaggagcagctggcttgagggctgggaacactcgcgtgtgtgagagatttaggatgagtttgggaagaaagtgggggcccgaggattctagagagagcacagcccaggctgaggaggggaaagcgcggtggtccggaaatttgagcggctggggaaccaccttcgtgtctcctcagaggggcgggcgctgtcgcctaactggtccccaacggcgtcggagcagaggcaagatccaggggcactggcctcgccgcggtaccgggcgggtacccagcgggctcggctctatagagcccgaggccccgctgccgctgccgccgccgccagcagccgttgccgccgcctcggccaaaccatccttcagacacccgcgccgccgcctcacaacatgtccgccgctgccgctgccgctgccgctgctggaacggcgacggccgcctgggaactaatatggacagagccaggcacagtgggagtcgcagtggctgccgccgcggccgcgtagcccgaacgcagatcgtggaagccgaagacgcggcaacggtggtccctccagatgccagggaaggtttgcaggaagccgctcccgacaccctttgcgccaccggaagcctcgttccctcagatttccccctccctcccggaccgacttccgggtgtggctgccgcccttcccccacccacgccggcgggagccgcccgttcgcgctgccagcagcttccgcctgctacggtcctggcaagcacctcgggatcccattccttcacagggaccctagccagttaaagctgatacattcctgtgggtcaactatgcaactaactcagattttgagcaaacaaagctctcaagttggtgatcctcaggagtctctgcattagttggacagctcttctggaattatcttctaagtcaactgtgggttgggtaggtggctctgctgatttttcgctggacttccacatttgggaccagttggctgtcatcagctctagaaagggtgtggctgttttacattggctgttttcctcacattcctcaagcaggtactgtaataaagaactggagaaatacagtcagatgggaagtagcccctgctgtcaaggagcttgccatctaatgggggagacaggcaagtaaaccaaagactacacagtgcagtatgaatttcctttcatctctggtaaaagtcagctctctaactactgcatctcacagctgaacagataactgataccgtggttccagaagatttttctaacagtgtttgcaagctataaaatagtgctttcacttagaaaaggctagacgtggtggttcatgcctgtaatcccagcactttgagaggccgaggcaccatgctgggagataaggatccaacataagacaaacagtgctgatgcttttggaaagctcatattcaagctggggagacaaacaacatacaaaagttctcatcatgatactttaaggatgaggacagctgatgtggctggcctgaaaaataagaaactcactctgtcactcaggctggagtgcaatggcacgatctcggctcactgcaacctctgcctcccgagttcagtagagatggggttctgccatgttgatcttgctggtctcgaactcttggcctcaagtgatctgcccacctcggcctcccaaatgctgggattacaggtgtgagccaccgcgcccggccaagtaacaatatttctggatataatacctgaaaactcagcgcagaaagatataaagggataaaaaatttataatatagtcattacaatggaataaaatgaaatataaagcaataaaaaggaacggacagctgatatatgtaacaatatggatgaatctcaaaagcaatatcaaaagatcaaaagggtatatattacatgattccattctggaaaaggcaaaactatagggacagaaaacaagtcaatgataggcagtgggccggggggggaagtgatttattataaagaggcatgaggaaactttaggatgacataaatgttctatgtctttatatggtggtgggtacatgactgtatacttttgacagaggtatatctaaaaggggtgagttttactgtgtataaattatacctcaatgaacctgactaaaaaaaaaaaga

SEQ ID NO: 367715 - DNA, 1498 bp, Homo sapiens
cagctctcgagcatcgttgccacccgacattagaagatcttcttgatcatttattgatagcagctctgggatatgagatcatcatcttccagacgaggaagccatagtaccttcctgtttctcgcgccccggcttttaaaaactccccagctctggtccactactccaccgagatttctcaaaagtcgccctcggagagtgatcccggggggtgctttgcgaagagggtgcagaaaatgaacggaggagcagctggcttgagggctgggaacactcgcgtgtgtgagagatttaggatgagtttgggaagaaagtgggggcccgaggattctagagagagcacagcccaggctgaggaggggaaagcgcggtggtccggaaatttgagcggctggggaaccaccttcgtgtctcctcagaggggcgggcgctgtcgcctaactggtccccaacggcgtcggagcagaggcaagatccaggggcactggcctcgccgcggtaccgggcgggtacccagcgggctcggctctatagagcccgaggccccgctgccgctgccgccgccgccagcagccgttgccgccgcctcggccaaaccatccttcagacacccgcgccgccgcctcacaacatgtccgccgctgccgctgccgctgccgctgctggaacggcgacggccgcctgggaactaatatggacagagccaggcacagtgggagtcgcagtggctgccgccgcggccgcgtagcccgaacgcagatcgtggaagccgaagacgcggcaacggtggtccctccagatgccagggaaggtttgcaggaagccgctcccgacaccctttgcgccaccggaagcctcgttccctcagatttccccctccctcccggaccgacttccgggtgtggctgccgcccttcccccacccacgccggcgggagccgcccgttcgcgctgccagcagcttccgcctgctacggtcctggcaagcacctcgggatcccattccttcacagggaccctagccagttaaagctgatacattcctgtgggtcaactatgcaactaactcagattttgagcaaacaaagctctcaagttggtgatcctcaggagtctctgcattagttggacagctcttctggaattatcttctaagtcaactgtgggttgggtaggtggctctgctgatttttcgctggacttccacatttgggaccagttggctgtcatcagctctagaaagggtgtggctgttttacattggctgttttcctcacattcctcaagcaggagggctctgagagatttcatttctgtcctgctgatgaagtctacgttcattcagggcctgctgtggaagaccagccccaaagttgctgaacagaagacttttgagagtcagcagaaatcttccactttgcatggttctcttgatgtgaaatcatctatatagccccagaattggaaaagaaaaaaataaaaaaatggaaggaactgg

SEQ ID NO: 367716 - DNA, 1413 bp, Homo sapiens
gagggggtgggcgtgaggggcgccgtccgcctgaggggctgcagatcccggctaccgcgagcgccgtggctggcttggctgttccatgtggctccggcggggatggaggactcggtggcggcggcggctgctgctgcggcggcgacggaggagcggctatgagaagggaacggggccagactcagcccgacagcgggattagagccctccagaatacccatcatatagcccctgaggtggcatggtgatgtctccatgagggaaccccttcccactcatcctgtcacgtatatcatagtgttcttgactgggccattcatctaagatgggatttaccctgtgaaacagggagaagacttatggaccccaagcatcatttcgagttgtagttgagtttttaaaagacatacatgcaaagttcctttgctttggaccctctgcattattaaagctgctgtattgctaacccagaactgctccagtgtcttgactgatcatcatggcttcagtttggaagagactgcagcgtgtgggaaaacatgcatccaagttccagtttgtggcctcctaccaggagctcatggttgagtgtacgaagaaatggcaaccagataaactggtggtagtttggaccagaagaagccgaaggaagtcttctaaggcacatagctggcaacctggaataaaaaatccctatcgtggtgttgttgtgtggcctgttcctgaaaacattgaaatcactgtaacactttttaaggatcctcatgcggaagaatttgaagacaaagagtggacatttgtcatagaaaatgaatccccttctggtcgaaggaaagctcttgctactagcagcatcaatatgaaacagtatgcaagccctatgccaactcagactgatgtcaagttaaaattcaagccattatctaaaaaagttgtatctgccgctcttcagttttcattatcttgcatttttctgagggaaggaaaagccacagatgaagacatgcaaagtttggctagtttgatgagtatgaagcaggctgacattggcaatttagatgacttcgaagaagataatgaagatgatgatgagaacagagtgaaccaagaagaaaaggcagctaaaattacagagcttatcaacaaacttaactttttggatgaagcagaaaaggacttggccaccgtgaattcaaatccatttgatgatcctgatgctgcagaattaaatccatttggagatcctgactcagaagaacctatcactgaaacagcttcacctagaaaaacagaagactctttttataataacagctataatccctttaaagaggtgcagactccacagtatttgaacccattcgatgagccagaagcatttgtgaccataaaggattctcctccccagtctac

SEQ ID NO: 367717 - DNA, 296 bp, Homo sapiens
tactactactactaaattcgcggccgcgtcgacgaaaaattagagaattccagatccttagaatgcagatcagatccagaatctcctatcaaaaaaacaagtttatctcctacttctaaacttggatactcatatagtagagatctagaccttgctaagaaaaaacatgcttccctgaggcagacggagtctgatccagatgctgatagaaccactttaaatcatgcagatcattcatcaaaaatagtccagaaagttttgccctatagtgagtcgtatgtcgacgcggccgcgat

SEQ ID NO: 367718 - DNA, 334 bp, Homo sapiens
gctacatgcccattttaataactttgaatttgtttttccaaagaaacatagatatcaagatcaaatcctttttatgaacctaaatcaactcctcctccaaataatttggtaaatcctgttcaagaactagaaactgaaaggcgagtgaaaagaaaggccccggctccaccagtcctctcaccaaaaacaggagtattaaatgaaaacacagtttctgcaggaaaagatctctctacttctcctaagaaattttaatacgtgatgactacatggaaaggtaaaacacctttggaataaaacctaaagctattaaacgattccattgtaaataata

SEQ ID NO: 367719 - DNA, 278 bp, Homo sapiens
gaattttttttttaacttagcattaacttttaaaatctggcaaatctgcctgtgaaattctaaacataatagtaaacagctgaagatctctctatttataaaagtttggtatatgtaatacatatgaaaattttttgaatcacagagagttgctttttggtactaagggtgatactaacggtgtatttggttctctaggtaagtgctttactaagtgtttgtagaaaggaaaaatgcaacttacaagtgatttttttttccttcctgtttgttcttgt

SEQ ID NO: 367720 - DNA, 5087 bp, Homo sapiens
gagggggtgggcgtgaggggcgccgtccgcctgaggggctgcagatcccggctaccgcgagcgccgtggctggcttggctgttccatgtggctccggcggggatggaggactcggtggcggcggcggctgctgctgcggcggcgacggaggagcggctatgagaagggaacggggccagactcagcccgacagcgggattagagccctccagaatacccatcatatagcccctgaggtggcatggtgatgtctccatgagggaaccccttcccactcatcctgtcacgtatatcatagtgttcttgactgggccattcatctaagatgggatttaccctgtgaaacagggagaagacttatggaccccaagcatcatttcgagttgtagttgagtttttaaaagacatacatgcaaagttcctttgctttggaccctctgcattattaaagctgctgtattgctaacccagaactgctccagtgtcttgactgatcatcatggcttcagtttggaagagactgcagcgtgtgggaaaacatgcatccaagttccagtttgtggcctcctaccaggagctcatggttgagtgtacgaagaaatggcaaccagataaactggtggtagtttggaccagaagaagccgaaggaagtcttctaaggcacatagctggcaacctggaataaaaaatccctatcgtggtgttgttgtgtggcctgttcctgaaaacattgaaatcactgtaacactttttaaggatcctcatgcggaagaatttgaagacaaagagtggacatttgtcatagaaaatgaatccccttctggtcgaaggaaagctcttgctactagcagcatcaatatgaaacagtatgcaagccctatgccaactcagactgatgtcaagttaaaattcaagccattatctaaaaaagttgtatctgccgctcttcagttttcattatcttgcatttttctgagggaaggaaaagccacagatgaagacatgcaaagtttggctagtttgatgagtatgaagcaggctgacattggcaatttagatgacttcgaagaagataatgaagatgatgatgagaacagagtgaaccaagaagaaaaggcagctaaaattacagagcttatcaacaaacttaactttttggatgaagcagaaaaggacttggccaccgtgaattcaaatccatttgatgatcctgatgctgcagaattaaatccatttggagatcctgactcagaagaacctatcactgaaacagcttcacctagaaaaacagaagactctttttataataacagctataatccctttaaagaggtgcagactccacagtatttgaacccattcgatgagccagaagcatttgtgaccataaaggattctcctccccagtctacaaaaagaaaaaatataagacctgtggatatgagcaagtacctctatgctgatagttctaaaactgaagaagaagaattggatgaatcaaatcctttttatgaacctaaatcaactcctcctccaaataatttggtaaatcctgttcaagaactagaaactgaaaggcgagtgaaaagaaaggccccggctccaccagtcctctcaccaaaaacaggagtattaaatgaaaacacagtttctgcaggaaaagatctctctacttctcctaagccaagccctataccaagtcctgttttggggcgaaagccaaatgctagtcagtctttgcttgtatggtgtaaagaagttacaaagaactaccgaggagtaaaaatcaccaattttactacatcgtggagaaatggtttatctttttgtgcaatattacaccactttagaccagatttaattgactacaagtctctgaatcctcaagatattaaagagaacaacaaaaaggcatacgatggatttgccagcataggaatttcccgattattggaaccttctgatatggtattattagcaattcctgataaactgactgttatgacttatctctatcaaataagggcacatttcagtggccaagaactaaatgtcgttcagatagaggaaaacagcagtaaaagcacatataaagttggaaactatgaaacagatacaaacagttctgttgatcaagaaaaattctatgcagagcttagtgatctgaagcgggagcctgaactacaacagcctatcagcggagcagtagacttcttatcacaggatgactctgtatttgtaaatgatagcggggttggagagtcagaaagtgagcatcaaactcctgatgatcaccttagtccaagcacagcctccccttactgtcgcaggactaaaagtgacacagaaccccagaagtctcagcagagctctggaaggacttcaggatctgatgaccctggaatatgttccaatacagattcaacccaagcacaggttttgttaggcaaaaagagactattgaaagctgagactttagaattgagtgacttatatgttagtgataagaagaaggatatgtctccaccctttatttgtgaggagacagatgaacaaaagcttcaaactctagacatcggtagtaacttggagaaagaaaaattagagaattccagatccttagaatgcagatcagatccagaatctcctatcaaaaaaacaagtttatctcctacttctaaacttggatactcatatagtagagatctagaccttgctaagaaaaaacatgcttccctgaggcagacggagtctgatccagatgctgatagaaccactttaaatcatgcagatcattcatcaaaaatagtccagcatcgattgttatctagacaagaagaacttaaggaaagagcaagagttctgcttgagcaagcaagaagagatgcagccttaaaggcggggaataagcacaataccaacacagccaccccattctgcaacaggcagctaagtgatcagcaagatgaagagcgacgtcggcagctgagagagagagctcgtcagctaatagcagaagctcgatctggagtgaagatgtcagaacttcccagctatggtgaaatggctgcagaaaagttgaaagaaaggtcaaaggcatctggagatgaaaatgataatattgagatagatactaacgaggagatccctgaaggctttgttgtaggaggtggagatgaacttactaacttagaaaatgaccttgatactcccgaacaaaacagtaagttggtggacttgaagctgaagaagctcctagaagttcagccacaggtggcaaattcaccctccagtgctgcccagaaagctgtaactgagagctcagagcaggacatgaaaagtggcacagaagatctccggactgaacgattacaaaaaacaacagaacgttttagaaatcctgttgtgttcagcaaagattctacagtcagaaaaactcaacttcagtctttcagccaatatattgagaatagaccagagatgaaaaggcagagatcaatacaggaagatacaaagaaaggaaatgaggagaaggcagcgataactgaaactcagaggaagccatcagaagatgaagtgcttaataaagggttcaaagacaccagtcagtatgtagtaggagaattggcagcactagagaatgagcaaaagcaaattgacacccgtgccgcgctggtggagaagcgccttcgctatctcatggacacaggaaggaacacagaagaagaagaagctatgatgcaggaatggtttatgttagttaataagaaaaatgccttaataaggagaatgaatcagctctctcttctggaaaaagaacatgatttagaacgacggtatgagctgctgaaccgggaattgagggcaatgctagccattgaagactggcagaagaccgaggcccagaagcgacgcgaacagcttctgctagatgagctggtggccctggtgaacaagcgcgatgcgctcgtcagggacctggacgcgcaggagaagcaggccgaagaagaagatgagcatttggagcgaactctggagcaaaacaaaggcaagatggccaagaaagaggagaaatgtgttcttcagtagccatcagatcagaaagaatctctcccaacattttagagtcttgcttcccaaaccagaaaaagtcagactcattgttgatttaaaacttttaacattttgtttggctggattgtactactttacctctactttaccaccaccacccttttcctccctcctttccaaataatatacagaactccaaaatagcttcatttaaggatttttttgtgagttaacaatttccttgaaatcctgtgaaatagatttgcacagacaccttgtgagtgattggtattggaggtgttcaagaaactgttcgaaaaagaacaaaaacacttccctcgttattttctctcattttttgatgagaggaaaatttgaaacattattcttgttgttgttggtaatagcataatgacagtgggaggggtacaaggggataagaaaaatgtcatgatttttttccggtcctgccacatgtaacacttactctgttacctaaattttatagttagatcatatccaatctacttattaaactgtgttctatttaccagtggagtttttctgcagtggttgcgtttcactgtaaggataatggagttcctctcctctgctttcctcagaggatggtcctttaacatagccagaaacaagccctgtggtttgaaggtgagctgtgaggatgggactaattgatatgcaccagtttacaaagacagtcttatcatccgagaatacaccatctttttctctggataattatttcttacatcatgcttgattcctacattttgttgggtctcaacattggctcacgaatgctgttaatatttattctgtattgataaaaagtctgtcttgccactacaagtaaatcccccatttaatattttcttctttagcatagcactgtcattttttgtgaaaatggttatgtttatttattacaatactgagtcatatataaattttcaataaaagcagaaactttcttaccttaaaaaaaggctgc

SEQ ID NO: 367721 - DNA, 4706 bp, Homo sapiens
gagggggtgggcgtgaggggcgccgtccgcctgaggggctgcagatcccggctaccgcgagcgccgtggctggcttggctgttccatgtggctccggcggggatggaggactcggtggcggcggcggctgctgctgcggcggcgacggaggagcggctatgagaagggaacggggccagactcagcccgacagcgggattagagccctccagaatacccatcatatagcccctgaggtggcatggtgatgtctccatgagggaaccccttcccactcatcctgtcacgtatatcatagtgttcttgactgggccattcatctaagatgggatttaccctgtgaaacagggagaagacttatggaccccaagcatcatttcgagttgtagttgagtttttaaaagacatacatgcaaagttcctttgctttggaccctctgcattattaaagctgctgtattgctaacccagaactgctccagtgtcttgactgatcatcatggcttcagtttggaagagactgcagcgtgtgggaaaacatgcatccaagttccagtttgtggcctcctaccaggagctcatggttgagtgtacgaagaaatggcaaccagataaactggtggtagtttggaccagaagaagccgaaggaagtcttctaaggcacatagctggcaacctggaataaaaaatccctatcgtggtgttgttgtgtggcctgttcctgaaaacattgaaatcactgtaacactttttaaggatcctcatgcggaagaatttgaagacaaagagtggacatttgtcatagaaaatgaatccccttctggtcgaaggaaagctcttgctactagcagcatcaatatgaaacagtatgcaagccctatgccaactcagactgatgtcaagttaaaattcaagccattatctaaaaaagttgtatctgccgctcttcagttttcattatcttgcatttttctgagggaaggaaaagccacagatgaagacatgcaaagtttggctagtttgatgagtatgaagcaggctgacattggcaatttagatgacttcgaagaagataatgaagatgatgatgagaacagagtgaaccaagaagaaaaggcagctaaaattacagagcttatcaacaaacttaactttttggatgaagcagaaaaggacttggccaccgtgaattcaaatccatttgatgatcctgatgctgcagaattaaatccatttggagatcctgactcagaagaacctatcactgaaacagcttcacctagaaaaacagaagactctttttataataacagctataatccctttaaagaggtgcagactccacagtatttgaacccattcgatgagccagaagcatttgtgaccataaaggattctcctccccagtctacaaaaagaaaaaatataagacctgtggatatgagcaagtacctctatgctgatagttctaaaactgaagaagaagaattggatgaatcaaatcctttttatgaacctaaatcaactcctcctccaaataatttggtaaatcctgttcaagaactagaaactgaaaggcgagtgaaaagaaaggccccggctccaccagtcctctcaccaaaaacaggagtattaaatgaaaacacagtttctgcaggaaaagatctctctacttctcctaagccaagccctataccaagtcctgttttggggcgaaagccaaatgctagtcagtctttgcttgtatggtgtaaagaagttacaaagaactaccgaggagtaaaaatcaccaattttactacatcgtggagaaatggtttatctttttgtgcaatattacaccactttagaccagatttaattgactacaagtctctgaatcctcaagatattaaagagaacaacaaaaaggcatacgatggatttgccagcataggaatttcccgattattggaaccttctgatatggtattattagcaattcctgataaactgactgttatgacttatctctatcaaataagggcacatttcagtggccaagaactaaatgtcgttcagatagaggaaaacagcagtaaaagcacatataaagttggaaactatgaaacagatacaaacagttctgttgatcaagaaaaattctatgcagagcttagtgatctgaagcgggagcctgaactacaacagcctatcagcggagcagtagacttcttatcacaggatgactctgtatttgtaaatgatagcggggttggagagtcagaaagtgagcatcaaactcctgatgatcaccttagtccaagcacagcctccccttactgtcgcaggactaaaagtgacacagaaccccagaagtctcagcagagctctggaaggacttcaggatctgatgaccctggaatatgttccaatacagattcaacccaagcacaggttttgttaggcaaaaagagactattgaaagctgagactttagaattgagtgacttatatgttagtgataagaagaaggatatgtctccaccctttatttgtgaggagacagatgaacaaaagcttcaaactctagacatcggtagtaacttggagaaagaaaaattagagaattccagatccttagaatgcagatcagatccagaatctcctatcaaaaaaacaagtttatctcctacttctaaacttggatactcatatagtagagatctagaccttgctaagaaaaaacatgcttccctgaggcagacggagtctgatccagatgctgatagaaccactttaaatcatgcagatcattcatcaaaaatagtccagcatcgattgttatctagacaagaagaacttaaggaaagagcaagagttctgcttgagcaagcaagaagagatgcagccttaaaggcggggaataagcacaataccaacacagccaccccattctgcaacaggcagctaagtgatagtggcacagaagatctccggactgaacgattacaaaaaacaacagaacgttttagaaatcctgttgtgttcagcaaagattctacagtcagaaaaactcaacttcagtctttcagccaatatattgagaatagaccagagatgaaaaggcagagatcaatacaggaagatacaaagaaaggaaatgaggagaaggcagcgataactgaaactcagaggaagccatcagaagatgaagtgcttaataaagggttcaaagacaccagtcagtatgtagtaggagaattggcagcactagagaatgagcaaaagcaaattgacacccgtgccgcgctggtggagaagcgccttcgctatctcatggacacaggaaggaacacagaagaagaagaagctatgatgcaggaatggtttatgttagttaataagaaaaatgccttaataaggagaatgaatcagctctctcttctggaaaaagaacatgatttagaacgacggtatgagctgctgaaccgggaattgagggcaatgctagccattgaagactggcagaagaccgaggcccagaagcgacgcgaacagcttctgctagatgagctggtggccctggtgaacaagcgcgatgcgctcgtcagggacctggacgcgcaggagaagcaggccgaagaagaagatgagcatttggagcgaactctggagcaaaacaaaggcaagatggccaagaaagaggagaaatgtgttcttcagtagccatcagatcagaaagaatctctcccaacattttagagtcttgcttcccaaaccagaaaaagtcagactcattgttgatttaaaacttttaacattttgtttggctggattgtactactttacctctactttaccaccaccacccttttcctccctcctttccaaataatatacagaactccaaaatagcttcatttaaggatttttttgtgagttaacaatttccttgaaatcctgtgaaatagatttgcacagacaccttgtgagtgattggtattggaggtgttcaagaaactgttcgaaaaagaacaaaaacacttccctcgttattttctctcattttttgatgagaggaaaatttgaaacattattcttgttgttgttggtaatagcataatgacagtgggaggggtacaaggggataagaaaaatgtcatgatttttttccggtcctgccacatgtaacacttactctgttacctaaattttatagttagatcatatccaatctacttattaaactgtgttctatttaccagtggagtttttctgcagtggttgcgtttcactgtaaggataatggagttcctctcctctgctttcctcagaggatggtcctttaacatagccagaaacaagccctgtggtttgaaggtgagctgtgaggatgggactaattgatatgcaccagtttacaaagacagtcttatcatccgagaatacaccatctttttctctggataattatttcttacatcatgcttgattcctacattttgttgggtctcaacattggctcacgaatgctgttaatatttattctgtattgataaaaagtctgtcttgccactacaagtaaatcccccatttaatattttcttctttagcatagcactgtcattttttgtgaaaatggttatgtttatttattacaatactgagtcatatataaattttcaataaaagcagaaactttcttaccttaaaaaaaggctgc

SEQ ID NO: 367722 - DNA, 4835 bp, Homo sapiens
gagggggtgggcgtgaggggcgccgtccgcctgaggggctgcagatcccggctaccgcgagcgccgtggctggcttggctgttccatgtggctccggcggggatggaggactcggtggcggcggcggctgctgctgcggcggcgacggaggagcggctatgagaagggaacggggccagactcagcccgacagcgggattagagccctccagaatacccatcatatagcccctgaggtggcatggtgatgtctccatgagggaaccccttcccactcatcctgtcacgtatatcatagtgttcttgactgggccattcatctaagatgggatttaccctgtgaaacagggagaagacttatggaccccaagcatcatttcgagttgtagttgagtttttaaaagacatacatgcaaagttcctttgctttggaccctctgcattattaaagctgctgtattgctaacccagaactgctccagtgtcttgactgatcatcatggcttcagtttggaagagactgcagcgtgtgggaaaacatgcatccaagttccagtttgtggcctcctaccaggagctcatggttgagtgtacgaagaaatggcaaccagataaactggtggtagtttggaccagaagaagccgaaggaagtcttctaaggcacatagctggcaacctggaataaaaaatccctatcgtggtgttgttgtgtggcctgttcctgaaaacattgaaatcactgtaacactttttaaggatcctcatgcggaagaatttgaagacaaagagtggacatttgtcatagaaaatgaatccccttctggtcgaaggaaagctcttgctactagcagcatcaatatgaaacagtatgcaagccctatgccaactcagactgatgtcaagttaaaattcaagccattatctaaaaaagttgtatctgccgctcttcagttttcattatcttgcatttttctgagggaaggaaaagccacagatgaagacatgcaaagtttggctagtttgatgagtatgaagcaggctgacattggcaatttagatgacttcgaagaagataatgaagatgatgatgagaacagagtgaaccaagaagaaaaggcagctaaaattacagagcttatcaacaaacttaactttttggatgaagcagaaaaggacttggccaccgtgaattcaaatccatttgatgatcctgatgctgcagaattaaatccatttggagatcctgactcagaagaacctatcactgaaacagcttcacctagaaaaacagaagactctttttataataacagctataatccctttaaagaggtgcagactccacagtatttgaacccattcgatgagccagaagcatttgtgaccataaaggattctcctccccagtctacaaaaagaaaaaatataagacctgtggatatgagcaagtacctctatgctgatagttctaaaactgaagaagaagaattggatgaatcaaatcctttttatgaacctaaatcaactcctcctccaaataatttggtaaatcctgttcaagaactagaaactgaaaggcgagtgaaaagaaaggccccggctccaccagtcctctcaccaaaaacaggagtattaaatgaaaacacagtttctgcaggaaaagatctctctacttctcctaagccaagccctataccaagtcctgttttggggcgaaagccaaatgctagtcagtctttgcttgtatggtgtaaagaagttacaaagaactaccgaggagtaaaaatcaccaattttactacatcgtggagaaatggtttatctttttgtgcaatattacaccactttagaccagatttaattgactacaagtctctgaatcctcaagatattaaagagaacaacaaaaaggcatacgatggatttgccagcataggaatttcccgattattggaaccttctgatatggtattattagcaattcctgataaactgactgttatgacttatctctatcaaataagggcacatttcagtggccaagaactaaatgtcgttcagatagaggaaaacagcagtaaaagcacatataaagttggaaactatgaaacagatacaaacagttctgttgatcaagaaaaattctatgcagagcttagtgatctgaagcgggagcctgaactacaacagcctatcagcggagcagtagacttcttatcacaggatgactctgtatttgtaaatgatagcggggttggagagtcagaaagtgagcatcaaactcctgatgatcaccttagtccaagcacagcctccccttactgtcgcaggactaaaagtgacacagaaccccagaagtctcagcagagctctggaaggacttcaggatctgatgaccctggaatatgttccaatacagattcaacccaagcacaggttttgttaggcaaaaagagactattgaaagctgagactttagaattgagtgacttatatgttagtgataagaagaaggatatgtctccaccctttatttgtgaggagacagatgaacaaaagcttcaaactctagacatcggtagtaacttggagaaagaaaaattagagaattccagatccttagaatgcagatcagatccagaatctcctatcaaaaaaacaagtttatctcctacttctaaacttggatactcatatagtagagatctagaccttgctaagaaaaaacatgcttccctgaggcagacggagtctgatccagatgctgatagaaccactttaaatcatgcagatcattcatcaaaaatagtccagcagcaagatgaagagcgacgtcggcagctgagagagagagctcgtcagctaatagcagaagctcgatctggagtgaagatgtcagaacttcccagctatggtgaaatggctgcagaaaagttgaaagaaaggtcaaaggcatctggagaacaaaacagtaagttggtggacttgaagctgaagaagctcctagaagttcagccacaggtggcaaattcaccctccagtgctgcccagaaagctgtaactgagagctcagagcaggacatgaaaagtggcacagaagatctccggactgaacgattacaaaaaacaacagaacgttttagaaatcctgttgtgttcagcaaagattctacagtcagaaaaactcaacttcagtctttcagccaatatattgagaatagaccagagatgaaaaggcagagatcaatacaggaagatacaaagaaaggaaatgaggagaaggcagcgataactgaaactcagaggaagccatcagaagatgaagtgcttaataaagggttcaaagacaccagtcagtatgtagtaggagaattggcagcactagagaatgagcaaaagcaaattgacacccgtgccgcgctggtggagaagcgccttcgctatctcatggacacaggaaggaacacagaagaagaagaagctatgatgcaggaatggtttatgttagttaataagaaaaatgccttaataaggagaatgaatcagctctctcttctggaaaaagaacatgatttagaacgacggtatgagctgctgaaccgggaattgagggcaatgctagccattgaagactggcagaagaccgaggcccagaagcgacgcgaacagcttctgctagatgagctggtggccctggtgaacaagcgcgatgcgctcgtcagggacctggacgcgcaggagaagcaggccgaagaagaagatgagcatttggagcgaactctggagcaaaacaaaggcaagatggccaagaaagaggagaaatgtgttcttcagtagccatcagatcagaaagaatctctcccaacattttagagtcttgcttcccaaaccagaaaaagtcagactcattgttgatttaaaacttttaacattttgtttggctggattgtactactttacctctactttaccaccaccacccttttcctccctcctttccaaataatatacagaactccaaaatagcttcatttaaggatttttttgtgagttaacaatttccttgaaatcctgtgaaatagatttgcacagacaccttgtgagtgattggtattggaggtgttcaagaaactgttcgaaaaagaacaaaaacacttccctcgttattttctctcattttttgatgagaggaaaatttgaaacattattcttgttgttgttggtaatagcataatgacagtgggaggggtacaaggggataagaaaaatgtcatgatttttttccggtcctgccacatgtaacacttactctgttacctaaattttatagttagatcatatccaatctacttattaaactgtgttctatttaccagtggagtttttctgcagtggttgcgtttcactgtaaggataatggagttcctctcctctgctttcctcagaggatggtcctttaacatagccagaaacaagccctgtggtttgaaggtgagctgtgaggatgggactaattgatatgcaccagtttacaaagacagtcttatcatccgagaatacaccatctttttctctggataattatttcttacatcatgcttgattcctacattttgttgggtctcaacattggctcacgaatgctgttaatatttattctgtattgataaaaagtctgtcttgccactacaagtaaatcccccatttaatattttcttctttagcatagcactgtcattttttgtgaaaatggttatgtttatttattacaatactgagtcatatataaattttcaataaaagcagaaactttcttaccttaaaaaaaggctgc

SEQ ID NO: 367723 - DNA, 4035 bp, Homo sapiens
gagggggtgggcgtgaggggcgccgtccgcctgaggggctgcagatcccggctaccgcgagcgccgtggctggcttggctgttccatgtggctccggcggggatggaggactcggtggcggcggcggctgctgctgcggcggcgacggaggagcggctatgagaagggaacggggccagactcagcccgacagcgggattagagccctccagaatacccatcatatagcccctgaggtggcatggtgatgtctccatgagggaaccccttcccactcatcctgtcacgtatatcatagtgttcttgactgggccattcatctaagatgggatttaccctgtgaaacagggagaagacttatggaccccaagcatcatttcgagttgtagttgagtttttaaaagacatacatgcaaagttcctttgctttggaccctctgcattattaaagctgctgtattgctaacccagaactgctccagtgtcttgactgatcatcatggcttcagtttggaagagactgcagcgtgtgggaaaacatgcatccaagttccagtttgtggcctcctaccaggagctcatggttgagtgtacgaagaaatggcaaccagataaactggtggtagtttggaccagaagaagccgaaggaagtcttctaaggcacatagctggcaacctggaataaaaaatccctatcgtggtgttgttgtgtggcctgttcctgaaaacattgaaatcactgtaacactttttaaggatcctcatgcggaagaatttgaagacaaagagtggacatttgtcatagaaaatgaatccccttctggtcgaaggaaagctcttgctactagcagcatcaatatgaaacagtatgcaagccctatgccaactcagactgatgtcaagttaaaattcaagccattatctaaaaaagttgtatctgccgctcttcagttttcattatcttgcatttttctgagggaaggaaaagccacagatgaagacatgcaaagtttggctagtttgatgagtatgaagcaggctgacattggcaatttagatgacttcgaagaagataatgaagatgatgatgagaacagagtgaaccaagaagaaaaggcagctaaaattacagagcttatcaacaaacttaactttttggatgaagcagaaaaggacttggccaccgtgaattcaaatccatttgatgatcctgatgctgcagaattaaatccatttggagatcctgactcagaagaacctatcactgaaacagcttcacctagaaaaacagaagactctttttataataacagctataatccctttaaagaggtgcagactccacagtatttgaacccattcgatgagccagaagcatttgtgaccataaaggattctcctccccagtctacaaaaagaaaaaatataagacctgtggatatgagcaagtacctctatgctgatagttctaaaactgaagaagaagaattggatgaatcaaatcctttttatgaacctaaatcaactcctcctccaaataatttggtaaatcctgttcaagaactagaaactgaaaggcgagtgaaaagaaaggccccggctccaccagtcctctcaccaaaaacaggagtattaaatgaaaacacagtttctgcaggaaaagatctctctacttctcctaagccaagccctataccaagtcctgttttggggcgaaagccaaatgctagtcagtctttgcttgtatggtgtaaagaagttacaaagaactaccgaggagtaaaaatcaccaattttactacatcgtggagaaatggtttatctttttgtgcaatattacaccactttagaccagatttaattgactacaagtctctgaatcctcaagatattaaagagaacaacaaaaaggcatacgatggatttgccagcataggaatttcccgattattggaaccttctgatatggtattattagcaattcctgataaactgactgttatgacttatctctatcaaataagggcacatttcagtggccaagaactaaatgtcgttcagatagaggaaaacagcagtaaaagcacatataaagttggaaactatgaaacagatacaaacagttctgttgatcaagaaaaattctatgcagagcttagtgatctgaagcgggagcctgaactacaacagcctatcagcggagcagtagacttcttatcacaggatgactctgtatttgtaaatgatagcggggttggagagtcagaaagtgagcatcaaactcctgatgatcaccttagtccaagcacagcctccccttactgtcgcaggactaaaagtgacacagaaccccagaagtctcagcagagctctggaaggacttcaggatctgatgaccctggaatatgttccaatacagattcaacccaagcacaggttttgttaggcaaaaagagactattgaaagctgagactttagaattgagtgacttatatgttagtgataagaagaaggatatgtctccaccctttatttgtgaggagacagatgaacaaaagcttcaaactctagacatcggtagtaacttggagaaagaaaaattagagaattccagatccttagaatgcagatcagatccagaatctcctatcaaaaaaacaagtttatctcctacttctaaacttggatactcatatagtagagatctagaccttgctaagaaaaaacatgcttccctgaggcagacggagtctgatccagatgctgatagaaccactttaaatcatgcagatcattcatcaaaaatagtccagcagcaagatgaagagcgacgtcggcagctgagagagagagctcgtcagctaatagcagaagctcgatctggagtgaagatgtcagaacttcccagctatggtgaaatggctgcagaaaagttgaaagaaaggtcaaaggcatctggagaacaaaacagtaagttggtggacttgaagctgaagaagctcctagaagttcagccacaggtggcaaattcaccctccagtgctgcccagaaagctgtaactgagagctcagagcaggacatgaaaagtggcacagaagatctccggactgaacgattacaaaaaacaacagaacgttttagaaatcctgttgtgttcagcaaagattctacagtcagaaaaactcaacttcagtctttcagccaatatattgagaatagaccagagatgaaaaggcagagatcaatacaggaagatacaaagaaaggaaatgaggagaaggcagcgataactgaaactcagaggaagccatcagaagatgaagtgcttaataaagggttcaaagacaccagtcagtatgtagtaggagaattggcagcactagagaatgagcaaaagcaaattgacacccgtgccgcgctggtggagaagcgccttcgctatctcatggacacaggaaggaacacagaagaagaagaagctatgatgcaggaatggtttatgttagttaataagaaaaatgccttaataaggagaatgaatcagctctctcttctggaaaaagaacatgatttagaacgacggtatgagctgctgaaccgggaattgagggcaatgctagccattgaagactggcagaagaccgaggcccagaagcgacgcgaacagcttctgctagatgagctggtggccctggtgaacaagcgcgatgcgctcgtcagggacctggacgcgcaggagaagcaggccgaagaagaagatgagcatttggagcgaactctggagcaaaacaaaggcaagatggccaagaaagaggagaaatgtgttcttcagtagccatcagatcagaaagaatctctcccaacattttagagtcttgcttcccaaaccagaaaaagtcagactcattgttgatttaaaacttttaacattttgtttggctggattgtactactttacactacccaatttcattatcctcccttcctctttccatctctattatctctcacatcggggtaccgagctgatgt

SEQ ID NO: 367724 - DNA, 378 bp, Homo sapiens
gcgacgcgaacagcttctgctagatgagctggtggccctggtgaacaagcgcgatgcgctcgtcagggacctggacgcgcaggagaagcagtgagtgggcagtggggtcgggtcgaggctgggccacctgccgaggggccgagaagtgtgcggaaagttcaatccagaggtcgcgggagggccggggcagcctcccactggcctggtgctccccattcccgctggggatccaaatactgggcgacgggggagtgctgctctgccctccacgaagaaaaataattttgtttcctgtttgtcctgtttgtctgacatccagggccgaagaagaagatgagcatttggagcgaactctggagcaaaacaaaggcaagatgg

SEQ ID NO: 367725 - DNA, 393 bp, Homo sapiens
cctgtttgttcttgttaacagaaagggttcaaagacaccagtcagtatgtagtaggagaattggcagcactagagaatgagcaaaagcaaattgacacccgtgccgcgctggtggagaagcgccttcgctatctcatggacacaggtacggtgcccaattacactgtaaacagttttggcaaattgagcgttcacaaactcttatagagttttggaagtgtgaatctttgaagcctgaatgttcagcaaaactgccttgaaaataaaaaggctgcgatttgcagccacctctctgggccctggtgataagagtgccttcatgggaagtgataactcgccctgataccgtgtgagccagcactattgaacagtgtgctcatccatgcagagttg

SEQ ID NO: 367726 - DNA, 402 bp, Homo sapiens
tagtaaatgcacgcgtccaatgctcgtccagatcagcggtcacggatacgactcctagccagagatgagtcagtggcacagaagatctccggactgaacgattacaaaaaacaacagaacgttttagaaatcctgttgtgttcagcaaagattctacagtcagaaaaactcaacttcagtctttcagccaatatattgagaatagaccagagatgaaaaggcagagatcaatacaggaagatacaaagaaaggaaatgaggagaaggcagcgataactgaaactcagaggaagccatcagaagatgaagtgcttaataaaaaaattaaaattagccagacatggtggtgtgcacctgtagtctcagctactcaggaggctgaggcaggaggattgcttgacc

SEQ ID NO: 367727 - DNA, 5012 bp, Homo sapiens
gggttgcttgctaggacacaaggttagcatgcccctgtagcagcaatgtgagaatcagaaaaggtgactgtgcatctcaagaagccgaatcaaaaagccaagccaaccacctaaccagtgattttcaagccctccagaatacccatcatatagcccctgaggtggcatggtgatgtctccatgagggaaccccttcccactcatcctgtcacgtatatcatagtgttcttgactgggccattcatctaagatgggatttaccctgtgaaacagggagaagacttatggaccccaagcatcatttcgagttgtagttgagtttttaaaagacatacatgcaaagttcctttgctttggaccctctgcattattaaagctgctgtattgctaacccagaactgctccagtgtcttgactgatcatcatggcttcagtttggaagagactgcagcgtgtgggaaaacatgcatccaagttccagtttgtggcctcctaccaggagctcatggttgagtgtacgaagaaatggcaaccagataaactggtggtagtttggaccagaagaagccgaaggaagtcttctaaggcacatagctggcaacctggaataaaaaatccctatcgtggtgttgttgtgtggcctgttcctgaaaacattgaaatcactgtaacactttttaaggatcctcatgcggaagaatttgaagacaaagagtggacatttgtcatagaaaatgaatccccttctggtcgaaggaaagctcttgctactagcagcatcaatatgaaacagtatgcaagccctatgccaactcagactgatgtcaagttaaaattcaagccattatctaaaaaagttgtatctgccgctcttcagttttcattatcttgcatttttctgagggaaggaaaagccacagatgaagacatgcaaagtttggctagtttgatgagtatgaagcaggctgacattggcaatttagatgacttcgaagaagataatgaagatgatgatgagaacagagtgaaccaagaagaaaaggcagctaaaattacagagcttatcaacaaacttaactttttggatgaagcagaaaaggacttggccaccgtgaattcaaatccatttgatgatcctgatgctgcagaattaaatccatttggagatcctgactcagaagaacctatcactgaaacagcttcacctagaaaaacagaagactctttttataataacagctataatccctttaaagaggtgcagactccacagtatttgaacccattcgatgagccagaagcatttgtgaccataaaggattctcctccccagtctacaaaaagaaaaaatataagacctgtggatatgagcaagtacctctatgctgatagttctaaaactgaagaagaagaattggatgaatcaaatcctttttatgaacctaaatcaactcctcctccaaataatttggtaaatcctgttcaagaactagaaactgaaaggcgagtgaaaagaaaggccccggctccaccagtcctctcaccaaaaacaggagtattaaatgaaaacacagtttctgcaggaaaagatctctctacttctcctaagccaagccctataccaagtcctgttttggggcgaaagccaaatgctagtcagtctttgcttgtatggtgtaaagaagttacaaagaactaccgaggagtaaaaatcaccaattttactacatcgtggagaaatggtttatctttttgtgcaatattacaccactttagaccagatttaattgactacaagtctctgaatcctcaagatattaaagagaacaacaaaaaggcatacgatggatttgccagcataggaatttcccgattattggaaccttctgatatggtattattagcaattcctgataaactgactgttatgacttatctctatcaaataagggcacatttcagtggccaagaactaaatgtcgttcagatagaggaaaacagcagtaaaagcacatataaagttggaaactatgaaacagatacaaacagttctgttgatcaagaaaaattctatgcagagcttagtgatctgaagcgggagcctgaactacaacagcctatcagcggagcagtagacttcttatcacaggatgactctgtatttgtaaatgatagcggggttggagagtcagaaagtgagcatcaaactcctgatgatcaccttagtccaagcacagcctccccttactgtcgcaggactaaaagtgacacagaaccccagaagtctcagcagagctctggaaggacttcaggatctgatgaccctggaatatgttccaatacagattcaacccaagcacaggttttgttaggcaaaaagagactattgaaagctgagactttagaattgagtgacttatatgttagtgataagaagaaggatatgtctccaccctttatttgtgaggagacagatgaacaaaagcttcaaactctagacatcggtagtaacttggagaaagaaaaattagagaattccagatccttagaatgcagatcagatccagaatctcctatcaaaaaaacaagtttatctcctacttctaaacttggatactcatatagtagagatctagaccttgctaagaaaaaacatgcttccctgaggcagacggagtctgatccagatgctgatagaaccactttaaatcatgcagatcattcatcaaaaatagtccagcatcgattgttatctagacaagaagaacttaaggaaagagcaagagttctgcttgagcaagcaagaagagatgcagccttaaaggcggggaataagcacaataccaacacagccaccccattctgcaacaggcagctaagtgatcagcaagatgaagagcgacgtcggcagctgagagagagagctcgtcagctaatagcagaagctcgatctggagtgaagatgtcagaacttcccagctatggtgaaatggctgcagaaaagttgaaagaaaggtcaaaggcatctggagatgaaaatgataatattgagatagatactaacgaggagatccctgaaggctttgttgtaggaggtggagatgaacttactaacttagaaaatgaccttgatactcccgaacaaaacagtaagttggtggacttgaagctgaagaagctcctagaagttcagccacaggtggcaaattcaccctccagtgctgcccagaaagctgtaactgagagctcagagcaggacatgaaaagtggcacagaagatctccggactgaacgattacaaaaaacaacagaacgttttagaaatcctgttgtgttcagcaaagattctacagtcagaaaaactcaacttcagtctttcagccaatatattgagaatagaccagagatgaaaaggcagagatcaatacaggaagatacaaagaaaggaaatgaggagaaggcagcgataactgaaactcagaggaagccatcagaagatgaagtgcttaataaagggttcaaagacaccagtcagtatgtagtaggagaattggcagcactagagaatgagcaaaagcaaattgacacccgtgccgcgctggtggagaagcgccttcgctatctcatggacacaggaaggaacacagaagaagaagaagctatgatgcaggaatggtttatgttagttaataagaaaaatgccttaataaggagaatgaatcagctctctcttctggaaaaagaacatgatttagaacgacggtatgagctgctgaaccgggaattgagggcaatgctagccattgaagactggcagaagaccgaggcccagaagcgacgcgaacagcttctgctagatgagctggtggccctggtgaacaagcgcgatgcgctcgtcagggacctggacgcgcaggagaagcaggccgaagaagaagatgagcatttggagcgaactctggagcaaaacaaaggcaagatggccaagaaagaggagaaatgtgttcttcagtagccatcagatcagaaagaatctctcccaacattttagagtcttgcttcccaaaccagaaaaagtcagactcattgttgatttaaaacttttaacattttgtttggctggattgtactactttacctctactttaccaccaccacccttttcctccctcctttccaaataatatacagaactccaaaatagcttcatttaaggatttttttgtgagttaacaatttccttgaaatcctgtgaaatagatttgcacagacaccttgtgagtgattggtattggaggtgttcaagaaactgttcgaaaaagaacaaaaacacttccctcgttattttctctcattttttgatgagaggaaaatttgaaacattattcttgttgttgttggtaatagcataatgacagtgggaggggtacaaggggataagaaaaatgtcatgatttttttccggtcctgccacatgtaacacttactctgttacctaaattttatagttagatcatatccaatctacttattaaactgtgttctatttaccagtggagtttttctgcagtggttgcgtttcactgtaaggataatggagttcctctcctctgctttcctcagaggatggtcctttaacatagccagaaacaagccctgtggtttgaaggtgagctgtgaggatgggactaattgatatgcaccagtttacaaagacagtcttatcatccgagaatacaccatctttttctctggataattatttcttacatcatgcttgattcctacattttgttgggtctcaacattggctcacgaatgctgttaatatttattctgtattgataaaaagtctgtcttgccactacaagtaaatcccccatttaatattttcttctttagcatagcactgtcattttttgtgaaaatggttatgtttatttattacaatactgagtcatatataaattttcaataaaagcagaaactttcttaccttaaaaaaaggctgc

SEQ ID NO: 367728 - DNA, 4781 bp, Homo sapiens
tactactactactaaattcgcggccgcgtcgacgtgaaacagggagaagacttatggaccccaagcatcatttcgagttgtagttgagtttttaaaagacatacatgcaaagttcctttgctttggaccctctgcattattaaagctgctgtattgctaacccagaactgctccagtgtcttgactgatcatcatggcttcagtttggaagagactgcagcgtgtgggaaaacatgcatccaagttccagtttgtggcctcctaccaggagctcatggttgagtgtacgaagaaatggcaaccagataaactggtggtagtttggaccagaagaagccgaaggaagtcttctaaggcacatagctggcaacctggaataaaaaatccctatcgtggtgttgttgtgtggcctgttcctgaaaacattgaaatcactgtaacactttttaaggatcctcatgcggaagaatttgaagacaaagagtggacatttgtcatagaaaatgaatccccttctggtcgaaggaaagctcttgctactagcagcatcaatatgaaacagtatgcaagccctatgccaactcagactgatgtcaagttaaaattcaagccattatctaaaaaagttgtatctgccgctcttcagttttcattatcttgcatttttctgagggaaggaaaagccacagatgaagacatgcaaagtttggctagtttgatgagtatgaagcaggctgacattggcaatttagatgacttcgaagaagataatgaagatgatgatgagaacagagtgaaccaagaagaaaaggcagctaaaattacagagcttatcaacaaacttaactttttggatgaagcagaaaaggacttggccaccgtgaattcaaatccatttgatgatcctgatgctgcagaattaaatccatttggagatcctgactcagaagaacctatcactgaaacagcttcacctagaaaaacagaagactctttttataataacagctataatccctttaaagaggtgcagactccacagtatttgaacccattcgatgagccagaagcatttgtgaccataaaggattctcctccccagtctacaaaaagaaaaaatataagacctgtggatatgagcaagtacctctatgctgatagttctaaaactgaagaagaagaattggatgaatcaaatcctttttatgaacctaaatcaactcctcctccaaataatttggtaaatcctgttcaagaactagaaactgaaaggcgagtgaaaagaaaggccccggctccaccagtcctctcaccaaaaacaggagtattaaatgaaaacacagtttctgcaggaaaagatctctctacttctcctaagccaagccctataccaagtcctgttttggggcgaaagccaaatgctagtcagtctttgcttgtatggtgtaaagaagttacaaagaactaccgaggagtaaaaatcaccaattttactacatcgtggagaaatggtttatctttttgtgcaatattacaccactttagaccagatttaattgactacaagtctctgaatcctcaagatattaaagagaacaacaaaaaggcatacgatggatttgccagcataggaatttcccgattattggaaccttctgatatggtattattagcaattcctgataaactgactgttatgacttatctctatcaaataagggcacatttcagtggccaagaactaaatgtcgttcagatagaggaaaacagcagtaaaagcacatataaagttggaaactatgaaacagatacaaacagttctgttgatcaagaaaaattctatgcagagcttagtgatctgaagcgggagcctgaactacaacagcctatcagcggagcagtagacttcttatcacaggatgactctgtatttgtaaatgatagcggggttggagagtcagaaagtgagcatcaaactcctgatgatcaccttagtccaagcacagcctccccttactgtcgcaggactaaaagtgacacagaaccccagaagtctcagcagagctctggaaggacttcaggatctgatgaccctggaatatgttccaatacagattcaacccaagcacaggttttgttaggcaaaaagagactattgaaagctgagactttagaattgagtgacttatatgttagtgataagaagaaggatatgtctccaccctttatttgtgaggagacagatgaacaaaagcttcaaactctagacatcggtagtaacttggagaaagaaaaattagagaattccagatccttagaatgcagatcagatccagaatctcctatcaaaaaaacaagtttatctcctacttctaaacttggatactcatatagtagagatctagaccttgctaagaaaaaacatgcttccctgaggcagacggagtctgatccagatgctgatagaaccactttaaatcatgcagatcattcatcaaaaatagtccagcatcgattgttatctagacaagaagaacttaaggaaagagcaagagttctgcttgagcaagcaagaagagatgcagccttaaaggcggggaataagcacaataccaacacagccaccccattctgcaacaggcagctaagtgatcagcaagatgaagagcgacgtcggcagctgagagagagagctcgtcagctaatagcagaagctcgatctggagtgaagatgtcagaacttcccagctatggtgaaatggctgcagaaaagttgaaagaaaggtcaaaggcatctggagatgaaaatgataatattgagatagatactaacgaggagatccctgaaggctttgttgtaggaggtggagatgaacttactaacttagaaaatgaccttgatactcccgaacaaaacagtaagttggtggacttgaagctgaagaagctcctagaagttcagccacaggtggcaaattcaccctccagtgctgcccagaaagctgtaactgagagctcagagcaggacatgaaaagtggcacagaagatctccggactgaacgattacaaaaaacaacagaacgttttagaaatcctgttgtgttcagcaaagattctacagtcagaaaaactcaacttcagtctttcagccaatatattgagaatagaccagagatgaaaaggcagagatcaatacaggaagatacaaagaaaggaaatgaggagaaggcagcgataactgaaactcagaggaagccatcagaagatgaagtgcttaataaagggttcaaagacaccagtcagtatgtagtaggagaattggcagcactagagaatgagcaaaagcaaattgacacccgtgccgcgctggtggagaagcgccttcgctatctcatggacacaggaaggaacacagaagaagaagaagctatgatgcaggaatggtttatgttagttaataagaaaaatgccttaataaggagaatgaatcagctctctcttctggaaaaagaacatgatttagaacgacggtatgagctgctgaaccgggaattgagggcaatgctagccattgaagactggcagaagaccgaggcccagaagcgacgcgaacagcttctgctagatgagctggtggccctggtgaacaagcgcgatgcgctcgtcagggacctggacgcgcaggagaagcaggccgaagaagaagatgagcatttggagcgaactctggagcaaaacaaaggcaagatggccaagaaagaggagaaatgtgttcttcagtagccatcagatcagaaagaatctctcccaacattttagagtcttgcttcccaaaccagaaaaagtcagactcattgttgatttaaaacttttaacattttgtttggctggattgtactactttacctctactttaccaccaccacccttttcctccctcctttccaaataatatacagaactccaaaatagcttcatttaaggatttttttgtgagttaacaatttccttgaaatcctgtgaaatagatttgcacagacaccttgtgagtgattggtattggaggtgttcaagaaactgttcgaaaaagaacaaaaacacttccctcgttattttctctcattttttgatgagaggaaaatttgaaacattattcttgttgttgttggtaatagcataatgacagtgggaggggtacaaggggataagaaaaatgtcatgatttttttccggtcctgccacatgtaacacttactctgttacctaaattttatagttagatcatatccaatctacttattaaactgtgttctatttaccagtggagtttttctgcagtggttgcgtttcactgtaaggataatggagttcctctcctctgctttcctcagaggatggtcctttaacatagccagaaacaagccctgtggtttgaaggtgagctgtgaggatgggactaattgatatgcaccagtttacaaagacagtcttatcatccgagaatacaccatctttttctctggataattatttcttacatcatgcttgattcctacattttgttgggtctcaacattggctcacgaatgctgttaatatttattctgtattgataaaaagtctgtcttgccactacaagtaaatcccccatttaatattttcttctttagcatagcactgtcattttttgtgaaaatggttatgtttatttattacaatactgagtcatatataaattttcaataaaagcagaaactttcttaccttaaaaaaaggctgc

SEQ ID NO: 367729 - DNA, 4310 bp, Homo sapiens
gagggggtgggcgtgaggggcgccgtccgcctgaggggctgcagatcccggctaccgcgagcgccgtggctggcttggctgttccatgtggctccggcggggatggaggactcggtggcggcggcggctgctgctgcggcggcgacggaggagcggctatgagaagggaacggggccagactcagcccgacagcgggattagagccctccagaatacccatcatatagcccctgaggtggcatggtgatgtctccatgagggaaccccttcccactcatcctgtcacgtatatcatagtgttcttgactgggccattcatctaagatgggatttaccctgtgaaacagggagaagacttatggaccccaagcatcatttcgagttgtagttgagtttttaaaagacatacatgcaaagttcctttgctttggaccctctgcattattaaagctgctgtattgctaacccagaactgctccagtgtcttgactgatcatcatggcttcagtttggaagagactgcagcgtgtgggaaaacatgcatccaagttccagtttgtggcctcctaccaggagctcatggttgagtgtacgaagaaatggcaaccagataaactggtggtagtttggaccagaagaagccgaaggaagtcttctaaggcacatagctggcaacctggaataaaaaatccctatcgtggtgttgttgtgtggcctgttcctgaaaacattgaaatcactgtaacactttttaaggatcctcatgcggaagaatttgaagacaaagagtggacatttgtcatagaaaatgaatccccttctggtcgaaggaaagctcttgctactagcagcatcaatatgaaacagtatgcaagccctatgccaactcagactgatgtcaagttaaaattcaagccattatctaaaaaagttgtatctgccgctcttcagttttcattatcttgcatttttctgagggaaggaaaagccacagatgaagacatgcaaagtttggctagtttgatgagtatgaagcaggctgacattggcaatttagatgacttcgaagaagataatgaagatgatgatgagaacagagtgaaccaagaagaaaaggcagctaaaattacagagcttatcaacaaacttaactttttggatgaagcagaaaaggacttggccaccgtgaattcaaatccatttgatgatcctgatgctgcagaattaaatccatttggagatcctgactcagaagaacctatcactgaaacagcttcacctagaaaaacagaagactctttttataataacagctataatccctttaaagaggtgcagactccacagtatttgaacccattcgatgagccagaagcatttgtgaccataaaggattctcctccccagtctacaaaaagaaaaaatataagacctgtggatatgagcaagtacctctatgctgatagttctaaaactgaagaagaagaattggatgaatcaaatcctttttatgaacctaaatcaactcctcctccaaataatttggtaaatcctgttcaagaactagaaactgaaaggcgagtgaaaagaaaggccccggctccaccagtcctctcaccaaaaacaggagtattaaatgaaaacacagtttctgcaggaaaagatctctctacttctcctaagccaagccctataccaagtcctgttttggggcgaaagccaaatgctagtcagtctttgcttgtatggtgtaaagaagttacaaagaactaccgaggagtaaaaatcaccaattttactacatcgtggagaaatggtttatctttttgtgcaatattacaccactttagaccagatttaattgactacaagtctctgaatcctcaagatattaaagagaacaacaaaaaggcatacgatggatttgccagcataggaatttcccgattattggaaccttctgatatgacggagtctgatccagatgctgatagaaccactttaaatcatgcagatcattcatcaaaaatagtccagcatcgattgttatctagacaagaagaacttaaggaaagagcaagagttctgcttgagcaagcaagaagagatgcagccttaaaggcggggaataagcacaataccaacacagccaccccattctgcaacaggcagctaagtgatcagcaagatgaagagcgacgtcggcagctgagagagagagctcgtcagctaatagcagaagctcgatctggagtgaagatgtcagaacttcccagctatggtgaaatggctgcagaaaagttgaaagaaaggtcaaaggcatctggagatgaaaatgataatattgagatagatactaacgaggagatccctgaaggctttgttgtaggaggtggagatgaacttactaacttagaaaatgaccttgatactcccgaacaaaacagtaagttggtggacttgaagctgaagaagctcctagaagttcagccacaggtggcaaattcaccctccagtgctgcccagaaagctgtaactgagagctcagagcaggacatgaaaagtggcacagaagatctccggactgaacgattacaaaaaacaacagaacgttttagaaatcctgttgtgttcagcaaagattctacagtcagaaaaactcaacttcagtctttcagccaatatattgagaatagaccagagatgaaaaggcagagatcaatacaggaagatacaaagaaaggaaatgaggagaaggcagcgataactgaaactcagaggaagccatcagaagatgaagtgcttaataaagggttcaaagacaccagtcagtatgtagtaggagaattggcagcactagagaatgagcaaaagcaaattgacacccgtgccgcgctggtggagaagcgccttcgctatctcatggacacaggaaggaacacagaagaagaagaagctatgatgcaggaatggtttatgttagttaataagaaaaatgccttaataaggagaatgaatcagctctctcttctggaaaaagaacatgatttagaacgacggtatgagctgctgaaccgggaattgagggcaatgctagccattgaagactggcagaagaccgaggcccagaagcgacgcgaacagcttctgctagatgagctggtggccctggtgaacaagcgcgatgcgctcgtcagggacctggacgcgcaggagaagcaggccgaagaagaagatgagcatttggagcgaactctggagcaaaacaaaggcaagatggccaagaaagaggagaaatgtgttcttcagtagccatcagatcagaaagaatctctcccaacattttagagtcttgcttcccaaaccagaaaaagtcagactcattgttgatttaaaacttttaacattttgtttggctggattgtactactttacctctactttaccaccaccacccttttcctccctcctttccaaataatatacagaactccaaaatagcttcatttaaggatttttttgtgagttaacaatttccttgaaatcctgtgaaatagatttgcacagacaccttgtgagtgattggtattggaggtgttcaagaaactgttcgaaaaagaacaaaaacacttccctcgttattttctctcattttttgatgagaggaaaatttgaaacattattcttgttgttgttggtaatagcataatgacagtgggaggggtacaaggggataagaaaaatgtcatgatttttttccggtcctgccacatgtaacacttactctgttacctaaattttatagttagatcatatccaatctacttattaaactgtgttctatttaccagtggagtttttctgcagtggttgcgtttcactgtaaggataatggagttcctctcctctgctttcctcagaggatggtcctttaacatagccagaaacaagccctgtggtttgaaggtgagctgtgaggatgggactaattgatatgcaccagtttacaaagacagtcttatcatccgagaatacaccatctttttctctggataattatttcttacatcatgcttgattcctacattttgttgggtctcaacattggctcacgaatgctgttaatatttattctgtattgataaaaagtctgtcttgccactacaagtaaatcccccatttaatattttcttctttagcatagcactgtcattttttgtgaaaatggttatgtttatttattacaatactgagtcatatataaattttcaataaaagcagaaactttcttaccttaaaaaaaggctgc

SEQ ID NO: 367730 - DNA, 3628 bp, Homo sapiens
gagggggtgggcgtgaggggcgccgtccgcctgaggggctgcagatcccggctaccgcgagcgccgtggctggcttggctgttccatgtggctccggcggggatggaggactcggtggcggcggcggctgctgctgcggcggcgacggaggagcggctatgagaagggaacggggccagactcagcccgacagcgggattagagccctccagaatacccatcatatagcccctgaggtggcatggtgatgtctccatgagggaaccccttcccactcatcctgtcacgtatatcatagtgttcttgactgggccattcatctaagatgggatttaccctgtgaaacagggagaagacttatggaccccaagcatcatttcgagttgtagttgagtttttaaaagacatacatgcaaagttcctttgctttggaccctctgcattattaaagctgctgtattgctaacccagaactgctccagtgtcttgactgatcatcatggcttcagtttggaagagactgcagcgtgtgggaaaacatgcatccaagttccagtttgtggcctcctaccaggagctcatggttgagtgtacgaagaaatggcaaccagataaactggtggtagtttggaccagaagaagccgaaggaagtcttctaaggcacatagctggcaacctggaataaaaaatccctatcgtggtgttgttgtgtggcctgttcctgaaaacattgaaatcactgtaacactttttaaggatcctcatgcggaagaatttgaagacaaagagtggacatttgtcatagaaaatgaatccccttctggtcgaaggaaagctcttgctactagcagcatcaatatgaaacagtatgcaagccctatgccaactcagactgatgtcaagttaaaattcaagccattatctaaaaaagttgtatctgccgctcttcagttttcattatcttgcatttttctgagggaaggaaaagccacagatgaagacatgcaaagtttggctagtttgatgagtatgaagcaggctgacattggcaatttagatgacttcgaagaagataatgaagatgatgatgagaacagagtgaaccaagaagaaaaggcagctaaaattacagagcttatcaacaaacttaactttttggatgaagcagaaaaggacttggccaccgtgaattcaaatccatttgatgatcctgatgctgcagaattaaatccatttggagatcctgactcagaagaacctatcactgaaacagcttcacctagaaaaacagaagactctttttataataacagctataatccctttaaagaggtgcagactccacagtatttgaacccattcgatgagccagaagcatttgtgaccataaaggattctcctccccagtctacaaaaagaaaaaatataagacctgtggatatgagcaagtacctctatgctgatagttctaaaactgaagaagaagaattggatgaatcaaatcctttttatgaacctaaatcaactcctcctccaaataatttggtaaatcctgttcaagaactagaaactgaaaggcgagtgaaaagaaaggccccggctccaccagtcctctcaccaaaaacaggagtattaaatgaaaacacagtttctgcaggaaaagatctctctacttctcctaagccaagccctataccaagtcctgttttggggcgaaagccaaatgctagtcagtctttgcttgtatggtgtaaagaagttacaaagaactaccgaggagtaaaaatcaccaattttactacatcgtggagaaatggtttatctttttgtgcaatattacaccactttagaccagatttaattgactacaagtctctgaatcctcaagatattaaagagaacaacaaaaaggcatacgatggatttgccagcataggaatttcccgattattggaaccttctgatatggtattattagcaattcctgataaactgactgttatgacttatctctatcaaataagggcacatttcagtggccaagaactaaatgtcgttcagatagaggaaaacagcagtaaaagcacatataaagttggaaactatgaaacagatacaaacagttctgttgatcaagaaaaattctatgcagagcttagtgatctgaagcgggagcctgaactacaacagcctatcagcggagcagtagacttcttatcacaggatgactctgtatttgtaaatgatagcggggttggagagtcagaaagtgagcatcaaactcctgatgatcaccttagtccaagcacagcctccccttactgtcgcaggactaaaagtgacacagaaccccagaagtctcagcagagctctggaaggacttcaggatctgatgaccctggaatatgttccaatacagattcaacccaagcacaggttttgttaggcaaaaagagactattgaaagctgagactttagaattgagtgacttatatgttagtgataagaagaaggatatgtctccaccctttatttgtgaggagacagatgaacaaaagcttcaaactctagacatcggtagtaacttggagaaagaaaaattagagaattccagatccttagaatgcagatcagatccagaatctcctatcaaaaaaacaagtttatctcctacttctaaacttggatactcatatagtagagatctagaccttgctaagaaaaaacatgcttccctgaggcagacggagtctgatccagatgctgatagaaccactttaaatcatgcagatcattcatcaaaaatagtccagcagcaagatgaagagcgacgtcggcagctgagagagagagctcgtcagctaatagcagaagctcgatctggagtgaagatgtcagaacttcccagctatggtgaaatggctgcagaaaagttgaaagaaaggtcaaaggcatctggagaacaaaacagtaagttggtggacttgaagctgaagaagctcctagaagttcagccacaggtggcaaattcaccctccagtgctgcccagaaagctgtaactgagagctcagagcaggacatgaaaagtggcacagaagatctccggactgaacgattacaaaaaacaacagaacgttttagaaatcctgttgtgttcagcaaagattctacagtcagaaaaactcaacttcagtctttcagccaatatattgagaatagaccagagatgaaaaggcagagatcaatacaggaagatacaaagaaaggaaatgaggagaaggcagcgataactgaaactcagaggaagccatcagaagatgaagtgcttaatgtatattaattttttgtgtggtttcatgattgctgataattccaaactaaagggttcaaagacaccagtcagtatgtagtaggagaattggcagcactagagaatgagcaaaagcaaattgacacccgtgccgcgctggtggagaagcgccttcgctatctcatggacacaggaaggaacacagaagaagaagaagctatgatgcaggaatggtttatgttagttaataagaaaaatgccttaataaggagaatgaatcagctctctcttctgtaagtacatgatcattatgct

SEQ ID NO: 367731 - DNA, 1613 bp, Homo sapiens
agtcatgtgctgctgcttcatctagcagaggttggcctctggctctgacactttttgtcagttgtctttaggtggtcctgaatcttgggcccttttgattgtgaatactgtgtagcaggatcttgagagtccttgttcttacataggcattgctctagtttgtctttggcaaaaaaaaaaaaaaaaaaaagtaaatatccagggaaccctgcccagactaatactgttggtggcataagagaatcaagccattctcaagagataacttcataaccagaattgtctgttggctagcagctgtcacagataggcagggcacttgggatatgacctttctgtccaggtgattcacagactagacctttcttatcctcctcctagagttttgacttgggactctagtgttaagatgatgagcccgtgcatcaggtccttctgcactttggtggaagtctcccagggtaggtttcctatttgaaacagtggaatcatgtttccagtgataaagtttaatgacctcatccttttttttttttctcatctgccatttgtgtgtcttagatgggttttaattgcatgaatgtggctaatgtggttctcagaaattggtcagtatggcccgacatagcttctgctctgtcttactgactcaatacctttaggatttgtatcagagtttggatactagtgttagtggtggtgtcaccactacttaattgggagataatgaaaccaatcatggatgctgtttttattgggcatgtcatctaagagaggagaaatagctgggttttgggtctaattatgaataaggactgattcagaaaacgagtttatggtaggtagactaaagtttcacatcagactgtaccattgtgatttagacctatctaaaattcagagcatatcatctgggctacctcagggtcaccacccatgtattgggcttagtcaggattgacagatacattctcagctggcctgtcatataaaacatactgtcattgagcttaagctccgcttgttctgaggtttcacctccatgtgtttcattggtgcaaaagtggatctcttagttggtcacttaattctttctttttcagaaagatagtatgttcactggtatatttggtcactcttagaaccttccttcacattgttttttatgggacccatgaatggttagcctttcttttctattgtagaaggaaataaataggagtaaaaagaccattgtagtaaataagttcaaggggaacttgggaccagaaaccactgttatgtacaaaaaaatggcaaattcaataaactcaaatttaaaataatttttaaattaacagttatgataaattttatattttatacaaatagattgcttagaatggttctcaagaattataagagaaatgaactcacagtacaaaaattttataattactatacttgtgttttgtttgggggctgggaaatgtatttttacattgtagccaatcattttatatttgtcaatttaaatcttatgggtctttttttttttatctctcttgatgtcagattttatagtctttttaaataaatccatttaattaaaacgttaaacttacctttgtaag

SEQ ID NO: 367732 - DNA, 1609 bp, Homo sapiens
agtcatgtgctgctgcttcatctagcagaggttggcctctggctctgacactttttgtcagttgtctttaggtggtcctgaatcttgggcccttttgattgtgaatactgtgtagcaggatcttgagagtccttgttcttacataggcattgctctagtttgtctttggcaaaaaaaaaaaaaaaaaaaagtaaatatccagggaaccctgcccagactaatactgttggtggcataagagaatcaagccattctcaagagataacttcataaccagaattgtctgttggctagcagctgtcacagataggcagggcacttgggatatgacctttctgtccaggtgattcacagactagacctttcttatcctcctcctagagttttgacttgggactctagtgttaagatgatgagcccgtgcatcaggtccttctgcactttggtggaagtctcccagggtaggtttcctatttgaaacagtggaatcatgtttccagtgataaagtttaatgacctcatccttttttttttttctcatctgccatttgtgtgtcttagatgggttttaattgcatgaatgtggctaatgtggttctcagaaattggtcagtatggcccgacatagcttctgctctgtcttactgactcaatacctttaggatttgtatcagagtttggatactagtgttagtggtggtgtcaccactacttaattgggagataatgaaaccaatcatggatgctgtttttattgggcatgtcatctaagagaggagaaatagctgggttttgggtctaattatgaataaggactgattcagaaaacgagtttatggtaggtagactaaagtttcacatcagactgtaccattgtgatttagacctatctaaaattcagagcatatcatctgggctacctcagggtcaccacccatgtattgggcttagtcaggattgacagatacattctcagctggcctgtcatataaaacatactgtcattgagcttaagctccgcttgttctgaggtttcacctccatgtgtttcattggtgcaaaagtggatctcttagttggtcacttaattctttctttttcagaaagatagtatgttcactggtatatttggtcactcttagaaccttccttcacattgttttttatgggacccatgaatggttagcctttcttttctattgtagaaggaaataaataggagtaaaaagaccattgtagtaaataagttcaaggggaacttgggaccagaaaccactgttatgtacaaaaaaatggcaaattcaataaactcaaatttaaaataatttttaaattaacagttatgataaattttatattttatacaaatagattgcttagaatggttctcaagaattataagagaaatgaactcacagtacaaattttaattacaatatggttgttggggtggaatggttttacattgtgcatcttttattgtcattaaactatgggttttaaatcctgggagatatagggttagaaactttttaaaaaaagggggggatactggggcgtggtcatttaaggcgtcaggataaaaggggaaaaggaaagttgaatggtt

SEQ ID NO: 367733 - DNA, 574 bp, Homo sapiens
tggccgcgtttacttacgtcgtgatggggataacctggcggtcacttaattctttctttttcagaaagatagtatgttcactggtatatttggtcactcttagaaccttccttcacattgttttttatgggacccatgaatggttagcctttcttttctattgtagaaggaaataaataggagtaaaaagaccattgtagtaaataagttcaaggggaacttgggaccagaaaccactgttatgtacaaaaaaatggcaaattcaataaactcaaatttaaaataatttttaaattaacagttatgataaattttatattttatacaaatagattgcttagaatggttctcaagaattataagagaaatgaactcacagtacaaaaattttataattactatacttgtgttttgtttgggggctgggaaatgtatttttacattgtagccaatcattttatatttgtcaatttaaatcttatgggtctttttttttttatctctcttgatgtcagattttatagtctttttaaataaatccatttaattaaaacgttaaacttacctttgtaag

SEQ ID NO: 367734 - DNA, 1822 bp, Homo sapiens
agtcatgtgctgctgcttcatctagcagaggttggcctctggctctgacactttttgtcagttgtctttaggtggtcctgaatcttgggcccttttgattgtgaatactgtgtagcaggatcttgagagtccttgttcttacataggcattgctctagtttgtctttggcaaaaaaaaaaaaaaaaaaaagtaaatatccagggaaccctgcccagactaatactgttggtggcataagagaatcaagccattctcaagagataacttcataaccagaattgtctgttggctagcagctgtcacagataggcagggcacttgggatatgacctttctgtccaggtgattcacagactagacctttcttatcctcctcctagagttttgacttgggactctagtgttaagatgatgagcccgtgcatcaggtccttctgcactttggtggaagtctcccagggtaggtttcctatttgaaacagtggaatcatgtttccagtgataaagtttaatgacctcatccttttttttttttctcatctgccatttgtgtgtcttagatgggttttaattgcatgaatgtggctaatgtggttctcagaaattggtcagtatggcccgacatagcttctgctctgtcttactgactcaatacctttaggatttgtatcagagtttggatactagtgttagtggtggtgtcaccactacttaattgggagataatgaaaccaatcatggatgctgtttttattgggcatgtcatctaagagaggagaaatagctgggttttgggtctaattatgaataaggactgattcagaaaacgagtttatggtaggtagactaaagtttcacatcagactgtaccattgtgatttagacctatctaaaattcagagcatatcatctgggctacctcagggtcaccacccatgtattgggcttagtcaggattgacagatacattctcagctggcctgtcatataaaacatactgtcattgagcttaagctccgcttgttctgaggtttcacctccatgtgtttcattggtgcaaaagtggatctcttagttggtcacttaattctttctttttcagaaagatagtatgttcactggtatatttggtcactcttagaaccttccttcacattgttttttatgggacccatgaatggttagcctttcttttctattgtagaaggaaataaataggagtaaaaagaccattgtagtaaataagttcaaggggaacttgggaccagaaaccactgttatgtacaaaaaaatggcaaattcaataaactcaaatttaaaataatttttaaattaacagttatgataaattttatattttatacaaatagattgcttagaatggttctcaagaattataagagaaatgaactcacagtacaaaaattttataattactatacttgtgttttgtttgggggctgggaaatgtatttttacattgtagccaatcattttatatttgtcaatttaaatcttatgggtctttttttttttatctctcttgatgtcagattttatagtctttttaaataaatccatttaaatctaagtgaaaactaaaataccagaaaagcaaaaatagataagatgtaaagaaataaggaacgaatataatataaatcagggtagcattaaaaatggagaggggaagagtttctgaaacaatggggggactataagccacattctacagtttatttaagaaaagcttctataagatgtgaaatttatctgatgcgcgaagagttatgtaatgtatggagaagatctaaatataaa

SEQ ID NO: 367735 - DNA, 1559 bp, Homo sapiens
agtcatgtgctgctgcttcatctagcagaggttggcctctggctctgacactttttgtcagttgtctttaggtggtcctgaatcttgggcccttttgattgtgaatactgtgtagcaggatcttgagagtccttgttcttacataggcattgctctagtttgtctttggcaaaaaaaaaaaaaaaaaaaagtaaatatccagggaaccctgcccagactaatactgttggtggcataagagaatcaagccattctcaagagataacttcataaccagaattgtctgttggctagcagctgtcacagataggcagggcacttgggatatgacctttctgtccaggtgattcacagactagacctttcttatcctcctcctagagttttgacttgggactctagtgttaagatgatgagcccgtgcatcaggtccttctgcactttggtggaagtctcccagggtaggtttcctatttgaaacagtggaatcatgtttccagtgataaagtttaatgacctcatccttttttttttttctcatctgccatttgtgtgtcttagatgggttttaattgcatgaatgtggctaatgtggttctcagaaattggtcagtatggcccgacatagcttctgctctgtcttactgactcaatacctttaggatttgtatcagagtttggatactagtgttagtggtggtgtcaccactacttaattgggagataatgaaaccaatcatggatgctgtttttattgggcatgtcatctaagagaggagaaatagctgggttttgggtctaattatgaataaggactgattcagaaaacgagtttatggtaggtagactaaagtttcacatcagactgtaccattgtgatttagacctatctaaaattcagagcatatcatctgggctacctcagggtcaccacccatgtattgggcttagtcaggattgacagatacattctcagctggcctgtcatataaaacatactgtcattgagcttaagctccgcttgttctgaggtttcacctccatgtgtttcattggtgcaaaagtggatctcttagttggtcacttaattctttctttttcagaaagatagtatgttcactggtatatttggtcactcttagaaccttccttcacattgttttttatgggacccatgaatggttagcctttcttttctattgtagaaggaaataaataggagtaaaaagaccattgtagtaaataagttcaaggggaacttgggaccagaaaccactgttatgtacaaaaaaatggcaaattcaataaactcaaatttaaaataatttttaaattaacagttatgataaattttatattttatacaaatagattgcttagaatggttctcaagaattataagagaaatgaactcacagtacattacattgtagccaatcattttatatttgtcaatttaaatcttatgggtctttttttttttatctctcttgatgtcagattttatagtctttttaaataaatccatttaattaaaacgttaaacttacctttgtaag

SEQ ID NO: 367736 - DNA, 451 bp, Homo sapiens
ttagaaatgagttggcatattgcttataccattacataaaatagctaaagcattttgaatttcagagctgtacccacatcagcctcagtggtttcaaatttattttaaagacagatttagatttgggcaattctgtcagtcttttcaggtgatacaccactgtaaaatattctgcttatcactgggtgtggtggttcacgcctgtaatcccagcgctttgggaggccgaggcaggtggatcacttgaggtgaggagttcgagaccagcctggccaacatggcaaaaccctgtctctactaaaaaatacaaaaaattagctggatgtggtggtgcacccctgtactctcagctacttaggcaggagaggcaggagaattgcttgaacctgggaggtggagtgagtcagctcacttccctccagcctggattacagagcgagactccgtctca

SEQ ID NO: 367737 - DNA, 545 bp, Homo sapiens
ttgatcaaaattaagtcacagattgccagatacaaactgaccacaagcacgtacttcctataccatatgtacgtctaagtccctttctaagaatacattccaatttagtatgaatagaaattacatttatagtctttagaaatataatcagttaataacttgattatattttctgcatatattatatatatttgattatatattgatattgattatattttacacaataattattttactgtattctgtgtttattttggggaaaagcctttttttttcagttggaatcacttttaatatttaaatacaaaaaatgagcactggcttctctttttttaaacacacacacaaatctaacagccaaaatgtgcagaggaaatgagctcctgctctgtcttccccagtccccatcctgtggctgaagctgcagccagcctctttcctcttatacatagggattcatagtggccacattacaccacagttgtaatgcattttgtctgttttacattgtgtgcatgtccctccccaacagctccattctt

SEQ ID NO: 367738 - DNA, 328 bp, Homo sapiens
ctcacagttctagaggctggaaagtgcaagaccaaagtactaggagatttggtttctggtgagggctcacactctgattcatagagggccccttcttgctgcattctcacatggtagaagggacaaggcagctttataagggcatcatctcattcataagggttctaccttcatgacctaatcacctcctaaaggtcccacctcttacatcatcatcttggtggttaggattttaacatatgaactttgagaggacacaaatattcagaccatagcaattgttctaagacgtaaaggcaaaaaaattgacagactagataaaacaaaa

SEQ ID NO: 367739 - DNA, 414 bp, Homo sapiens
ttatgatacagtaaaattttaagtgagtttttatagggttagttcttaaacctataatgtttttaatcaacagagctgacctagatttcagtaggataatgttgctgaattcattacatttgctaatcctggctgtactaagcacacaggtgaagtaaagttcagcaagctttgtgttttcgctgttagtgaactgctcttagcacaaattaaatttaatattgacaaatgctatgccatctgcagaaaggcggaagaacagcttgggctctgacttctgtggttcaacgacaaaaggaaggctaaaatgagacaggttataacctgctttaaacttgacagctttctaaagctgctgggaatccaactggtggttattgaaggtctataaaaattaagtatacatttatcttg

SEQ ID NO: 367740 - DNA, 369 bp, Homo sapiens
ggtgaggggaacagggggcaggccttcagggcagctggtagggggtgggagcaggccagcacagagccgcttcaccaggcggcggttggagccagacagggctgaaaaggagaggttactgcagatcgcatccaaaaactcatcaggaaactggtcgtggcaggcctgtagccagccttgggcacctggtgcccaggacactgcataccacacagctgtctggcagatggcagtggtgctgggatggggctgtggagtggcaggcttggtgtgctggcagagcaagtggatggagaagttggaaatgctgtagggtggtgctgggcctaagtggttctcacagagggcctccacagtgatggctcgccg

SEQ ID NO: 367741 - DNA, 692 bp, Homo sapiens
cgccggctgtgacaagcgctgcggcatttgtccccgcgacagcaccgctgccgccgtctctaaggtcgcccgggtcccaccgccgccaccatgcctcggggaagccgcagcgcggcctcccggccagccagccgccccgccgcgccctctgcccacccgcccgcgcacccaccgccctcggcagccgccccagcccccgccccttcgggccagccggggctcatggctcagatggcgaccacggccgcaggggtagccgtgggctcggctgtgggacacgtcatgggcagcgccctgaccggagccttcagcggggggagctcggagccctcccagcctgctgtccagcaggcccccacccccgctgccccccagcccctgcagatggggccctgcgcctatgagatcaggcagttcctggactgttccaccactcagagtgacctgtccctgtgtgagggcttcagcgaggccctgaagcagtgcaagtactaccatggtctgagctccctgccctgaagaggtcggtgcagactcgggggccagtcctgcacccacctctacccctcgccgacagccagaccacaacaccagattgtacccagatagctgggattggaagtgaggaggtttctcaccccacagataacccaagacacaaatgtgcaattaaaagtttattttagaccaca

SEQ ID NO: 367742 - DNA, 502 bp, Homo sapiens
cgccggctgtgacaagcgctgcggcatttgtccccgcgacagcaccgctgccgccgtctctaaggtcgcccgggtcccaccgccgccaccatgcctcggggaagccgcagcgcggcctcccggccagccagccgccccgccgcgccctctgcccacccgcccgcgcacccaccgccctcggcagccgccccaggatggggccctgcgcctatgagatcaggcagttcctggactgttccaccactcagagtgacctgtccctgtgtgagggcttcagcgaggccctgaagcagtgcaagtactaccatggtctgagctccctgccctgaagaggtcggtgcagactcgggggccagtcctgcacccacctctacccctcgccgacagccagaccacaacaccagattgtacccagatagctgggattggaagtgaggaggtttctcaccccacagataacccaagacacaaatgtgcaattaaaagtttattttagaccaca

SEQ ID NO: 367743 - DNA, 1167 bp, Homo sapiens
cgccggctgtgacaagcgctgcggcatttgtccccgcgacagcaccgctgccgccgtctctaaggtcgcccgggtcccaccgccgccaccatgcctcggggaagccgcagcgcggcctcccggccagccagccgccccgccgcgccctctgcccacccgcccgcgcacccaccgccctcggcagccgccccagcccccgccccttcgggccagccggggctcatggctcagatggcgaccacggccgcaggggtagccgtgggctcggctgtgggacacgtcatgggcagcgccctgaccggagccttcagcggggggagctcggagccctcccagcctgctgtccagcaggcccccacccccgctgccccccagcccctgcagatggggccctgcgcctatgagatcaggcagttcctggactgttccaccactcagagtgacctgtccctgtgtgagggcttcagcgaggccctgaagcagtgcaagtactaccatggtctgagctccctgccctgaagaggtcggtgcagactcgggggccagtcctgcacccacctctacccctcgccgacagccagaccacaacaccagattgtacccagatagctgggattggaagtgaggaggtttctcaccccacagataacccaagacacaaatgtgcaattaaaagtttattttagaccacagcctgttgtgtgcctctctcgatggcctgtcttcagggagctccctggctgatgaggtggggtcaggatggatgtctcactacagtgtgcaatccatccccttaatcagggccctgggtggggaggaggagccctgttgcaatctgcactgtgggtagcacaggacagattccttgggcagtccagagtgaggtggagaggcattagtcggtgatcccaagggcatctgactctgagggtggaatcccaggatgaacccatggtctcccccttatcagggatacctgccacctctacccttcttgtctctacctctgcatcccattctctgcacccacagcttaggtgcccctggcggcctcaaatcctgtctgaccttgcccctcttgctgatgcaacttctcagcaattccagattctgcagaggagtcctgctgggttgttgtctgtttgcacctgatcacacaaggcagag

SEQ ID NO: 367744 - DNA, 637 bp, Homo sapiens
cgccggctgtgacaagcgctgcggcatttgtccccgcgacagcaccgctgccgccgtctctaaggtcgcccgggtcccaccgccgccaccatgcctcggggaagccgcagcgcggcctcccggccagccagccgccccgccgcgccctctgcccacccgcccgcgcacccaccgccctcggcagccgccccagcccccgccccttcgggccagccggggctcatggctcagatggcgaccacggccgcaggggtagccgtgggctcggctgtgggacacgtcatgggcagcgccctgaccggagccttcagcggggggagctcggagccctcccagcctgctgtccagcaggcccccacccccgctgccccccagcccctgcagatggggccctgcgcctatgagatcaggcagttcctggactgttccaccactcagagtgacctgtccctgtgtgagggcttcagcgaggccctgaagcagtgcaagtactaccatgccacctctacccctcgccgacagccagaccacaacaccagattgtacccagatagctgggattggaagtgaggaggtttctcaccccacagataacccaagacacaaatgtgcaattaaaagtttattttagaccaca

SEQ ID NO: 367745 - DNA, 400 bp, Homo sapiens
ccctgcgcctatgagatcaggcagttcctggactgttccaccactcagagtgacctgtccctgtgtgagggcttcagcgaggccctgaagcagtgcaagtactaccatgtgagtgagtggaccccgactcaggccgggagggggagaggccaaccctcctcttgcacctgcaggctgaccaccagcctgtgctgcccctcccttcccaggtctgagctccctgccctgaagaggtcggtgcagactcgggggccagtcctgcacccacctctacccctcgccgacagccagaccacaacaccagattgtacccagatagctgggattggaagtgaggaggtttctcaccccacagataacccaagacacaaatgtgcaattaaaagtttattttagacca

SEQ ID NO: 367746 - DNA, 472 bp, Homo sapiens
cgccggctgtgacaagcgctgcggcatttgtccccgcgacagcaccgctgccgccgtctctaaggtcgcccgggtcccaccgccgccaccatgcctcggggaagccgcagcgcggcctcccggccagccaggcccccacccccgctgccccccagcccctgcagatggggccctgcgcctatgagatcaggcagttcctggactgttccaccactcagagtgacctgtccctgtgtgagggcttcagcgaggccctgaagcagtgcaagtactaccatggtctgagctccctgccctgaagaggtcggtgcagactcgggggccagtcctgcacccacctctacccctcgccgacagccagaccacaacaccagattgtacccagatagctgggattggaagtgaggaggtttctcaccccacagataacccaagacacaaatgtgcaattaaaagtttattttagaccaca

SEQ ID NO: 367747 - DNA, 928 bp, Homo sapiens
agtagtttgctctcctgcgttttctattcttgtctgtgggtttttctcccttattgttgtcccccccctcccgctggtgggtgtgtcttcttcctccaacatgatccgcctcgtttcgctcgtggttcttcctccctcctcggcgtctggtttttcgaccctgccgccgcctcgtctcctgcttctttttattactcgtgcgctctcctcttccgggggcggcccctctctttgtctcacaaagtatgtggtgtggctgtcgcttttctgtggggccggctcccgcgcgggggatttttttgttggggcgcgccgcccgccctctcttctttttttttttgtttgtttctgtttgttgtttttttttgttttgtttttgtgtgtttttgtttgtttttttgttttttttttttgtttttttcttttgcaattaaaagtttattttagaccacagcctgttgtgtgcctctctcgatggcctgtcttcagggagctccctggctgatgaggtggggtcaggatggatgtctcactacagtgtgcaatccatccccttaatcagggccctgggtggggaggaggagccctgttgcaatctgcactgtgggtagcacaggacagattccttgggcagtccagagtgaggtggagaggcattagtcggtgatcccaagggcatctgactctgagggtggaatcccaggatgaacccatggtctcccccttatcagggatacctgccacctctacccttcttgtctctacctctgcatcccattctctgcacccacagcttaggtgcccctggcggcctcaaatcctgtctgaccttgcccctcttgctgatgcaacttctcagcaattccagattctgcagaggagtcctgctgggttgttgtctgtttgcacctgatcacacaaggcagag

SEQ ID NO: 367748 - DNA, 660 bp, Homo sapiens
cgccggctgtgacaagcgctgcggcatttgtccccgcgacagcaccgctgccgccgtctctaaggtcgcccgggtcccaccgccgccaccatgcctcggggaagccgcagcgcggcctcccggccagccagccgccccgccgcgccctctgcccacccgcccgcgcacccaccgccctcggcagccgccccagcccccgccccttcgggccagccggggctcatggctcagatggcgaccacggccgcaggggtagccgtgggctcggctgtgggacacgtcatgggcagcgccctgaccggagccttcagcggggggagctcggagccctcccagcctgctgtccagcaggatggggccctgcgcctatgagatcaggcagttcctggactgttccaccactcagagtgacctgtccctgtgtgagggcttcagcgaggccctgaagcagtgcaagtactaccatggtctgagctccctgccctgaagaggtcggtgcagactcgggggccagtcctgcacccacctctacccctcgccgacagccagaccacaacaccagattgtacccagatagctgggattggaagtgaggaggtttctcaccccacagataacccaagacacaaatgtgcaattaaaagtttattttagaccaca

SEQ ID NO: 367749 - DNA, 296 bp, Homo sapiens
tccctgtgaactgttttaagttcaaatgtatgtgtgggtgaaaattttcagcacacagatcaagaagctcaccattaatataaccttattcatcacactgaattttttggaaacaaaaaattgaaaatgtatgctcttaattagccaggtgtggtggcatgtgcctgtgcctatagtcccagctactcagaaggctgagatgggagggttgcttgtgccagggaggtgggggttgcagtgagccaagattacgccactgtactccagcctgggcgacagagcgagaccctatctca

SEQ ID NO: 367750 - DNA, 362 bp, Homo sapiens
gcggccgcgcggaggggcccctgtggatgccgcgtctcggccgccgggccccgcagtcctgcaagccgcgcgtcgcgagatccgcgctttaaaagccaaactccccgaaagggtcagccccgaaggaacatgatccagaaagacgcagcttcttaaaaattccttttgatgtagaaactcagagttgacaggaccttaaaagtcaccccacccagctgccactctcttgattgtcctctgcagcatcacttccaagtaatgacctgtctgctgtgtgagcacctctcatcacaggatactcactaccctgcacccaggcaggcaggatgtcctgtcactgcagatttcaactattaaaaagt

SEQ ID NO: 367751 - DNA, 681 bp, Homo sapiens
cgcctcgctcattaccagaaggaggttttacctgcctagtgacctggttggtctgggcatgaaccccgagaggtggaaactctcagactctcaggactgacagccgagtggctggggactataaatccgcgagaactgccctcgcgctgccatccagctgggtagccgggggagcgcgcgtgggggctccgcgagtcgctcgcccttggtttctggggaagcctgggggacgcggctgtggcggaggcgccctgggactcaggtcgcctggagcgtggcacgcagagccccaggcgcggagctgaggccgcgcggccgcgcttggccccagcgggcgtgggactgagcagtctgctgccccccgacatgtgacccagccccgccgcccatgcgggctcccggccgcccggccctgcggccgctgccgctgccgccgctgctgctgttgctcctggcggcgccttggggacgggcagaattccttttgatgtagaaactcagagttgacaggaccttaaaagtcaccccacccagctgccactctcttgattgtcctctgcagcatcacttccaagtaatgacctgtctgctgtgtgagcacctctcatcacaggatactcactaccctgcacccaggcaggcaggatgtcctgtcactgcagatttcaactattaaaaagt

SEQ ID NO: 367752 - DNA, 855 bp, Homo sapiens
cgcctcgctcattaccagaaggaggttttacctgcctagtgacctggttggtctgggcatgaaccccgagaggtggaaactctcagactctcaggactgacagccgagtggctggggactataaatccgcgagaactgccctcgcgctgccatccagctgggtagccgggggagcgcgcgtgggggctccgcgagtcgctcgcccttggtttctggggaagcctgggggacgcggctgtggcggaggcgccctgggactcaggtcgcctggagcgtggcacgcagagccccaggcgcggagctgaggccgcgcggccgcgcttggccccagcgggcgtgggactgagcagtctgctgccccccgacatgtgacccagccccgccgcccatgcgggctcccggccgcccggccctgcggccgctgccgctgccgccgctgctgctgttgctcctggcggcgccttggggacgggcagggtattcccgtcctctcctgggtctttgggctaaggtctaaggactgctgggaagaccaccttagaagatgtatgtagttacctggatactacctgctcgtaattgaaggattatctacaatgtcttctgtacaacgtgggcttactaaggttctatgactttgccactctcagaattccttttgatgtagaaactcagagttgacaggaccttaaaagtcaccccacccagctgccactctcttgattgtcctctgcagcatcacttccaagtaatgacctgtctgctgtgtgagcacctctcatcacaggatactcactaccctgcacccaggcaggcaggatgtcctgtcactgcagatttcaactattaaaaagt

SEQ ID NO: 367753 - DNA, 590 bp, Homo sapiens
gcggccgcgcggaggggcccctgtggatgccgcgtctcggccgccgggccccgcagtcctgcaagccgcgcgtcgcgagatccgcgctttaaaagccaaactccccgaaagggtcagccccgaaggaacatgatccagaaagacgcagcttcttaaagtaagctccccctgtcctgggtacgccgttgtttcctttgcagttatgaccatgtacagatagtgctctttgatttttcagaaataacaaaacttttaactcgtttacgacataaggtaactgaagagctctttcgttttgtttggtttttaagtttaaattctctaccaattggaatccagtaaaccagaatgattcattaacctgattgctttttttccctgtatttctcgtacatgagaaaaagattttttaaaaaaacaaaaaagatatccgggatccctttttaaaaaaattattttaaaaaacaacaacaaagcttctccaaatactgtgctttgtagacacttcgttcaggccccgctgtcttttaacccagaactgaacagtaagagtgaatgcaggaagaaagttgacggtgaatctggagtcc

SEQ ID NO: 367754 - DNA, 4310 bp, Homo sapiens
cgcctcgctcattaccagaaggaggttttacctgcctagtgacctggttggtctgggcatgaaccccgagaggtggaaactctcagactctcaggactgacagccgagtggctggggactataaatccgcgagaactgccctcgcgctgccatccagctgggtagccgggggagcgcgcgtgggggctccgcgagtcgctcgcccttggtttctggggaagcctgggggacgcggctgtggcggaggcgccctgggactcaggtcgcctggagcgtggcacgcagagccccaggcgcggagctgaggccgcgcggccgcgcttggccccagcgggcgtgggactgagcagtctgctgccccccgacatgtgacccagccccgccgcccatgcgggctcccggccgcccggccctgcggccgctgccgctgccgccgctgctgctgttgctcctggcggcgccttggggacgggcagttccctgtgtctctggtggtttgcctaaacctgcaaacatcaccttcttatccatcaacatgaagaatgtcctacaatggactccaccagagggtcttcaaggagttaaagttacttacactgtgcagtatttcatcacaaattggcccaccagaggtggcactgactacagatgagaagtccatttctgttgtcctgacagctccagagaagtggaagagaaatccagaagaccttcctgtttccatgcaacaaatatactccaatctgaagtataacgtgtctgtgttgaatactaaatcaaacagaacgtggtcccagtgtgtgaccaaccacacgctggtgctcacctggctggagccgaacactctttactgcgtacacgtggagtccttcgtcccagggccccctcgccgtgctcagccttctgagaagcagtgtgccaggactttgaaagatcaatcatcagagttcaaggctaaaatcatcttctggtatgttttgcccatatctattaccgtgtttcttttttctgtgatgggctattccatctaccgatatatccacgttggcaaagagaaacacccagcaaatttgattttgatttatggaaatgaatttgacaaaagattctttgtgcctgctgaaaaaatcgtgattaactttatcaccctcaatatctcggatgattctaaaatttctcatcaggatatgagtttactgggaaaaagcagtgatgtatccagccttaatgatcctcagcccagcgggaacctgaggccccctcaggaggaagaggaggtgaaacatttagggtatgcttcgcatttgatggaaattttttgtgactctgaagaaaacacggaaggtacttctttcacccagcaagagtccctcagcagaacaatacccccggataaaacagtcattgaatatgaatatgatgtcagaaccactgacatttgtgcggggcctgaagagcaggagctcagtttgcaggaggaggtgtccacacaaggaacattattggagtcgcaggcagcgttggcagtcttgggcccgcaaacgttacagtactcatacacccctcagctccaagacttagaccccctggcgcaggagcacacagactcggaggaggggccggaggaagagccatcgacgaccctggtcgactgggatccccaaactggcaggctgtgtattccttcgctgtccagcttcgaccaggattcagagggctgcgagccttctgagggggatgggctcggagaggagggtcttctatctagactctatgaggagccggctccagacaggccaccaggagaaaatgaaacctatctcatgcaattcatggaggaatgggggttatatgtgcagatggaaaactgatgccaacacttccttttgccttttgtttcctgtgcaaacaagtgagtcacccctttgatcccagccataaagtacctgggatgaaagaagttttttccagtttgtcagtgtctgtgagaattacttatttcttttctctattctcatagcacgtgtgtgattggttcatgcatgtaggtctcttaacaatgatggtgggcctctggagtccaggggctggccggttgttctatgcagagaaagcagtcaataaatgtttgccagactgggtgcagaatttattcaggtgggtgtactctggcctcttggttcattattttcaaacaagcacacttgtacaattattttctgggtacttcccatatgcacatagcactgtaaaaaatatttcccaaagatcactcattttataaataccactttttcagaattgggtttattgcgagcaggaggagatacttaaaacatgcacatataccaggttggtggtaagttggtcacatgtgaaaacctcaactatttaatcatcatgattcatattttgagtgaatacatcaggcacagaccttcatgatatcacacactcttggctactttaagaggccatctttaatactttatgagtagttctggagtgtaaacataaacgagtattcttttgtagtcagaaaagtgtcctctcaataatttagtaggggcttattgtctctcaaaactaacctaaaagaaaatgacacattttataatagaatattacatttatttctggaagtgtgttttcaaaaagatatttacatagtctgtaaactagaaagtgttaggtaaagctctaggttactgtgttactattataatattaaacattcgaataggcagtcgttcaaagactctttggaatatctatgaatgaatatcctctattcttataatattaaaacccataagtaaatataggacatacaagagaaatgagttaaatgactatgtaagggagagtttattaaaatttgatgaaatttactgtaggaactaaactatgccataaaacaatagctttctagttcatttccagtaactgttcccatctcctttaccacttgttaagaaaattaaattcttcagtcacgctgctttaaaatgggacaaaatctattaagttgaaccatatataattgtggatatttggctgtttttaatctgacaagcagtaacttcatatggtttgccttaatatatatttgttttagtcatgaactcataatccattgatgctctttcatgagaagagatatcacccatatttccttattgatattattggtacaggcagacaaccctggtaggagagatggattctggggtcatgacctttcgtgattatccgcaaatgcaaacagtttcagatctaatggtttaatttagggagtaattatattaatcagagtgttctgttattctcaatctttatagaaacgattctgctggttttgaagaacagatgtattacactaactgtaaaagtagttcaagagtgagaaagaataaattgttattaagagcaaaagaaaaataaagtgattgatgatagttctgcttattaattccattcacaaaatattctctaagtacctaatatgtccttcagtgtcctcatctgtgcaatagaaataagagctgccttagggctgttttgaggataaaaagagttggactatagaaggtacttagacctgtgctgggcacatagtgagtgctccctaagtgtttgtcatcatcatcattaactgccaggtcccattactaactgccagaaagaaacgccatttaaacatacaactattgtgattcaaaggcagaccttgtctaactctgtttttcttaccagagagtaaatagtaatttgcttcctactttgtgccctcagattgaaatccttcagtgattcagccacattatctggcttcgtaaaaggggaatctaattctgagttgcttttacatctcttgttattccaagcatgtcagaaatattgagcattctctaattttgctgcttcagttctttgcaacttatgtatatattgaacctatatatatacacacacattcaaacatgagcatacagtagatatttctcatgggggtggcgacatcttcttagatgcggtatatctgtgtgggaggcagctgtcatgcatcctgttcctcctgtggccacgcctcaccatctccaagaagccaccctttggtccgcttcagattccatctctgtgcctgaggttcaagtggagctgagaagttgaagtttcagagtccgacaagtatagttggtcctctgtatctgaactctggtaggaaatgaggaggacacgtgattcacacaaacttctgaaatgcaagcacctttttcttattcacaggtaatatgcattaataagta

SEQ ID NO: 367755 - DNA, 3925 bp, Homo sapiens
gcggccgcgcggaggggcccctgtggatgccgcgtctcggccgccgggccccgcagtcctgcaagccgcgcgtcgcgagatccgcgctttaaaagccaaactccccgaaagggtcagccccgaaggaacatgatccagaaagacgcagcttcttaaattccctgtgtctctggtggtttgcctaaacctgcaaacatcaccttcttatccatcaacatgaagaatgtcctacaatggactccaccagagggtcttcaaggagttaaagttacttacactgtgcagtatttcatctccagagaagtggaagagaaatccagaagaccttcctgtttccatgcaacaaatatactccaatctgaagtataacgtgtctgtgttgaatactaaatcaaacagaacgtggtcccagtgtgtgaccaaccacacgctggtgctcacctggctggagccgaacactctttactgcgtacacgtggagtccttcgtcccagggccccctcgccgtgctcagccttctgagaagcagtgtgccaggactttgaaagatcaatcatcagagttcaaggctaaaatcatcttctggtatgttttgcccatatctattaccgtgtttcttttttctgtgatgggctattccatctaccgatatatccacgttggcaaagagaaacacccagcaaatttgattttgatttatggaaatgaatttgacaaaagattctttgtgcctgctgaaaaaatcgtgattaactttatcaccctcaatatctcggatgattctaaaatttctcatcaggatatgagtttactgggaaaaagcagtgatgtatccagccttaatgatcctcagcccagcgggaacctgaggccccctcaggaggaagaggaggtgaaacatttagggtatgcttcgcatttgatggaaattttttgtgactctgaagaaaacacggaaggtacttctttcacccagcaagagtccctcagcagaacaatacccccggataaaacagtcattgaatatgaatatgatgtcagaaccactgacatttgtgcggggcctgaagagcaggagctcagtttgcaggaggaggtgtccacacaaggaacattattggagtcgcaggcagcgttggcagtcttgggcccgcaaacgttacagtactcatacacccctcagctccaagacttagaccccctggcgcaggagcacacagactcggaggaggggccggaggaagagccatcgacgaccctggtcgactgggatccccaaactggcaggctgtgtattccttcgctgtccagcttcgaccaggattcagagggctgcgagccttctgagggggatgggctcggagaggagggtcttctatctagactctatgaggagccggctccagacaggccaccaggagaaaatgaaacctatctcatgcaattcatggaggaatgggggttatatgtgcagatggaaaactgatgccaacacttccttttgccttttgtttcctgtgcaaacaagtgagtcacccctttgatcccagccataaagtacctgggatgaaagaagttttttccagtttgtcagtgtctgtgagaattacttatttcttttctctattctcatagcacgtgtgtgattggttcatgcatgtaggtctcttaacaatgatggtgggcctctggagtccaggggctggccggttgttctatgcagagaaagcagtcaataaatgtttgccagactgggtgcagaatttattcaggtgggtgtactctggcctcttggttcattattttcaaacaagcacacttgtacaattattttctgggtacttcccatatgcacatagcactgtaaaaaatatttcccaaagatcactcattttataaataccactttttcagaattgggtttattgcgagcaggaggagatacttaaaacatgcacatataccaggttggtggtaagttggtcacatgtgaaaacctcaactatttaatcatcatgattcatattttgagtgaatacatcaggcacagaccttcatgatatcacacactcttggctactttaagaggccatctttaatactttatgagtagttctggagtgtaaacataaacgagtattcttttgtagtcagaaaagtgtcctctcaataatttagtaggggcttattgtctctcaaaactaacctaaaagaaaatgacacattttataatagaatattacatttatttctggaagtgtgttttcaaaaagatatttacatagtctgtaaactagaaagtgttaggtaaagctctaggttactgtgttactattataatattaaacattcgaataggcagtcgttcaaagactctttggaatatctatgaatgaatatcctctattcttataatattaaaacccataagtaaatataggacatacaagagaaatgagttaaatgactatgtaagggagagtttattaaaatttgatgaaatttactgtaggaactaaactatgccataaaacaatagctttctagttcatttccagtaactgttcccatctcctttaccacttgttaagaaaattaaattcttcagtcacgctgctttaaaatgggacaaaatctattaagttgaaccatatataattgtggatatttggctgtttttaatctgacaagcagtaacttcatatggtttgccttaatatatatttgttttagtcatgaactcataatccattgatgctctttcatgagaagagatatcacccatatttccttattgatattattggtacaggcagacaaccctggtaggagagatggattctggggtcatgacctttcgtgattatccgcaaatgcaaacagtttcagatctaatggtttaatttagggagtaattatattaatcagagtgttctgttattctcaatctttatagaaacgattctgctggttttgaagaacagatgtattacactaactgtaaaagtagttcaagagtgagaaagaataaattgttattaagagcaaaagaaaaataaagtgattgatgatagttctgcttattaattccattcacaaaatattctctaagtacctaatatgtccttcagtgtcctcatctgtgcaatagaaataagagctgccttagggctgttttgaggataaaaagagttggactatagaaggtacttagacctgtgctgggcacatagtgagtgctccctaagtgtttgtcatcatcatcattaactgccaggtcccattactaactgccagaaagaaacgccatttaaacatacaactattgtgattcaaaggcagaccttgtctaactctgtttttcttaccagagagtaaatagtaatttgcttcctactttgtgccctcagattgaaatccttcagtgattcagccacattatctggcttcgtaaaaggggaatctaattctgagttgcttttacatctcttgttattccaagcatgtcagaaatattgagcattctctaattttgctgcttcagttctttgcaacttatgtatatattgaacctatatatatacacacacattcaaacatgagcatacagtagatatttctcatgggggtggcgacatcttcttagatgcggtatatctgtgtgggaggcagctgtcatgcatcctgttcctcctgtggccacgcctcaccatctccaagaagccaccctttggtccgcttcagattccatctctgtgcctgaggttcaagtggagctgagaagttgaagtttcagagtccgacaagtatagttggtcctctgtatctgaactctggtaggaaatgaggaggacacgtgattcacacaaacttctgaaatgcaagcacctttttcttattcacaggtaatatgcattaataagta

SEQ ID NO: 367756 - DNA, 2647 bp, Homo sapiens
acgaggcagggcctgcctggttcctggaagtcttcccagtcttcccagccagcccgggccctggggagccctgggcacagcagcggccgagggtcttctatctagactctatgaggagccggctccagacaggccaccaggagaaaatgaaacctatctcatgcaattcatggaggaatgggggttatatgtgcagatggaaaactgatgccaacacttccttttgccttttgtttcctgtgcaaacaagtgagtcacccctttgatcccagccataaagtacctgggatgaaagaagttttttccagtttgtcagtgtctgtgagaattacttatttcttttctctattctcatagcacgtgtgtgattggttcatgcatgtaggtctcttaacaatgatggtgggcctctggagtccaggggctggccggttgttctatgcagagaaagcagtcaataaatgtttgccagactgggtgcagaatttattcaggtgggtgtactctggcctcttggttcattattttcaaacaagcacacttgtacaattattttctgggtacttcccatatgcacatagcactgtaaaaaatatttcccaaagatcactcattttataaataccactttttcagaattgggtttattgcgagcaggaggagatacttaaaacatgcacatataccaggttggtggtaagttggtcacatgtgaaaacctcaactatttaatcatcatgattcatattttgagtgaatacatcaggcacagaccttcatgatatcacacactcttggctactttaagaggccatctttaatactttatgagtagttctggagtgtaaacataaacgagtattcttttgtagtcagaaaagtgtcctctcaataatttagtaggggcttattgtctctcaaaactaacctaaaagaaaatgacacattttataatagaatattacatttatttctggaagtgtgttttcaaaaagatatttacatagtctgtaaactagaaagtgttaggtaaagctctaggttactgtgttactattataatattaaacattcgaataggcagtcgttcaaagactctttggaatatctatgaatgaatatcctctattcttataatattaaaacccataagtaaatataggacatacaagagaaatgagttaaatgactatgtaagggagagtttattaaaatttgatgaaatttactgtaggaactaaactatgccataaaacaatagctttctagttcatttccagtaactgttcccatctcctttaccacttgttaagaaaattaaattcttcagtcacgctgctttaaaatgggacaaaatctattaagttgaaccatatataattgtggatatttggctgtttttaatctgacaagcagtaacttcatatggtttgccttaatatatatttgttttagtcatgaactcataatccattgatgctctttcatgagaagagatatcacccatatttccttattgatattattggtacaggcagacaaccctggtaggagagatggattctggggtcatgacctttcgtgattatccgcaaatgcaaacagtttcagatctaatggtttaatttagggagtaattatattaatcagagtgttctgttattctcaatctttatagaaacgattctgctggttttgaagaacagatgtattacactaactgtaaaagtagttcaagagtgagaaagaataaattgttattaagagcaaaagaaaaataaagtgattgatgatagttctgcttattaattccattcacaaaatattctctaagtacctaatatgtccttcagtgtcctcatctgtgcaatagaaataagagctgccttagggctgttttgaggataaaaagagttggactatagaaggtacttagacctgtgctgggcacatagtgagtgctccctaagtgtttgtcatcatcatcattaactgccaggtcccattactaactgccagaaagaaacgccatttaaacatacaactattgtgattcaaaggcagaccttgtctaactctgtttttcttaccagagagtaaatagtaatttgcttcctactttgtgccctcagattgaaatccttcagtgattcagccacattatctggcttcgtaaaaggggaatctaattctgagttgcttttacatctcttgttattccaagcatgtcagaaatattgagcattctctaattttgctgcttcagttctttgcaacttatgtatatattgaacctatatatatacacacacattcaaacatgagcatacagtagatatttctcatgggggtggcgacatcttcttagatgcggtatatctgtgtgggaggcagctgtcatgcatcctgttcctcctgtggccacgcctcaccatctccaagaagccaccctttggtccgcttcagattccatctctgtgcctgaggttcaagtggagctgagaagttgaagtttcagagtccgacaagtatagttggtcctctgtatctgaactctggtaggaaatgaggaggacacgtgattcacacaaacttctgaaatgcaagcacctttttcttattcacaggtaatatgcattaataagta

SEQ ID NO: 367757 - DNA, 1406 bp, Homo sapiens
cgcctcgctcattaccagaaggaggttttacctgcctagtgacctggttggtctgggcatgaaccccgagaggtggaaactctcagactctcaggactgacagccgagtggctggggactataaatccgcgagaactgccctcgcgctgccatccagctgggtagccgggggagcgcgcgtgggggctccgcgagtcgctcgcccttggtttctggggaagcctgggggacgcggctgtggcggaggcgccctgggactcaggtcgcctggagcgtggcacgcagagccccaggcgcggagctgaggccgcgcggccgcgcttggccccagcgggcgtgggactgagcagtctgctgccccccgacatgtgacccagccccgccgcccatgcgggctcccggccgcccggccctgcggccgctgccgctgccgccgctgctgctgttgctcctggcggcgccttggggacgggcagttccctgtgtctctggtggtttgcctaaacctgcaaacatcaccttcttatccatcaacatgaagaatgtcctacaatggactccaccagagggtcttcaaggagttaaagttacttacactgtgcagtatttcatatatgggcaaaagaaatggctgaataaatcagaatgcagaaatatcaatagaacctactgtgatctttctgctgaaacttctgactacgaacaccagtattatgccaaagttaaggccatttggggaacaaagtgttccaaatgggctgaaagtggacggttctatccttttttagaaacacaaattggcccaccagaggtggcactgactacagatgagaagtccatttctgttgtcctgacagctccagagaagtggaagagaaatccagaagaccttcctgtttccatgcaacaaatatactccaatctgaagtataacgtgtctgtgttgaatactaaatcaaacagaacggtaagcctgaaatggaatggggcatacattcatgtaccactctgtagctaatgtgggaacaaacaaccctgatgcattgattctctgcatgtgaatctgggaagtcatgatgttcaaaagatacgccgcacaaaataaagttctatatacagaaattttacagaactaacttcagatcttctttacagaaactctgttgacaggatatggtgttgttattggagtgtagagagattgtacacttcactttgatgaagagctttcacttgcacagtctttctctgagaagaagaaaaaaatgtgagcaaggacccaggacaatgaataagaactctatccatgtgttgtttagaattgttctcagcattggtccagttcctgaccatgctctgctgagctaaaggaaaagagtatattgaaactgtgctgaaaaaaaaaa

SEQ ID NO: 367758 - DNA, 529 bp, Homo sapiens
ctctgccacacccagtctttgctactcttcatgtggctgagattctgactttacagaatgtaaaaaaggtcaagaaatgaagcaactcctctgccagttagaagagggggcaccaacgccccagccccagccctggactggagaaatacccacccagcgaatcacttctcgcttccaactatcttttgtgtgtcttgggtctcttgcctcccagtgagtgaggttttctgtatattgcaagcataactttcatttacatgagttggtaagagtaggtctttaaaactgtctggtgacaagatattctacctaacagctgtttttaatgtctctctaaagtgaaaaggtgaaaatcattctcttttctctttatagattttgatttatggaaatgaatttgacaaaagattctttgtgcctgctgaaaaaatcgtgattaactttatcaccctcaatatctcggatgattctaaaatttctcatcaggatatgagtttactgggaaaaagcagtgatgtatccagcctta

SEQ ID NO: 367759 - DNA, 4489 bp, Homo sapiens
cgcctcgctcattaccagaaggaggttttacctgcctagtgacctggttggtctgggcatgaaccccgagaggtggaaactctcagactctcaggactgacagccgagtggctggggactataaatccgcgagaactgccctcgcgctgccatccagctgggtagccgggggagcgcgcgtgggggctccgcgagtcgctcgcccttggtttctggggaagcctgggggacgcggctgtggcggaggcgccctgggactcaggtcgcctggagcgtggcacgcagagccccaggcgcggagctgaggccgcgcggccgcgcttggccccagcgggcgtgggactgagcagtctgctgccccccgacatgtgacccagccccgccgcccatgcgggctcccggccgcccggccctgcggccgctgccgctgccgccgctgctgctgttgctcctggcggcgccttggggacgggcagttccctgtgtctctggtggtttgcctaaacctgcaaacatcaccttcttatccatcaacatgaagaatgtcctacaatggactccaccagagggtcttcaaggagttaaagttacttacactgtgcagtatttcatatatgggcaaaagaaatggctgaataaatcagaatgcagaaatatcaatagaacctactgtgatctttctgctgaaacttctgactacgaacaccagtattatgccaaagttaaggccatttggggaacaaagtgttccaaatgggctgaaagtggacggttctatccttttttagaaacacaaattggcccaccagaggtggcactgactacagatgagaagtccatttctgttgtcctgacagctccagagaagtggaagagaaatccagaagaccttcctgtttccatgcaacaaatatactccaatctgaagtataacgtgtctgtgttgaatactaaatcaaacagaacgtggtcccagtgtgtgaccaaccacacgctggtgctcacctggctggagccgaacactctttactgcgtacacgtggagtccttcgtcccagggccccctcgccgtgctcagccttctgagaagcagtgtgccaggactttgaaagatcaatcatcagagttcaaggctaaaatcatcttctggtatgttttgcccatatctattaccgtgtttcttttttctgtgatgggctattccatctaccgatatatccacgttggcaaagagaaacacccagcaaatttgattttgatttatggaaatgaatttgacaaaagattctttgtgcctgctgaaaaaatcgtgattaactttatcaccctcaatatctcggatgattctaaaatttctcatcaggatatgagtttactgggaaaaagcagtgatgtatccagccttaatgatcctcagcccagcgggaacctgaggccccctcaggaggaagaggaggtgaaacatttagggtatgcttcgcatttgatggaaattttttgtgactctgaagaaaacacggaaggtacttctttcacccagcaagagtccctcagcagaacaatacccccggataaaacagtcattgaatatgaatatgatgtcagaaccactgacatttgtgcggggcctgaagagcaggagctcagtttgcaggaggaggtgtccacacaaggaacattattggagtcgcaggcagcgttggcagtcttgggcccgcaaacgttacagtactcatacacccctcagctccaagacttagaccccctggcgcaggagcacacagactcggaggaggggccggaggaagagccatcgacgaccctggtcgactgggatccccaaactggcaggctgtgtattccttcgctgtccagcttcgaccaggattcagagggctgcgagccttctgagggggatgggctcggagaggagggtcttctatctagactctatgaggagccggctccagacaggccaccaggagaaaatgaaacctatctcatgcaattcatggaggaatgggggttatatgtgcagatggaaaactgatgccaacacttccttttgccttttgtttcctgtgcaaacaagtgagtcacccctttgatcccagccataaagtacctgggatgaaagaagttttttccagtttgtcagtgtctgtgagaattacttatttcttttctctattctcatagcacgtgtgtgattggttcatgcatgtaggtctcttaacaatgatggtgggcctctggagtccaggggctggccggttgttctatgcagagaaagcagtcaataaatgtttgccagactgggtgcagaatttattcaggtgggtgtactctggcctcttggttcattattttcaaacaagcacacttgtacaattattttctgggtacttcccatatgcacatagcactgtaaaaaatatttcccaaagatcactcattttataaataccactttttcagaattgggtttattgcgagcaggaggagatacttaaaacatgcacatataccaggttggtggtaagttggtcacatgtgaaaacctcaactatttaatcatcatgattcatattttgagtgaatacatcaggcacagaccttcatgatatcacacactcttggctactttaagaggccatctttaatactttatgagtagttctggagtgtaaacataaacgagtattcttttgtagtcagaaaagtgtcctctcaataatttagtaggggcttattgtctctcaaaactaacctaaaagaaaatgacacattttataatagaatattacatttatttctggaagtgtgttttcaaaaagatatttacatagtctgtaaactagaaagtgttaggtaaagctctaggttactgtgttactattataatattaaacattcgaataggcagtcgttcaaagactctttggaatatctatgaatgaatatcctctattcttataatattaaaacccataagtaaatataggacatacaagagaaatgagttaaatgactatgtaagggagagtttattaaaatttgatgaaatttactgtaggaactaaactatgccataaaacaatagctttctagttcatttccagtaactgttcccatctcctttaccacttgttaagaaaattaaattcttcagtcacgctgctttaaaatgggacaaaatctattaagttgaaccatatataattgtggatatttggctgtttttaatctgacaagcagtaacttcatatggtttgccttaatatatatttgttttagtcatgaactcataatccattgatgctctttcatgagaagagatatcacccatatttccttattgatattattggtacaggcagacaaccctggtaggagagatggattctggggtcatgacctttcgtgattatccgcaaatgcaaacagtttcagatctaatggtttaatttagggagtaattatattaatcagagtgttctgttattctcaatctttatagaaacgattctgctggttttgaagaacagatgtattacactaactgtaaaagtagttcaagagtgagaaagaataaattgttattaagagcaaaagaaaaataaagtgattgatgatagttctgcttattaattccattcacaaaatattctctaagtacctaatatgtccttcagtgtcctcatctgtgcaatagaaataagagctgccttagggctgttttgaggataaaaagagttggactatagaaggtacttagacctgtgctgggcacatagtgagtgctccctaagtgtttgtcatcatcatcattaactgccaggtcccattactaactgccagaaagaaacgccatttaaacatacaactattgtgattcaaaggcagaccttgtctaactctgtttttcttaccagagagtaaatagtaatttgcttcctactttgtgccctcagattgaaatccttcagtgattcagccacattatctggcttcgtaaaaggggaatctaattctgagttgcttttacatctcttgttattccaagcatgtcagaaatattgagcattctctaattttgctgcttcagttctttgcaacttatgtatatattgaacctatatatatacacacacattcaaacatgagcatacagtagatatttctcatgggggtggcgacatcttcttagatgcggtatatctgtgtgggaggcagctgtcatgcatcctgttcctcctgtggccacgcctcaccatctccaagaagccaccctttggtccgcttcagattccatctctgtgcctgaggttcaagtggagctgagaagttgaagtttcagagtccgacaagtatagttggtcctctgtatctgaactctggtaggaaatgaggaggacacgtgattcacacaaacttctgaaatgcaagcacctttttcttattcacaggtaatatgcattaataagta

SEQ ID NO: 367760 - DNA, 4244 bp, Homo sapiens
cgcctcgctcattaccagaaggaggttttacctgcctagtgacctggttggtctgggcatgaaccccgagaggtggaaactctcagactctcaggactgacagccgagtggctggggactataaatccgcgagaactgccctcgcgctgccatccagctgggtagccgggggagcgcgcgtgggggctccgcgagtcgctcgcccttggtttctggggaagcctgggggacgcggctgtggcggaggcgccctgggactcaggtcgcctggagcgtggcacgcagagccccaggcgcggagctgaggccgcgcggccgcgcttggccccagcgggcgtgggactgagcagtctgctgccccccgacatgtgacccagccccgccgcccatgcgggctcccggccgcccggccctgcggccgctgccgctgccgccgctgctgctgttgctcctggcggcgccttggggacgggcagttccctgtgtctctggtggtttgcctaaacctgcaaacatcaccttcttatccatcaacatgaagaatgtcctacaatggactccaccagagggtcttcaaggagttaaagttacttacactgtgcagtatttcatctccagagaagtggaagagaaatccagaagaccttcctgtttccatgcaacaaatatactccaatctgaagtataacgtgtctgtgttgaatactaaatcaaacagaacgtggtcccagtgtgtgaccaaccacacgctggtgctcacctggctggagccgaacactctttactgcgtacacgtggagtccttcgtcccagggccccctcgccgtgctcagccttctgagaagcagtgtgccaggactttgaaagatcaatcatcagagttcaaggctaaaatcatcttctggtatgttttgcccatatctattaccgtgtttcttttttctgtgatgggctattccatctaccgatatatccacgttggcaaagagaaacacccagcaaatttgattttgatttatggaaatgaatttgacaaaagattctttgtgcctgctgaaaaaatcgtgattaactttatcaccctcaatatctcggatgattctaaaatttctcatcaggatatgagtttactgggaaaaagcagtgatgtatccagccttaatgatcctcagcccagcgggaacctgaggccccctcaggaggaagaggaggtgaaacatttagggtatgcttcgcatttgatggaaattttttgtgactctgaagaaaacacggaaggtacttctttcacccagcaagagtccctcagcagaacaatacccccggataaaacagtcattgaatatgaatatgatgtcagaaccactgacatttgtgcggggcctgaagagcaggagctcagtttgcaggaggaggtgtccacacaaggaacattattggagtcgcaggcagcgttggcagtcttgggcccgcaaacgttacagtactcatacacccctcagctccaagacttagaccccctggcgcaggagcacacagactcggaggaggggccggaggaagagccatcgacgaccctggtcgactgggatccccaaactggcaggctgtgtattccttcgctgtccagcttcgaccaggattcagagggctgcgagccttctgagggggatgggctcggagaggagggtcttctatctagactctatgaggagccggctccagacaggccaccaggagaaaatgaaacctatctcatgcaattcatggaggaatgggggttatatgtgcagatggaaaactgatgccaacacttccttttgccttttgtttcctgtgcaaacaagtgagtcacccctttgatcccagccataaagtacctgggatgaaagaagttttttccagtttgtcagtgtctgtgagaattacttatttcttttctctattctcatagcacgtgtgtgattggttcatgcatgtaggtctcttaacaatgatggtgggcctctggagtccaggggctggccggttgttctatgcagagaaagcagtcaataaatgtttgccagactgggtgcagaatttattcaggtgggtgtactctggcctcttggttcattattttcaaacaagcacacttgtacaattattttctgggtacttcccatatgcacatagcactgtaaaaaatatttcccaaagatcactcattttataaataccactttttcagaattgggtttattgcgagcaggaggagatacttaaaacatgcacatataccaggttggtggtaagttggtcacatgtgaaaacctcaactatttaatcatcatgattcatattttgagtgaatacatcaggcacagaccttcatgatatcacacactcttggctactttaagaggccatctttaatactttatgagtagttctggagtgtaaacataaacgagtattcttttgtagtcagaaaagtgtcctctcaataatttagtaggggcttattgtctctcaaaactaacctaaaagaaaatgacacattttataatagaatattacatttatttctggaagtgtgttttcaaaaagatatttacatagtctgtaaactagaaagtgttaggtaaagctctaggttactgtgttactattataatattaaacattcgaataggcagtcgttcaaagactctttggaatatctatgaatgaatatcctctattcttataatattaaaacccataagtaaatataggacatacaagagaaatgagttaaatgactatgtaagggagagtttattaaaatttgatgaaatttactgtaggaactaaactatgccataaaacaatagctttctagttcatttccagtaactgttcccatctcctttaccacttgttaagaaaattaaattcttcagtcacgctgctttaaaatgggacaaaatctattaagttgaaccatatataattgtggatatttggctgtttttaatctgacaagcagtaacttcatatggtttgccttaatatatatttgttttagtcatgaactcataatccattgatgctctttcatgagaagagatatcacccatatttccttattgatattattggtacaggcagacaaccctggtaggagagatggattctggggtcatgacctttcgtgattatccgcaaatgcaaacagtttcagatctaatggtttaatttagggagtaattatattaatcagagtgttctgttattctcaatctttatagaaacgattctgctggttttgaagaacagatgtattacactaactgtaaaagtagttcaagagtgagaaagaataaattgttattaagagcaaaagaaaaataaagtgattgatgatagttctgcttattaattccattcacaaaatattctctaagtacctaatatgtccttcagtgtcctcatctgtgcaatagaaataagagctgccttagggctgttttgaggataaaaagagttggactatagaaggtacttagacctgtgctgggcacatagtgagtgctccctaagtgtttgtcatcatcatcattaactgccaggtcccattactaactgccagaaagaaacgccatttaaacatacaactattgtgattcaaaggcagaccttgtctaactctgtttttcttaccagagagtaaatagtaatttgcttcctactttgtgccctcagattgaaatccttcagtgattcagccacattatctggcttcgtaaaaggggaatctaattctgagttgcttttacatctcttgttattccaagcatgtcagaaatattgagcattctctaattttgctgcttcagttctttgcaacttatgtatatattgaacctatatatatacacacacattcaaacatgagcatacagtagatatttctcatgggggtggcgacatcttcttagatgcggtatatctgtgtgggaggcagctgtcatgcatcctgttcctcctgtggccacgcctcaccatctccaagaagccaccctttggtccgcttcagattccatctctgtgcctgaggttcaagtggagctgagaagttgaagtttcagagtccgacaagtatagttggtcctctgtatctgaactctggtaggaaatgaggaggacacgtgattcacacaaacttctgaaatgcaagcacctttttcttattcacaggtaatatgcattaataagta

SEQ ID NO: 367761 - DNA, 2301 bp, Homo sapiens
cgcctcgctcattaccagaaggaggttttacctgcctagtgacctggttggtctgggcatgaaccccgagaggtggaaactctcagactctcaggactgacagccgagtggctggggactataaatccgcgagaactgccctcgcgctgccatccagctgggtagccgggggagcgcgcgtgggggctccgcgagtcgctcgcccttggtttctggggaagcctgggggacgcggctgtggcggaggcgccctgggactcaggtcgcctggagcgtggcacgcagagccccaggcgcggagctgaggccgcgcggccgcgcttggccccagcgggcgtgggactgagcagtctgctgccccccgacatgtgacccagccccgccgcccatgcgggctcccggccgcccggccctgcggccgctgccgctgccgccgctgctgctgttgctcctggcggcgccttggggacgggcagttccctgtgtctctggtggtttgcctaaacctgcaaacatcaccttcttatccatcaacatgaagaatgtcctacaatggactccaccagagggtcttcaaggagttaaagttacttacactgtgcagtatttcatatatgggcaaaagaaatggctgaataaatcagaatgcagaaatatcaatagaacctactgtgatctttctgctgaaacttctgactacgaacaccagtattatgccaaagttaaggccatttggggaacaaagtgttccaaatgggctgaaagtggacggttctatccttttttagaaacacaaattggcccaccagaggtggcactgactacagatgagaagtccatttctgttgtcctgacagctccagagaagtggaagagaaatccagaagaccttcctgtttccatgcaacaaatatactccaatctgaagtataacgtgtctgtgttgaatactaaatcaaacagaacgtggtcccagtgtgtgaccaaccacacgctggtgctcacctggctggagccgaacactctttactgcgtacacgtggagtccttcgtcccagggccccctcgccgtgctcagccttctgagaagcagtgtgccaggactttgaaagatcaatcatcagagttcaaggctaaaatcatcttctggtatgttttgcccatatctattaccgtgtttcttttttctgtgatgggctattccatctaccgatatatccacgttggcaaagagaaacacccagcaaatttgattttgatttatggaaatgaatttgacaaaagattctttgtgcctgctgaaaaaatcgtgattaactttatcaccctcaatatctcggatgattctaaaatttctcatcaggatatgagtttactgggaaaaagcagtgatgtatccagccttaatgatcctcagcccagcgggaacctgaggccccctcaggaggaagaggaggtgaaacatttagggtatgcttcgcatttgatggaaattttttgtgactctgaagaaaacacggaaggtacttctttcacccagcaagagtccctcagcagaacaatacccccggataaaacagtcattgaatatgaatatgatgtcagaaccactgacatttgtgcggggcctgaagagcaggagctcagtttgcaggaggaggtgtccacacaaggaacattattggagtcgcaggcagcgttggcagtcttgggcccgcaaacgttacagtactcatacacccctcagctccaagacttagaccccctggcgcaggagcacacagactcggaggaggggccggaggaagagccatcgacgaccctggtcgactgggatccccaaactggcaggctgtgtattccttcgctgtccagcttcgaccaggattcagagggctgcgagccttctgagggggatgggctcggagaggagggtcttctatctagactctatgaggagccggctccagacaggccaccaggagaaaatgaaacctatctcatgcaattcatggaggaatgggggttatatgtgcagatggaaaactgatgccaacacttccttttgccttttgtttcctgtgcaaacaagtgagtcacccctttgatcccagccataaagtacctgggatgaaagataaatccatactactgcctacaggcaaaactagaccgaagccattccaaggaactgacagctcagaactataggaaaaaacttgaggggggccccggagccaagtcagccccataatagtcgctttacagtgcatgaccccaattcaaacaacgtcgacactg

SEQ ID NO: 367762 - DNA, 1886 bp, Homo sapiens
cgcctcgctcattaccagaaggaggttttacctgcctagtgacctggttggtctgggcatgaaccccgagaggtggaaactctcagactctcaggactgacagccgagtggctggggactataaatccgcgagaactgccctcgcgctgccatccagctgggtagccgggggagcgcgcgtgggggctccgcgagtcgctcgcccttggtttctggggaagcctgggggacgcggctgtggcggaggcgccctgggactcaggtcgcctggagcgtggcacgcagagccccaggcgcggagctgaggccgcgcggccgcgcttggccccagcgggcgtgggactgagcagtctgctgccccccgacatgtgacccagccccgccgcccatgcgggctcccggccgcccggccctgcggccgctgccgctgccgccgctgctgctgttgctcctggcggcgccttggggacgggcagttccctgtgtctctggtggtttgcctaaacctgcaaacatcaccttcttatccatcaacatgaagaatgtcctacaatggactccaccagagggtcttcaaggagttaaagttacttacactgtgcagtatttcatatatgggcaaaagaaatggctgaataaatcagaatgcagaaatatcaatagaacctactgtgatctttctgctgaaacttctgactacgaacaccagtattatgccaaagttaaggccatttggggaacaaagtgttccaaatgggctgaaagtggacggttctatccttttttagaaacacaaattggcccaccagaggtggcactgactacagatgagaagtccatttctgttgtcctgacagctccagagaagtggaagagaaatccagaagaccttcctgtttccatgcaacaaatatactccaatctgaagtataacgtgtctgtgttgaatactaaatcaaacagaacgtggtcccagtgtgtgaccaaccacacgctggtgctcacctggctggagccgaacactctttactgcgtacacgtggagtccttcgtcccagggccccctcgccgtgctcagccttctgagaagcagtgtgccaggactttgaaagatcaatcatcagagttcaaggctaaaatcatcttctggtatgttttgcccatatctattaccgtgtttcttttttctgtgatgggctattccatctaccgatatatccacgttggcaaagagaaacacccagcaaatttgattttgatttatggaaatgaatttgacaaaagattctttgtgcctgctgaaaaaatcgtgattaactttatcaccctcaatatctcggatgattctaaaatttctcatcaggatatgagtttactgggaaaaagcagtgatgtatccagccttaatgatcctcagcccagcggggaaacccttgaaggcccccttcaagggaaggaaggaaggagggttggaaacaatttaaggggtaattggctttcggcaatttggaattggcgcaaatttttttggtgacttcttgaaagaaaaaacaccgggaaatggttcacttctcttttctaacccaaggcaaaggaagttcccttcaaagcaagaaacaaaattaacccccgggattaaaacagttcctttgaacttattgcattacttgatgggttcaggaaaccaactttgaaccatttctggttggcgggggccctttgaagaaaggcagggaagtctccaacttcggcacgggaaggacggttgttccacacacaaaggggaactcatttctattgtgcacgtttcgcaagggcaagaggtgggcgcaggtcctgtggggcccccgcgcaaagcgtttaccagtactccaataaacccctta

SEQ ID NO: 367763 - DNA, 2632 bp, Homo sapiens
tcctttaatgacaactcccaaggaaactgggtgttgagagggaggagctctagcaataggcacattttggaggggaggggccggaggaaaggccagcactcgctagcagtggcaggcagaggcccaggctgccgtcccctagagtcccaggttggctctgccagtcctgtcctttaccaaagatgaatgaagcaaatgtcatgctgccttattcagggaaggaggagcctgtcctgcctgtggccatgaccctgcctctcccaggcaggggcccgcgatgtggaactgctgccactgaggggggatccagttttgtcaatgcagttgtctctgttttacaagttggagtcactcttatgctgtacccagtttctaaactggagactgtgtgtgccctctgggctctgagtacccctgctttgggcttgggcctaggctgcattgaaaagagctgaaggttgtggcctttgcgctcctggcccagcctttgttccccactggagcagaaggggagatggacgacacggtcggggcatctggcctggccagtgccctgatcccagagagcccgaggaggtgtctcaggctgcctgagtcgtgacctgctaggccagagcccactccatctggtagaagggaaagcccatatgctaccaccagctgtgtccaaaaccgccagctctgttcttcctcagccagcctcgcccatccccttgaggtctcagcccctttcccttgtagctcctcccctggagggggaatggcagcaggggttggggaaacagcatctccaagcagcttagagttggccatatttacctcagcctgggcgctggtcctttcttccggcccctcccctccaaaatgtgcctattgctagagctcctccctctcaacacccagtttccttgggagttgtcattaaaggaaaaaaaaaaaaaaaaaagccagtgcccagggatgggcatctccagggagctggggattagtgccaggcagccctgccagccatgcctacatccccatgggcacagaacaagccaaagccttcgttgtatgttgacgatgcacttttatgaatgtagtttctatcgctgtttttagccttttcacatcatgtaatgtgaggccttgtacttgttaatttatatctcagatcatatttgatggtttttatatatatcaattctagactgttacaggtgacggacgcctcaagagagagaagagaaaatgaaagcagctggttttgcagaagtgtgtgtcgcatgcgccagttgggcctggaccctcctgtgtccatccctgttcccccaggggctctatcagcccctgtaccccacactgccctctgaagacaacacaggctcctgcttccacctcggcccttgcccagggtggggcctggccctcatcttgaccaaagctgctgtgtggcagctcggcctctctacgaccccatcttggtggctgcacactcttcctggcccgcacccccatccccagtccctgttccccaagaggatacagagcacggtgctggctgactcaactgtgcgtcccaggttcagggtcttacagagctccaccccctggggtcttacctcactgggaatgtgttttgaaaatgaatttgaagacaagccaacaaaccctgcactccaaaaaagcaaaacagaccctaatttttttgtgccaaaaactgtggacatgctggctcagcatcctcaggaccaagttgttgcttaatttattgttttttaataactaatccagataaaaagttgtggggcttcagggtgacctgggcccaaaggttctgaagggcagttcctggcagccccaggcttgctgtgggaaggggccgtgccgtcactttctcatcattccatggggtgtgtctgcctgggccaactctgcatggagaggccagggctggggacagtccgcactctgccaccctcctgccccttccacccaccccagctctatgtctgtgtctgaattgtggatcgtgcagccatggttattgtggaactgtggaacctgcagccatagttatttgactatatcttgaccgagggcttgcagtgcaaagccaggccagtgttgcgcattacttacaataaaagggatcatttatatcagaggggtcctgtggcagtgctttcagttgtggggggtggaggtaggtttttgcttagcaggggccaggtatggtgcctggcaacgagcctgggcctttcaagcagaagagaacttgactccaagtagaggggtcctggggtgatctggctgataccattgtcagtccagaggtgtctgcccctttcctccagttgcccctccaggagctccactggggtggtcccaacagggctgatttaccagggtggcactgctggccctcacaacctgaacgtcaccagtggctgagttcccggagctttcatgatatttggtagggtcttcctggcccagaggacttccttcagtcccatctttgcagggcaggggtcaggtgtctccaagagccacctctccagtacccccttgtggtcatctgctactgttgcttaaccgaaccaagatgatccttgccatctgagacctctggtgcaggaagttggcc

SEQ ID NO: 367764 - DNA, 1996 bp, Homo sapiens
tcctttaatgacaactcccaaggaaactgggtgttgagagggaggagctctagcaataggcacattttggaggggaggggccggaggaaaggccagcactcgctagcagtggcaggcagaggcccaggctgccgtcccctagagtcccaggttggctctgccagtcctgtcctttaccaaagatgaatgaagcaaatgtcatgctgccttattcagggaaggaggagcctgtcctgcctgtggccatgaccctgcctctcccaggcaggggcccgcgatgtggaactgctgccactgaggggggatccagttttgtcaatgcagttgtctctgttttacaagttggagtcactcttatgctgtacccagtttctaaactggagactgtgtgtgccctctgggctctgagtacccctgctttgggcttgggcctaggctgcattgaaaagagctgaaggttgtggcctttgcgctcctggcccagcctttgttccccactggagcagaaggggagatggacgacacggtcggggcatctggcctggccagtgccctgatcccagagagcccgaggaggtgtctcaggctgcctgagtcgtgacctgctaggccagagcccactccatctggtagaagggaaagcccatatgctaccaccagctgtgtccaaaaccgccagctctgttcttcctcagccagcctcgcccatccccttgaggtctcagcccctttcccttgtagctcctcccctggagggggaatggcagcaggggttggggaaacagcatctccaagcagcttagagttggccatatttacctcagcctgggcgctggtcctttcttccggcccctcccctccaaaatgtgcctattgctagagctcctccctctcaacacccagtttccttgggagttgtcattaaaggaaaaaaaaaaaaaaaaaagccagtgcccagggatgggcatctccagggagctggggattagtgccaggcagccctgccagccatgcctacatccccatgggcacagaacaagccaaagccttcgttgtatgttgacgatgcacttttatgaatgtagtttctatcgctgtttttagccttttcacatcatgtaatgtgaggccttgtacttgttaatttatatctcagatcatatttgatggtttttatatatatcaattctagactgttacaggtgacggacgcctcaagagagagaagagaaaatgaaagcagctggttttgcagaagtgtgtgtcgcatgcgccagttgggcctggaccctcctgtgtccatccctgttcccccaggggctctatcagcccctgtaccccacactgcccttctatgtctgtgtctgaattgtggatcgtgcagccatggttattgtggaactgtggaacctgcagccatagttatttgactatatcttgaccgagggcttgcagtgcaaagccaggccagtgttgcgcattacttacaataaaagggatcatttatatcagaggggtcctgtggcagtgctttcagttgtggggggtggaggtaggtttttgcttagcaggggccaggtatggtgcctggcaacgagcctgggcctttcaagcagaagagaacttgactccaagtagaggggtcctggggtgatctggctgataccattgtcagtccagaggtgtctgcccctttcctccagttgcccctccaggagctccactggggtggtcccaacagggctgatttaccagggtggcactgctggccctcacaacctgaacgtcaccagtggctgagttcccggagctttcatgatatttggtagggtcttcctggcccagaggacttccttcagtcccatctttgcagggcaggggtcaggtgtctccaagagccacctctccagtacccccttgtggtcatctgctactgttgcttaaccgaaccaagatgatccttgccatctgagacctctggtgcaggaagttggcc

SEQ ID NO: 367765 - DNA, 491 bp, Homo sapiens
aactcacatagttgagttccatgaggcctttcctcatttcccgcaccccagtattaataaagagctgtacctctttgtgacattgattacactgtcatttgtgttcctgtcttgcttctcaactaaagtgtgaaatcctacagctcacctgtgtccctccatgcccccagcacagaacctgacacagggcagactcgcaacaagtgtctgttaaaagaaacctccccaattacttagtcccaattaataatttggctcagtgagcaaatgtaagggtggaaatttaagggtgatttttctgttacacatacctgagtgtgagctggttaacagagattgctttccaggcactgggggtgtgaaagttttgatggagggagggatggggagaagacatccttttgctcagcatctggatagatgggggctgtacaggtgggcctgactgcaggggtttttgaaagtagatagatgatgccagatatcttgtg

SEQ ID NO: 367766 - DNA, 1190 bp, Homo sapiens
ggccaagccaaagggctctcacactaagtgaagcttctccattctgtaagctttccgggaacatccaaggcaagactggcacccagcacagcagtgactgaccacataccccactctccaggacccatggagtccttcagctcaaagagcctggcactgcaagcagagaagaagctactgagtaagatggcgggtcgctctgtggctcatctcttcatagatgagacaagcagtgaggtgctagatgagctctaccgtgtgtccaaggagtacacgcacagccggccccaggcccagcgcgtgatcaaggacctgatcaaagtggccatcaaggtggctgtgctgcaccgcaatggctcctttggccccagtgagctggccctggctacccgctttcgccagaagctgcggcagggtgccatgacggcacttagctttggtgaggtagacttcaccttcgaggctgctgttctggctggcctgctgaccgagtgccgggatgtgctgctagagttggtggaacaccacctcacgcccaagtcacatggccgcatccgccacgtgtttgatcacttctctgacccaggtctgctcacggccctctatgggcctgacttcactcagcaccttggcaagatctgtgacggactcaggaagctgctagacgaagggaagctctgagagccctgagcctagcacattccaccttgacaaaatggttgactgagaaaacacagataatgggcttcctaaccctgctcacctggcactaacacttttcaatcttcaggcttcattccttcccaagagtgcttttgactctgagaccagcccacccccaaacagctagtggagaaggagcaatgctgaggggtgaggcctctctcccactccagccccaggacaggaaacagaactgcctgaaaaaggtgaagtgaaacttggatctctatttctcccataagggacttctgaaacagggaagccccctcccatgtgaaccaaggaaaggaggcacagcccagagaacccctttggggatactaaagacagaagaggggaaggtggcccttagagacagagcttggacagatgccagaggctctgttccagagtgcaggaagaaggggctagggcaggggagattctcataggggaaataaaactactaaaatatgaaaagggctcaa

SEQ ID NO: 367767 - DNA, 359 bp, Homo sapiens
tgaaacataaatgaattttctgtttaggcttctgcctcatcctgaagatatctcattatgtacatgcagatattccaaaatctgaaaaaatccaaaattcaaaatgcttcttgtcccaagcatttcaaataatgatattcaacctgtatatacttaaaggaccacaggaaggcatcattaacaaaacaagttgagggccaggcgcagtggctcacacatcaaaacttcaggatgctaaggcgggagtaccacttgaggccaggagtttgagatcagcctgggtaacataaagagaccccatccctacaaaatgtacagaaattagcctggtatgatgacatgtgtctgtagtcctagct

SEQ ID NO: 367768 - DNA, 487 bp, Homo sapiens
cagggaaggatcttcgttgactcctccggcttcagggggctccaggcgtcccttggttctaaccgctgcctctgtggtcttgtggccgccttccctgggtcctcagatcccccccttgcatataaggacacttgtcgtgggatatggggcccaccctaaatccaggatggtctcattcgaagatccctaactgaatgaattctgtaaagaccccttttccaatcaaggccgcatttacagattcccgacacgtcactgggaagccaccatttggtcctcaacatcccgtctcctccgcccccagatgcgacggcgtctcagcagcgacttggagccatgcagggtttctgttgtggttgttcacttgggtaagcttcctgctcttaccgacagtggatgacacactccccactcccacgccacttcatgttccttcgggagcggagggggttggaagaataaacacccagatcttcaagacgtaaag

SEQ ID NO: 367769 - DNA, 680 bp, Homo sapiens
ggtagcttctgcagtatttatttctttaaatatttaacagtgttgagaggcaatgactcgcaataatatgtagagtttctagcacattatgagtgcttaataaatgttagaacaataaaatcctgtatgatgaaaaacagcagtcagtaaaactatacagtctacgatattttaaagccatagcaataactagtttaaaaagaatagaaagcaaacagtgcattgattaaatcacggtcataaaggaacatttacgttcactaaaaagtccacccaggtaatttccccttgtatgtattaggggatggaaagaaggcacaggaaaagtggataaagtatggattaaaaaacaactcttcccccatccccccgccaccccccaaaagccaggtggagctctattgaccacaagccggggtagctacatccagtgcaacggtggggtgctccaagcgccttcgaaacgtcctctacgccagcaccaactggcaaaaccttctaattttctagacgcctttctgcttggttttggaaggggaggcacccaagtgggtgtgtgcgacacctctagttgtaagccgggacacagtgacgtcgagagagcgctattctactcggagaggaagttaatcccatcgaactccagccaggaaaacgtgggcttgggaaccgcggccgct

SEQ ID NO: 367770 - DNA, 865 bp, Homo sapiens
attctcatatactgtactattctttagctgtagacaggatgaagtgtttagggcccaggtccccttaccatgtgattatatttcactcaagatctgagcagcaacctcagaacaagatataagtatttccattacatgattcagtatggtggttgatttttctgaagcaaaaggcagcaaatgtcccctttcctgttcagagatgacatgaaagacttgactgtatttttaaattcattgacacccaaattctatgtggcacttacagggacctcttcattgatatcaggactaatatttatatttgaatggtggtacttccataagcatggcacatcttttattgagcaagtatctgtaagccatttgcaaccactgatgggaggaacagagagcagcatttcagaaccaggttctccttcgaggaacagagaaaatgaaaccagcagacagaatttgtcagaatgtaaggtatggagaaaccctctaaatcttttcagaggagcagaatataggagatacacttgggtgactggtaaagagccacttacatactatgacatgaacctgtcagctcaggaccatcagacctttttcacctgtgacacagattttttacgtccttcagacacagttatgcagaaggcttggagggaaagaaatcctccagctcgaatcaaagcagcctatcaagctttagaattaaacaatgactgtgccactgcatatgttctactggctgaggaagaagcaacaactattgtagatgctgaaaggttatttaaacaggcactcaaggcaggagaaacaatttataggcagtcacagcagtgccagcaccaaagtcctcagcatgaagctcaac

SEQ ID NO: 367771 - DNA, 623 bp, Homo sapiens
atgatgacttctgagcccacatgcagaggcagttgggggtgggaagcaggagaacagtgagagccaagatcgatggaccaaaaaataaagtctgccttggggaagtcctgactataggtagactgttttcatgaggtgttcttctcctagctcaagtaggggcccaggtcagggagctgcagcatcccagagctatgattgatgaacattgtacttttcccttctgtcttaacagttggggtgcaggattaggataggtagcctatgctgtctctaacagaaaacattacaggattgaacagaagagttccccttgcatacgtcatcttttggagctgctcttactcactgtcttgcgcctaaacagaggtccagattttggatgggaaaacaaagaggggttgagagcagcaagtgtttgatcaagtgaaaatctgctgtctgcctcatctcatgggtttctctgcaggattgagaccccttgccttggtgtacacaaattgcttgcatcagcttgagatcccaggacctttgccaggccacgggtaggcatctgtctggcttgggatgggagtttcttaggacacttattccctcatcttgctttcctaacccaggagttg

SEQ ID NO: 367772 - DNA, 3429 bp, Homo sapiens
aagaaagccgagtgatggaatcaccgcggcggccgtcggaaggacccgcccggaaacgccgaccaagagggccccatgtcagttatgcgcgggagtgacgtctcctaacgccagcgcccgcgcccgcgccccaggaagtagggtttgccttaggtgatttgaagtctaatatctttcccaatgagttacactcatttcccatccatctaatgggcgctggcagcgtgtttcgattattcttggcttctggcctccatccgaccaaatagctgttgctactcctacaagtttttctggtgcccgttatctccacgacagccgaatccaaagctttaagagctgctcggcagctggaacgatcggtggcttttccaaccccggggggggggcggtgtgaaaggcttatcttgagtaataaaatagtacaggaagtgagagcgccacaaacaacagggggtttgctagttctttcgacgtctgtagaacacttgctacgtattctgtgctgacaatacgaacacattgactgtatttttaaattcattgacacccaaattctatgtggcacttacagggacctcttcattgatatcaggactaatatttatatttgaatggtggtacttccataagcatggcacatcttttattgagcaagtatctgtaagccatttgcaaccactgatgggaggaacagagagcagcatttcagaaccaggttctccttcgaggaacagagaaaatgaaaccagcagacagaatttgtcagaatgtaaggtatggagaaaccctctaaatcttttcagaggagcagaatataggagatacacttgggtgactggtaaagagccacttacatactatgacatgaacctgtcagctcaggaccatcagacctttttcacctgtgacacagattttttacgtccttcagacacagttatgcagaaggcttggagggaaagaaatcctccagctcgaatcaaagcagcctatcaagctttagaattaaacaatgaatataagccttccaaagtcagcagcaatctgttacacagcagcactgttgaagacaaggactgtttcagaaaaattctctccagaaacagcctccagaagaggattaagcacagcagaaattaatgccgtggaagcaattcatagagctgtggaatttaatcctcatgttccaaaatatttattagagatgaaaagtttaattttacctccagaacacattctgaaacggggtgatagtgaagcaattgcctatgctttctttcatcttcagcactggaaacaaatagaaggtgctcttaatctgttacagtgtacatgggaaggcacttttagaatgattccatacccgttagagaaaggacatctattttacccttatcccagctgcacagagacggctgatagagagctattacctacctttcatcatgtttctgtttacccaaaaaaggagcttcctttgttcatccatttcacagcaggattttgctcttctacagcaatgatagccattctcactcaccagtttcctgaaatcatgggtatttttgctaaagctgtgctgggactctggtgcccccaaccctgggcatcctcaggctttgaggagaatacacaggatttgaagtcagaagacctaggtttgagttctggctgagccacgcactgttcatgtgaccttggacaaatcaccaaatttttctgaacagcatctgtaaagtgacagtaacccctacctcacagggttgttgtgaggattacatatatgctaaagcattttgcatatgaaaaagcttcttatgaatattgttattcctaggcaaaccccccttggaagctgtcaaaaaggacaactgtagatgaaattgtcttccttttttcttcattcagcttagcctttctgtttggccagggctacttacaggggctgttggggttgaagtcaagtcaccgcattttggctcctttggtcaaagagaaagaactctaatgtccagctgctccatcgatatactcatagaatggaagtgagcaaaggaaaattttaagccaggatagttaaccgttagggggccagtgggagaatgcttgccttgcatttgcacatccagaatgactaaaacatcttaagtaaatgaggaatagccaccgagatgctcagagataatataagccatgagtgggaagtgggaaaatgagtttgtcaacgccctctcttttctatccctttacctttgaggtcagggacagggcatattactgacaccccactggctattgccctatacctgccaatcacccaaagaaaataatagcttctgagaaagctcaattcactgtagcaactgtgatatatttaccctaataaagccaccacttggtcttttccagtgcttctctcttatggagatcatccctggaatccaaagctctccagttttctaacccagttaagagttaaaaacaaccacaggtcatgagcagtaggcttggcagttacaccccatgcagtcataggagactgctccatcattctcagcacatagggtgcacatctcactatctctggcatgaaccagccttgcgaacttatacagtctcagccactctgctttgatggtaattcttcaccactgatctctcctcaccatgcccttcctgcatccttcccccaaccacccaccagaggagttctggtccccaaaccaaagagttgcctgcaggttggtaatgtgactttgtagatattccttgattaaagccagaccctattggtatcctttttgaagtactggatcgaaatctaattgcttttttttttaattgttggggagaggaggatgagcagaactcctatgcagcctgagagaagttctctatgtgtctgtatatgtacacctctgtgtgtgtgtgtgtaacctcatggttgtgctcaggctgacagggagggcaaagagtgaaaaggaagcatctctttcttgttatccaacattgcttcaaagatgcccaacccccgtagtagcaggcagttcccaagtggagggtcggggcagaggcctccaccaaggccatcaataaccaggtgtgagctacaggtctctgtgtaatgtgaagctctcccgtatttcatttctgcacccagggggcggctctgcaggattgcttacggagaactctgtgtctggcacctctctccacaaggcccaggcgcccagggtcccaccgacctgcccaggaatgcatcacattgttctctggtgctgtaatttggctgcaggagctaggctgaatgcctcccagggatgagaaacatactctccctggcgtcctcccttcgccccagctagcttgagcttctgccctatgaccactgagtgcatttaaataaaaacctcagaaagactgagg

SEQ ID NO: 367773 - DNA, 3123 bp, Homo sapiens
attctcatatactgtactattctttagctgtagacaggatgaagtgtttagggcccaggtccccttaccatgtgattatatttcactcaagatctgagcagcaacctcagaacaagatataagtatttccattacatgattcagtatggtggttgatttttctgaagcaaaaggcagcaaatgtcccctttcctgttcagagatgacatgaaagacttgactgtatttttaaattcattgacacccaaattctatgtggcacttacagggacctcttcattgatatcaggactaatatttatatttgaatggtggtacttccataagcatggcacatcttttattgagcaagtatctgtaagccatttgcaaccactgatgggaggaacagagagcagcatttcagaaccaggttctccttcgaggaacagagaaaatgaaaccagcagacagaatttgtcagaatgtaaggtatggagaaaccctctaaatcttttcagaggagcagaatataggagatacacttgggtgactggtaaagagccacttacatactatgacatgaacctgtcagctcaggaccatcagacctttttcacctgtgacacagattttttacgtccttcagacacagttatgcagaaggcttggagggaaagaaatcctccagctcgaatcaaagcagcctatcaagctttagaattaaacaatgaatataagccttccaaagtcagcagcaatctgttacacagcagcactgttgaagacaaggactgtttcagaaaaattctctccagaaacagcctccagaagaggattaagcacagcagaaattaatgccgtggaagcaattcatagagctgtggaatttaatcctcatgttccaaaatatttattagagatgaaaagtttaattttacctccagaacacattctgaaacggggtgatagtgaagcaattgcctatgctttctttcatcttcagcactggaaacaaatagaaggtgctcttaatctgttacagtgtacatgggaaggcacttttagaatgattccatacccgttagagaaaggacatctattttacccttatcccagctgcacagagacggctgatagagagctattacctacctttcatcatgtttctgtttacccaaaaaaggagcttcctttgttcatccatttcacagcaggattttgctcttctacagcaatgatagccattctcactcaccagtttcctgaaatcatgggtatttttgctaaagctgtgctgggactctggtgcccccaaccctgggcatcctcaggctttgaggagaatacacaggatttgaagtcagaagacctaggtttgagttctggctgagccacgcactgttcatgtgaccttggacaaatcaccaaatttttctgaacagcatctgtaaagtgacagtaacccctacctcacagggttgttgtgaggattacatatatgctaaagcattttgcatatgaaaaagcttcttatgaatattgttattcctaggcaaaccccccttggaagctgtcaaaaaggacaactgtagatgaaattgtcttccttttttcttcattcagcttagcctttctgtttggccagggctacttacaggggctgttggggttgaagtcaagtcaccgcattttggctcctttggtcaaagagaaagaactctaatgtccagctgctccatcgatatactcatagaatggaagtgagcaaaggaaaattttaagccaggatagttaaccgttagggggccagtgggagaatgcttgccttgcatttgcacatccagaatgactaaaacatcttaagtaaatgaggaatagccaccgagatgctcagagataatataagccatgagtgggaagtgggaaaatgagtttgtcaacgccctctcttttctatccctttacctttgaggtcagggacagggcatattactgacaccccactggctattgccctatacctgccaatcacccaaagaaaataatagcttctgagaaagctcaattcactgtagcaactgtgatatatttaccctaataaagccaccacttggtcttttccagtgcttctctcttatggagatcatccctggaatccaaagctctccagttttctaacccagttaagagttaaaaacaaccacaggtcatgagcagtaggcttggcagttacaccccatgcagtcataggagactgctccatcattctcagcacatagggtgcacatctcactatctctggcatgaaccagccttgcgaacttatacagtctcagccactctgctttgatggtaattcttcaccactgatctctcctcaccatgcccttcctgcatccttcccccaaccacccaccagaggagttctggtccccaaaccaaagagttgcctgcaggttggtaatgtgactttgtagatattccttgattaaagccagaccctattggtatcctttttgaagtactggatcgaaatctaattgcttttttttttaattgttggggagaggaggatgagcagaactcctatgcagcctgagagaagttctctatgtgtctgtatatgtacacctctgtgtgtgtgtgtgtaacctcatggttgtgctcaggctgacagggagggcaaagagtgaaaaggaagcatctctttcttgttatccaacattgcttcaaagatgcccaacccccgtagtagcaggcagttcccaagtggagggtcggggcagaggcctccaccaaggccatcaataaccaggtgtgagctacaggtctctgtgtaatgtgaagctctcccgtatttcatttctgcacccagggggcggctctgcaggattgcttacggagaactctgtgtctggcacctctctccacaaggcccaggcgcccagggtcccaccgacctgcccaggaatgcatcacattgttctctggtgctgtaatttggctgcaggagctaggctgaatgcctcccagggatgagaaacatactctccctggcgtcctcccttcgccccagctagcttgagcttctgccctatgaccactgagtgcatttaaataaaaacctcagaaagactgagg

SEQ ID NO: 367774 - DNA, 3560 bp, Homo sapiens
aagaaagccgagtgatggaatcaccgcggcggccgtcggaaggacccgcccggaaacgccgaccaagagggccccatgtcagttatgcgcgggagtgacgtctcctaacgccagcgcccgcgcccgcgccccaggaagtagggtttgccttaggtgatttgaagtctaatatctttcccaatgagttacactcatttcccatccatctaatgggcgctggcagcgtgtttcgattattcttggcttctggcctccatccgaccaaatagctgttgctactcctacaagtttttctggtgcccgttatctccacgacagccgaatccaaagctttaagagctgctcggcagctggaacgatcggtggcttttccaaccccggggggggggcggtgtgaaaggtgaccctcatttcgtttggaagcggtaacacttcggggtcacatctcagtccagttcctccagaataggcgctgctgtccgccccttccctgccccacgaaagaacaggtagccccaatcttgagacacgctcctccaccttcgaaatcttctcggtcccggttccccaggactcagccttcacagaggccaacttcaggtccgccactatcccaggattcccgactcccggtttcctgtccttctcccctcccagctcctggcgcctgcgatagcggcaagatggcggaccgtggcggcgtgggtgaagccgcagctgttggagcgtctcctgcatctgtccctggcctaaacccgacgctaggctggagggagcgactgcgggccgggctggcggggactggggcctcgttgtggttcgtggcggggctggggctgctttacgccctgaggatccctttgaggctgtgtgagaatttggcagcggatatttgaatggtggtacttccataagcatggcacatcttttattgagcaagtatctgtaagccatttgcaaccactgatgggaggaacagagagcagcatttcagaaccaggttctccttcgaggaacagagaaaatgaaaccagcagacagaatttgtcagaatgtaaggtatggagaaaccctctaaatcttttcagaggagcagaatataggagatacacttgggtgactggtaaagagccacttacatactatgacatgaacctgtcagctcaggaccatcagacctttttcacctgtgacacagattttttacgtccttcagacacagttatgcagaaggcttggagggaaagaaatcctccagctcgaatcaaagcagcctatcaagctttagaattaaacaatgaatataagccttccaaagtcagcagcaatctgttacacagcagcactgttgaagacaaggactgtttcagaaaaattctctccagaaacagcctccagaagaggattaagcacagcagaaattaatgccgtggaagcaattcatagagctgtggaatttaatcctcatgttccaaaacttttagaatgattccatacccgttagagaaaggacatctattttacccttatcccagctgcacagagacggctgatagagagctattacctacctttcatcatgtttctgtttacccaaaaaaggagcttcctttgttcatccatttcacagcaggattttgctcttctacagcaatgatagccattctcactcaccagtttcctgaaatcatgggtatttttgctaaagctgtgctgggactctggtgcccccaaccctgggcatcctcaggctttgaggagaatacacaggatttgaagtcagaagacctaggtttgagttctggctgagccacgcactgttcatgtgaccttggacaaatcaccaaatttttctgaacagcatctgtaaagtgacagtaacccctacctcacagggttgttgtgaggattacatatatgctaaagcattttgcatatgaaaaagcttcttatgaatattgttattcctaggcaaaccccccttggaagctgtcaaaaaggacaactgtagatgaaattgtcttccttttttcttcattcagcttagcctttctgtttggccagggctacttacaggggctgttggggttgaagtcaagtcaccgcattttggctcctttggtcaaagagaaagaactctaatgtccagctgctccatcgatatactcatagaatggaagtgagcaaaggaaaattttaagccaggatagttaaccgttagggggccagtgggagaatgcttgccttgcatttgcacatccagaatgactaaaacatcttaagtaaatgaggaatagccaccgagatgctcagagataatataagccatgagtgggaagtgggaaaatgagtttgtcaacgccctctcttttctatccctttacctttgaggtcagggacagggcatattactgacaccccactggctattgccctatacctgccaatcacccaaagaaaataatagcttctgagaaagctcaattcactgtagcaactgtgatatatttaccctaataaagccaccacttggtcttttccagtgcttctctcttatggagatcatccctggaatccaaagctctccagttttctaacccagttaagagttaaaaacaaccacaggtcatgagcagtaggcttggcagttacaccccatgcagtcataggagactgctccatcattctcagcacatagggtgcacatctcactatctctggcatgaaccagccttgcgaacttatacagtctcagccactctgctttgatggtaattcttcaccactgatctctcctcaccatgcccttcctgcatccttcccccaaccacccaccagaggagttctggtccccaaaccaaagagttgcctgcaggttggtaatgtgactttgtagatattccttgattaaagccagaccctattggtatcctttttgaagtactggatcgaaatctaattgcttttttttttaattgttggggagaggaggatgagcagaactcctatgcagcctgagagaagttctctatgtgtctgtatatgtacacctctgtgtgtgtgtgtgtaacctcatggttgtgctcaggctgacagggagggcaaagagtgaaaaggaagcatctctttcttgttatccaacattgcttcaaagatgcccaacccccgtagtagcaggcagttcccaagtggagggtcggggcagaggcctccaccaaggccatcaataaccaggtgtgagctacaggtctctgtgtaatgtgaagctctcccgtatttcatttctgcacccagggggcggctctgcaggattgcttacggagaactctgtgtctggcacctctctccacaaggcccaggcgcccagggtcccaccgacctgcccaggaatgcatcacattgttctctggtgctgtaatttggctgcaggagctaggctgaatgcctcccagggatgagaaacatactctccctggcgtcctcccttcgccccagctagcttgagcttctgccctatgaccactgagtgcatttaaataaaaacctcagaaagactgagg

SEQ ID NO: 367775 - DNA, 1520 bp, Homo sapiens
aagaaagccgagtgatggaatcaccgcggcggccgtcggaaggacccgcccggaaacgccgaccaagagggccccatgtcagttatgcgcgggagtgacgtctcctaacgccagcgcccgcgcccgcgccccaggaagtagggtttgccttaggtgatttgaagtctaatatctttcccaatgagttacactcatttcccatccatctaatgggcgctggcagcgtgtttcgattattcttggcttctggcctccatccgaccaaatagctgttgctactcctacaagtttttctggtgcccgttatctccacgacagccgaatccaaagctttaagagctgctcggcagctggaacgatcggtggcttttccaaccccggggggggggcggtgtgaaaggtgaccctcatttcgtttggaagcggtaacacttcggggtcacatctcagtccagttcctccagaataggcgctgctgtccgccccttccctgccccacgaaagaacaggtagccccaatcttgagacacgctcctccaccttcgaaatcttctcggtcccggttccccaggactcagccttcacagaggccaacttcaggtccgccactatcccaggattcccgactcccggtttcctgtccttctcccctcccagctcctggcgcctgcgatagcggcaagatggcggaccgtggcggcgtgggtgaagccgcagctgttggagcgtctcctgcatctgtccctggcctaaacccgacgctaggctggagggagcgactgcgggccgggctggcggggactggggcctcgttgtggttcgtggcggggctggggctgctttacgccctgaggatccctttgaggctgtgtgagaatttggcagcggtgactgtatttttaaattcattgacacccaaattctatgtggcacttacagggacctcttcattgatatcaggactaatatttatatttgaatggtggtacttccataagcatggcacatcttttattgagcaagtatctgtaagccatttgcaaccactgatgggaggaacagagagcagcatttcagaaccaggttctccttcgaggaacagagaaaatgaaaccagcagacagaatttgtcaggtgactacttttctaatgtgttttcagagctgtgtatttaagattgagtttggctctgggagatagaaaactcaaaacagcagagtgctgtggtgtgcatgtttgtgtttcccccaaaattctaatcaccaatgtgatgttacgaggtagggtctttgggaggtgatcaggtcatgagggcagtgccctcagggatgtgatgaatgcccttatgagagaccccagagagctgcttgccacttctaccgtgggaggacaccacgagaaggcgccgtctgtgaaccagaaagcagaccctcaccagacaccaaatttgttggtaccttggtcatagacttcccagcctccagaactgttaaaaataaatttatactgtttataatcta

SEQ ID NO: 367776 - DNA, 3854 bp, Homo sapiens
aagaaagccgagtgatggaatcaccgcggcggccgtcggaaggacccgcccggaaacgccgaccaagagggccccatgtcagttatgcgcgggagtgacgtctcctaacgccagcgcccgcgcccgcgccccaggaagtagggtttgccttaggtgatttgaagtctaatatctttcccaatgagttacactcatttcccatccatctaatgggcgctggcagcgtgtttcgattattcttggcttctggcctccatccgaccaaatagctgttgctactcctacaagtttttctggtgcccgttatctccacgacagccgaatccaaagctttaagagctgctcggcagctggaacgatcggtggcttttccaaccccggggggggggcggtgtgaaaggtgaccctcatttcgtttggaagcggtaacacttcggggtcacatctcagtccagttcctccagaataggcgctgctgtccgccccttccctgccccacgaaagaacaggtagccccaatcttgagacacgctcctccaccttcgaaatcttctcggtcccggttccccaggactcagccttcacagaggccaacttcaggtccgccactatcccaggattcccgactcccggtttcctgtccttctcccctcccagctcctggcgcctgcgatagcggcaagatggcggaccgtggcggcgtgggtgaagccgcagctgttggagcgtctcctgcatctgtccctggcctaaacccgacgctaggctggagggagcgactgcgggccgggctggcggggactggggcctcgttgtggttcgtggcggggctggggctgctttacgccctgaggatccctttgaggctgtgtgagaatttggcagcggtgactgtatttttaaattcattgacacccaaattctatgtggcacttacagggacctcttcattgatatcaggactaatatttatatttgaatggtggtacttccataagcatggcacatcttttattgagcaagtatctgtaagccatttgcaaccactgatgggaggaacagagagcagcatttcagaaccaggttctccttcgaggaacagagaaaatgaaaccagcagacagaatttgtcagaatgtaaggtatggagaaaccctctaaatcttttcagaggagcagaatataggagatacacttgggtgactggtaaagagccacttacatactatgacatgaacctgtcagctcaggaccatcagacctttttcacctgtgacacagattttttacgtccttcagacacagttatgcagaaggcttggagggaaagaaatcctccagctcgaatcaaagcagcctatcaagctttagaattaaacaatgaatataagccttccaaagtcagcagcaatctgttacacagcagcactgttgaagacaaggactgtttcagaaaaattctctccagaaacagcctccagaagaggattaagcacagcagaaattaatgccgtggaagcaattcatagagctgtggaatttaatcctcatgttccaaaacttttagaatgattccatacccgttagagaaaggacatctattttacccttatcccagctgcacagagacggctgatagagagctattacctacctttcatcatgtttctgtttacccaaaaaaggagcttcctttgttcatccatttcacagcaggattttgctcttctacagcaatgatagccattctcactcaccagtttcctgaaatcatgggtatttttgctaaagctgtagtaggagttaaaacccaaaaagaaaatgctgattaattatattcccaaaaatgaaaacactgagaaccatggaaaaactagtccttacttgtgtttgctctatgcagtaggagcatcaccatcacccaggagctcatgaaaaatgcataacttcaggcaccattccagaccttctgaatcagaatctacattttaacaagatccccaggtgctgggactctggtgcccccaaccctgggcatcctcaggctttgaggagaatacacaggatttgaagtcagaagacctaggtttgagttctggctgagccacgcactgttcatgtgaccttggacaaatcaccaaatttttctgaacagcatctgtaaagtgacagtaacccctacctcacagggttgttgtgaggattacatatatgctaaagcattttgcatatgaaaaagcttcttatgaatattgttattcctaggcaaaccccccttggaagctgtcaaaaaggacaactgtagatgaaattgtcttccttttttcttcattcagcttagcctttctgtttggccagggctacttacaggggctgttggggttgaagtcaagtcaccgcattttggctcctttggtcaaagagaaagaactctaatgtccagctgctccatcgatatactcatagaatggaagtgagcaaaggaaaattttaagccaggatagttaaccgttagggggccagtgggagaatgcttgccttgcatttgcacatccagaatgactaaaacatcttaagtaaatgaggaatagccaccgagatgctcagagataatataagccatgagtgggaagtgggaaaatgagtttgtcaacgccctctcttttctatccctttacctttgaggtcagggacagggcatattactgacaccccactggctattgccctatacctgccaatcacccaaagaaaataatagcttctgagaaagctcaattcactgtagcaactgtgatatatttaccctaataaagccaccacttggtcttttccagtgcttctctcttatggagatcatccctggaatccaaagctctccagttttctaacccagttaagagttaaaaacaaccacaggtcatgagcagtaggcttggcagttacaccccatgcagtcataggagactgctccatcattctcagcacatagggtgcacatctcactatctctggcatgaaccagccttgcgaacttatacagtctcagccactctgctttgatggtaattcttcaccactgatctctcctcaccatgcccttcctgcatccttcccccaaccacccaccagaggagttctggtccccaaaccaaagagttgcctgcaggttggtaatgtgactttgtagatattccttgattaaagccagaccctattggtatcctttttgaagtactggatcgaaatctaattgcttttttttttaattgttggggagaggaggatgagcagaactcctatgcagcctgagagaagttctctatgtgtctgtatatgtacacctctgtgtgtgtgtgtgtaacctcatggttgtgctcaggctgacagggagggcaaagagtgaaaaggaagcatctctttcttgttatccaacattgcttcaaagatgcccaacccccgtagtagcaggcagttcccaagtggagggtcggggcagaggcctccaccaaggccatcaataaccaggtgtgagctacaggtctctgtgtaatgtgaagctctcccgtatttcatttctgcacccagggggcggctctgcaggattgcttacggagaactctgtgtctggcacctctctccacaaggcccaggcgcccagggtcccaccgacctgcccaggaatgcatcacattgttctctggtgctgtaatttggctgcaggagctaggctgaatgcctcccagggatgagaaacatactctccctggcgtcctcccttcgccccagctagcttgagcttctgccctatgaccactgagtgcatttaaataaaaacctcagaaagactgagg

SEQ ID NO: 367777 - DNA, 2395 bp, Homo sapiens
atgatgacttctgagcccacatgcagaggcagttgggggtgggaagcaggagaacagtgagagccaagatcgatggaccaaaaaataaagtctgccttggggaagtcctgactataggtagactgttttcatgaggtgttcttctcctagctcaagtaggggcccaggtcagggagctgcagcatcccagagctatgattgatgaacattgtacttttcccttctgtcttaacagttggggtgcaggattaggataggtagcctatgctgtctctaacagaaaacattacaggattgaacagaagagttccccttgcatacgtcatcttttggagctgctcttactcactgtcttgcgcctaaacagaggtccagattttggatgggaaaacaaagaggggttgagagcagcaagtgtttgatcaagtgaaaatctgctgtctgcctcatctcatgggtttctctgcaggattgagaccccttgccttggtgtacacaaattgcttgcatcagcttgagatcccaggacctttgccaggccacgggtgctgggactctggtgcccccaaccctgggcatcctcaggctttgaggagaatacacaggatttgaagtcagaagacctaggtttgagttctggctgagccacgcactgttcatgtgaccttggacaaatcaccaaatttttctgaacagcatctgtaaagtgacagtaacccctacctcacagggttgttgtgaggattacatatatgctaaagcattttgcatatgaaaaagcttcttatgaatattgttattcctaggcaaaccccccttggaagctgtcaaaaaggacaactgtagatgaaattgtcttccttttttcttcattcagcttagcctttctgtttggccagggctacttacaggggctgttggggttgaagtcaagtcaccgcattttggctcctttggtcaaagagaaagaactctaatgtccagctgctccatcgatatactcatagaatggaagtgagcaaaggaaaattttaagccaggatagttaaccgttagggggccagtgggagaatgcttgccttgcatttgcacatccagaatgactaaaacatcttaagtaaatgaggaatagccaccgagatgctcagagataatataagccatgagtgggaagtgggaaaatgagtttgtcaacgccctctcttttctatccctttacctttgaggtcagggacagggcatattactgacaccccactggctattgccctatacctgccaatcacccaaagaaaataatagcttctgagaaagctcaattcactgtagcaactgtgatatatttaccctaataaagccaccacttggtcttttccagtgcttctctcttatggagatcatccctggaatccaaagctctccagttttctaacccagttaagagttaaaaacaaccacaggtcatgagcagtaggcttggcagttacaccccatgcagtcataggagactgctccatcattctcagcacatagggtgcacatctcactatctctggcatgaaccagccttgcgaacttatacagtctcagccactctgctttgatggtaattcttcaccactgatctctcctcaccatgcccttcctgcatccttcccccaaccacccaccagaggagttctggtccccaaaccaaagagttgcctgcaggttggtaatgtgactttgtagatattccttgattaaagccagaccctattggtatcctttttgaagtactggatcgaaatctaattgcttttttttttaattgttggggagaggaggatgagcagaactcctatgcagcctgagagaagttctctatgtgtctgtatatgtacacctctgtgtgtgtgtgtgtaacctcatggttgtgctcaggctgacagggagggcaaagagtgaaaaggaagcatctctttcttgttatccaacattgcttcaaagatgcccaacccccgtagtagcaggcagttcccaagtggagggtcggggcagaggcctccaccaaggccatcaataaccaggtgtgagctacaggtctctgtgtaatgtgaagctctcccgtatttcatttctgcacccagggggcggctctgcaggattgcttacggagaactctgtgtctggcacctctctccacaaggcccaggcgcccagggtcccaccgacctgcccaggaatgcatcacattgttctctggtgctgtaatttggctgcaggagctaggctgaatgcctcccagggatgagaaacatactctccctggcgtcctcccttcgccccagctagcttgagcttctgccctatgaccactgagtgcatttaaataaaaacctcagaaagactgagg

SEQ ID NO: 367778 - DNA, 2043 bp, Homo sapiens
aatgtggaatatgttgtatagtggtcacatggtactggtggtaatagtggcagaaatggcaaaagagccattggttgataaggttcaggagggcctaggctgttcctttgtaaactgtgctcagatatactctcttggctgtcctgggactcctacagggcttgaacattttgtatcaatttctgttttgaaggtgctgggactctggtgcccccaaccctgggcatcctcaggctttgaggagaatacacaggatttgaagtcagaagacctaggtttgagttctggctgagccacgcactgttcatgtgaccttggacaaatcaccaaatttttctgaacagcatctgtaaagtgacagtaacccctacctcacagggttgttgtgaggattacatatatgctaaagcattttgcatatgaaaaagcttcttatgaatattgttattcctaggcaaaccccccttggaagctgtcaaaaaggacaactgtagatgaaattgtcttccttttttcttcattcagcttagcctttctgtttggccagggctacttacaggggctgttggggttgaagtcaagtcaccgcattttggctcctttggtcaaagagaaagaactctaatgtccagctgctccatcgatatactcatagaatggaagtgagcaaaggaaaattttaagccaggatagttaaccgttagggggccagtgggagaatgcttgccttgcatttgcacatccagaatgactaaaacatcttaagtaaatgaggaatagccaccgagatgctcagagataatataagccatgagtgggaagtgggaaaatgagtttgtcaacgccctctcttttctatccctttacctttgaggtcagggacagggcatattactgacaccccactggctattgccctatacctgccaatcacccaaagaaaataatagcttctgagaaagctcaattcactgtagcaactgtgatatatttaccctaataaagccaccacttggtcttttccagtgcttctctcttatggagatcatccctggaatccaaagctctccagttttctaacccagttaagagttaaaaacaaccacaggtcatgagcagtaggcttggcagttacaccccatgcagtcataggagactgctccatcattctcagcacatagggtgcacatctcactatctctggcatgaaccagccttgcgaacttatacagtctcagccactctgctttgatggtaattcttcaccactgatctctcctcaccatgcccttcctgcatccttcccccaaccacccaccagaggagttctggtccccaaaccaaagagttgcctgcaggttggtaatgtgactttgtagatattccttgattaaagccagaccctattggtatcctttttgaagtactggatcgaaatctaattgcttttttttttaattgttggggagaggaggatgagcagaactcctatgcagcctgagagaagttctctatgtgtctgtatatgtacacctctgtgtgtgtgtgtgtaacctcatggttgtgctcaggctgacagggagggcaaagagtgaaaaggaagcatctctttcttgttatccaacattgcttcaaagatgcccaacccccgtagtagcaggcagttcccaagtggagggtcggggcagaggcctccaccaaggccatcaataaccaggtgtgagctacaggtctctgtgtaatgtgaagctctcccgtatttcatttctgcacccagggggcggctctgcaggattgcttacggagaactctgtgtctggcacctctctccacaaggcccaggcgcccagggtcccaccgacctgcccaggaatgcatcacattgttctctggtgctgtaatttggctgcaggagctaggctgaatgcctcccagggatgagaaacatactctccctggcgtcctcccttcgccccagctagcttgagcttctgccctatgaccactgagtgcatttaaataaaaacctcagaaagactgagg

SEQ ID NO: 367779 - DNA, 1538 bp, Homo sapiens
cgcggccgcgcgactacggctgcgagagacgacagagggcagggctacttacaggggctgttggggttgaagtcaagtcaccgcattttggctcctttggtcaaagagaaagaactctaatgtccagctgctccatcgatatactcatagaatggaagtgagcaaaggaaaattttaagccaggatagttaaccgttagggggccagtgggagaatgcttgccttgcatttgcacatccagaatgactaaaacatcttaagtaaatgaggaatagccaccgagatgctcagagataatataagccatgagtgggaagtgggaaaatgagtttgtcaacgccctctcttttctatccctttacctttgaggtcagggacagggcatattactgacaccccactggctattgccctatacctgccaatcacccaaagaaaataatagcttctgagaaagctcaattcactgtagcaactgtgatatatttaccctaataaagccaccacttggtcttttccagtgcttctctcttatggagatcatccctggaatccaaagctctccagttttctaacccagttaagagttaaaaacaaccacaggtcatgagcagtaggcttggcagttacaccccatgcagtcataggagactgctccatcattctcagcacatagggtgcacatctcactatctctggcatgaaccagccttgcgaacttatacagtctcagccactctgctttgatggtaattcttcaccactgatctctcctcaccatgcccttcctgcatccttcccccaaccacccaccagaggagttctggtccccaaaccaaagagttgcctgcaggttggtaatgtgactttgtagatattccttgattaaagccagaccctattggtatcctttttgaagtactggatcgaaatctaattgcttttttttttaattgttggggagaggaggatgagcagaactcctatgcagcctgagagaagttctctatgtgtctgtatatgtacacctctgtgtgtgtgtgtgtaacctcatggttgtgctcaggctgacagggagggcaaagagtgaaaaggaagcatctctttcttgttatccaacattgcttcaaagatgcccaacccccgtagtagcaggcagttcccaagtggagggtcggggcagaggcctccaccaaggccatcaataaccaggtgtgagctacaggtctctgtgtaatgtgaagctctcccgtatttcatttctgcacccagggggcggctctgcaggattgcttacggagaactctgtgtctggcacctctctccacaaggcccaggcgcccagggtcccaccgacctgcccaggaatgcatcacattgttctctggtgctgtaatttggctgcaggagctaggctgaatgcctcccagggatgagaaacatactctccctggcgtcctcccttcgccccagctagcttgagcttctgccctatgaccactgagtgcatttaaataaaaacctcagaaagactgagg

SEQ ID NO: 367780 - DNA, 1536 bp, Homo sapiens
aagaaagccgagtgatggaatcaccgcggcggccgtcggaaggacccgcccggaaacgccgaccaagagggccccatgtcagttatgcgcgggagtgacgtctcctaacgccagcgcccgcgcccgcgccccaggaagtagggtttgccttaggtgatttgaagtctaatatctttcccaatgagttacactcatttcccatccatctaatgggcgctggcagcgtgtttcgattattcttggcttctggcctccatccgaccaaatagctgttgctactcctacaagtttttctggtgcccgttatctccacgacagccgaatccaaagctttaagagctgctcggcagctggaacgatcggtggcttttccaaccccggggggggggcggtgtgaaaggtgaccctcatttcgtttggaagcggtaacacttcggggtcacatctcagtccagttcctccagaataggcgctgctgtccgccccttccctgccccacgaaagaacaggtagccccaatcttgagacacgctcctccaccttcgaaatcttctcggtcccggttccccaggactcagccttcacagaggccaacttcaggtccgccactatcccaggattcccgactcccggtttcctgtccttctcccctcccagctcctggcgcctgcgatagcggcaagatggcggaccgtggcggcgtgggtgaagccgcagctgttggagcgtctcctgcatctgtccctggcctaaacccgacgctaggctggagggagcgactgcgggccgggctggcggggactggggcctcgttgtggttcgtggcggggctggggctgctttacgccctgaggatccctttgaggctgtgtgagaatttggcagcggtgactgtatttttaaattcattgacacccaaattctatgtggcacttacagggacctcttcattgatatcaggactaatatttatatttgaatggtggtacttccataagcatggcacatcttttattgagcaagtatctgtaagccatttgcaaccactgatgggaggaacagagagcagcatttcagaaccaggttctccttcgaggaacagagaaaatgaaaccagcagacagaatttgtcagaatgtaaggtatggagaaaccctctaaatcttttcagaggagcagaatataggagatacacttgggtgactggtaaagagccacttacatactatgacatgaacctgtcagctcaggaccatcagacctttttcacctgtgacacagattttttacgtccttcagacacagttatgcagaaggcttggagggaaagaaatcctccagctcgaatcaaagcagcctatcaagctttagaattaaacaatgactgtgccactgcatatgttctactggctgaggaagaagcaacaactattgtagatgctgaaaggttatttaaacaggcactcaaggcaggagaaacaatttataggcagtcacagcagtgccagcaccaaagtcctcagcatgaagctcaac

SEQ ID NO: 367781 - DNA, 2064 bp, Homo sapiens
aagaaagccgagtgatggaatcaccgcggcggccgtcggaaggacccgcccggaaacgccgaccaagagggccccatgtcagttatgcgcgggagtgacgtctcctaacgccagcgcccgcgcccgcgccccaggaagtagggtttgccttaggtgatttgaagtctaatatctttcccaatgagttacactcatttcccatccatctaatgggcgctggcagcgtgtttcgattattcttggcttctggcctccatccgaccaaatagctgttgctactcctacaagtttttctggtgcccgttatctccacgacagccgaatccaaagctttaagagctgctcggcagctggaacgatcggtggcttttccaaccccggggggggggcggtgtgaaaggtgaccctcatttcgtttggaagcggtaacacttcggggtcacatctcagtccagttcctccagaataggcgctgctgtccgccccttccctgccccacgaaagaacaggtagccccaatcttgagacacgctcctccaccttcgaaatcttctcggtcccggttccccaggactcagccttcacagaggccaacttcaggtccgccactatcccaggattcccgactcccggtttcctgtccttctcccctcccagctcctggcgcctgcgatagcggcaagatggcggaccgtggcggcgtgggtgaagccgcagctgttggagcgtctcctgcatctgtccctggcctaaacccgacgctaggctggagggagcgactgcgggccgggctggcggggactggggcctcgttgtggttcgtggcggggctggggctgctttacgccctgaggatccctttgaggctgtgtgagaatttggcagcggtgactgtatttttaaattcattgacacccaaattctatgtggcacttacagggacctcttcattgatatcaggactaatatttatatttgaatggtggtacttccataagcatggcacatcttttattgagcaagtatctgtaagccatttgcaaccactgatgggaggaacagagagcagcatttcagaaccaggttctccttcgaggaacagagaaaatgaaaccagcagacagaatttgtcagatggaatttcactcttgttgcccaggctggagtgcaatgtcgcgatcttggctcactgcaacctccacctcccgggttcaagcgattctcctgccccagcctcccgagtagctgggattacaagcacctgccaccatgccagagtaatttttgtatttttagtagagatgggttttcgccatgttggccagactggtctcaaacccctgacctcagatgattcatccacctcggctcccaaagtgctgggattacaggcatgagccaccaggcctggcccattctgtcttcttttctttcaacattcatagccccatatctaggcccttaaacatctcttcccttggctattgctatagtatcctaagtggtttcccttcctcttacacttccccttctagtacatactctctccttactaggtaaaaaaaaaagtggttctcaaactttttagactaagaaatcctttacattcttaaaaaattatccaggacctcaaagagcctttgtttaaatgtggactatatccatcaatatttatcatattagaaattaaagcaggaaatttaaaaatattttaatagtagtaaatccattacgtgttaacatgttgtagactgaaatgtgtcccccaaaattcacatgttgaaactctaacctctaatgtaactgtattaggagctagggtttttaggagataatcaaggttaaatgaggggatcctaatctgatagtattgatggctttgtaagaagaagagagggattgctgtctctctgccatgcaaagacacagtgagaagactgctctctgaaggccaggaggagagccctcaccagagcccaaccattctagtaccttgatcttggacttccaaccttcagattgtgagaaaataaatttctgttgttaagccactcaaaaaaaaaa

SEQ ID NO: 367782 - DNA, 1370 bp, Homo sapiens
aagaaagccgagtgatggaatcaccgcggcggccgtcggaaggacccgcccggaaacgccgaccaagagggccccatgtcagttatgcgcgggagtgacgtctcctaacgccagcgcccgcgcccgcgccccaggaagtagggtttgccttaggtgatttgaagtctaatatctttcccaatgagttacactcatttcccatccatctaatgggcgctggcagcgtgtttcgattattcttggcttctggcctccatccgaccaaatagctgttgctactcctacaagtttttctggtgcccgttatctccacgacagccgaatccaaagctttaagagctgctcggcagctggaacgatcggtggcttttccaaccccggggggggggcggtgtgaaaggtgaccctcatttcgtttggaagcggtaacacttcggggtcacatctcagtccagttcctccagaataggcgctgctgtccgccccttccctgccccacgaaagaacaggtagccccaatcttgagacacgctcctccaccttcgaaatcttctcggtcccggttccccaggactcagccttcacagaggccaacttcaggtccgccactatcccaggattcccgactcccggtttcctgtccttctcccctcccagctcctggcgcctgcgatagcggcaagatggcggaccgtggcggcgtgggtgaagccgcagctgttggagcgtctcctgcatctgtccctggcctaaacccgacgctaggctggagggagcgactgcgggccgggctggcggggactggggcctcgttgtggttcgtggcggggctggggctgctttacgccctgaggatccctttgaggctgtgtgagaatttggcagcggtgactgtatttttaaattcattgacacccaaattctatgtggcacttacagggacctcttcattgatatcaggactaatatttatatttgaatggtggtacttccataagcatggcacatcttttattgagcaagtatctgtaagccatttgcaaccactgatgggaggaacagagagcagcatttcagaaccaggttctccttcgaggaacagagaaaatgaaaccagcagacagaatttgtcagggtctttgggaggtgatcaggtcatgagggcagtgccctcagggatgtgatgaatgcccttatgagagaccccagagagctgcttgccacttctaccgtgggaggacaccacgagaaggcgccgtctgtgaaccagaaagcagaccctcaccagacaccaaatttgttggtaccttggtcatagacttcccagcctccagaactgttaaaaataaatttatactgtttataatcta

SEQ ID NO: 367783 - DNA, 1341 bp, Homo sapiens
aagaaagccgagtgatggaatcaccgcggcggccgtcggaaggacccgcccggaaacgccgaccaagagggccccatgtcagttatgcgcgggagtgacgtctcctaacgccagcgcccgcgcccgcgccccaggaagtagggtttgccttaggtgatttgaagtctaatatctttcccaatgagttacactcatttcccatccatctaatgggcgctggcagcgtgtttcgattattcttggcttctggcctccatccgaccaaatagctgttgctactcctacaagtttttctggtgcccgttatctccacgacagccgaatccaaagctttaagagctgctcggcagctggaacgatcggtggcttttccaaccccggggggggggcggtgtgaaaggtgaccctcatttcgtttggaagcggtaacacttcggggtcacatctcagtccagttcctccagaataggcgctgctgtccgccccttccctgccccacgaaagaacaggtagccccaatcttgagacacgctcctccaccttcgaaatcttctcggtcccggttccccaggactcagccttcacagaggccaacttcaggtccgccactatcccaggattcccgactcccggtttcctgtccttctcccctcccagctcctggcgcctgcgatagcggcaagatggcggaccgtggcggcgtgggtgaagccgcagctgttggagcgtctcctgcatctgtccctggcctaaacccgacgctaggctggagggagcgactgcgggccgggctggcggggactggggcctcgttgtggttcgtggcggggctggggctgctttacgccctgaggatccctttgaggctgtgtgagaatttggcagcggtgactgtatttttaaattcattgacacccaaattctatgtggcacttacagggacctcttcattgatatcaggactaatatttatatttgaatggtggtacttccataagcatggcacatcttttattgagcaagtatctgtaagccatttgcaaccactgatgggaggaacagagagcagcatttcagaaccaggttctccttcgaggaacagagaaaatgaaaccagcagacagaatttgtcagaatgtaaggtatggagaaaccctctaaatcttttcagaggagcagaatataggagctgtgccactgcatatgttctactggctgaggaagaagcaacaactattgtagatgctgaaaggttatttaaacaggcactcaaggcaggagaaacaatttataggcagtcacagcagtgccagcaccaaagtcctcagcatgaagctcaac

SEQ ID NO: 367784 - DNA, 1453 bp, Homo sapiens
aagaaagccgagtgatggaatcaccgcggcggccgtcggaaggacccgcccggaaacgccgaccaagagggccccatgtcagttatgcgcgggagtgacgtctcctaacgccagcgcccgcgcccgcgccccaggaagtagggtttgccttaggtgatttgaagtctaatatctttcccaatgagttacactcatttcccatccatctaatgggcgctggcagcgtgtttcgattattcttggcttctggcctccatccgaccaaatagctgttgctactcctacaagtttttctggtgcccgttatctccacgacagccgaatccaaagctttaagagctgctcggcagctggaacgatcggtggcttttccaaccccggggggggggcggtgtgaaaggtgaccctcatttcgtttggaagcggtaacacttcggggtcacatctcagtccagttcctccagaataggcgctgctgtccgccccttccctgccccacgaaagaacaggtagccccaatcttgagacacgctcctccaccttcgaaatcttctcggtcccggttccccaggactcagccttcacagaggccaacttcaggtccgccactatcccaggattcccgactcccggtttcctgtccttctcccctcccagctcctggcgcctgcgatagcggcaagatggcggaccgtggcggcgtgggtgaagccgcagctgttggagcgtctcctgcatctgtccctggcctaaacccgacgctaggctggagggagcgactgcgggccgggctggcggggactggggcctcgttgtggttcgtggcggggctggggctgctttacgccctgaggatccctttgaggctgtgtgagaatttggcagcggatatttgaatggtggtacttccataagcatggcacatcttttattgagcaagtatctgtaagccatttgcaaccactgatgggaggaacagagagcagcatttcagaaccaggttctccttcgaggaacagagaaaatgaaaccagcagacagaatttgtcagaatgtaaggtatggagaaaccctctaaatcttttcagaggagcagaatataggagatacacttgggtgactggtaaagagccacttacatactatgacatgaacctgtcagctcaggaccatcagacctttttcacctgtgacacagattttttacgtccttcagacacagttatgcagaaggcttggagggaaagaaatcctccagctcgaatcaaagcagcctatcaagctttagaattaaacaatgactgtgccactgcatatgttctactggctgaggaagaagcaacaactattgtagatgctgaaaggttatttaaacaggcactcaaggcaggagaaacaatttataggcagtcacagcagtgccagcaccaaagtcctcagcatgaagctcaac

SEQ ID NO: 367785 - DNA, 136 bp, Homo sapiens
aggcagcaaatgtcccctttcctgttcagagatgacatgaaagactgtgagttaatgttcggaaatattttggtttttttggaggataggtatcaagttcaaatataactagcactctaaaataagctaaactgaa

SEQ ID NO: 367786 - DNA, 3794 bp, Homo sapiens
aagaaagccgagtgatggaatcaccgcggcggccgtcggaaggacccgcccggaaacgccgaccaagagggccccatgtcagttatgcgcgggagtgacgtctcctaacgccagcgcccgcgcccgcgccccaggaagtagggtttgccttaggtgatttgaagtctaatatctttcccaatgagttacactcatttcccatccatctaatgggcgctggcagcgtgtttcgattattcttggcttctggcctccatccgaccaaatagctgttgctactcctacaagtttttctggtgcccgttatctccacgacagccgaatccaaagctttaagagctgctcggcagctggaacgatcggtggcttttccaaccccggggggggggcggtgtgaaaggtgaccctcatttcgtttggaagcggtaacacttcggggtcacatctcagtccagttcctccagaataggcgctgctgtccgccccttccctgccccacgaaagaacaggtagccccaatcttgagacacgctcctccaccttcgaaatcttctcggtcccggttccccaggactcagccttcacagaggccaacttcaggtccgccactatcccaggattcccgactcccggtttcctgtccttctcccctcccagctcctggcgcctgcgatagcggcaagatggcggaccgtggcggcgtgggtgaagccgcagctgttggagcgtctcctgcatctgtccctggcctaaacccgacgctaggctggagggagcgactgcgggccgggctggcggggactggggcctcgttgtggttcgtggcggggctggggctgctttacgccctgaggatccctttgaggctgtgtgagaatttggcagcggtgactgtatttttaaattcattgacacccaaattctatgtggcacttacagggacctcttcattgatatcaggactaatatttatatttgaatggtggtacttccataagcatggcacatcttttattgagcaagtatctgtaagccatttgcaaccactgatgggaggaacagagagcagcatttcagaaccaggttctccttcgaggaacagagaaaatgaaaccagcagacagaatttgtcagaatgtaaggtatggagaaaccctctaaatcttttcagaggagcagaatataggagatacacttgggtgactggtaaagagccacttacatactatgacatgaacctgtcagctcaggaccatcagacctttttcacctgtgacacagattttttacgtccttcagacacagttatgcagaaggcttggagggaaagaaatcctccagctcgaatcaaagcagcctatcaagctttagaattaaacaatgaatataagccttccaaagtcagcagcaatctgttacacagcagcactgttgaagacaaggactgtttcagaaaaattctctccagaaacagcctccagaagaggattaagcacagcagaaattaatgccgtggaagcaattcatagagctgtggaatttaatcctcatgttccaaaatatttattagagatgaaaagtttaattttacctccagaacacattctgaaacggggtgatagtgaagcaattgcctatgctttctttcatcttcagcactggaaacaaatagaaggtgctcttaatctgttacagtgtacatgggaaggcacttttagaatgattccatacccgttagagaaaggacatctattttacccttatcccagctgcacagagacggctgatagagagctattacctacctttcatcatgtttctgtttacccaaaaaaggagcttcctttgttcatccatttcacagcaggattttgctcttctacagcaatgatagccattctcactcaccagtttcctgaaatcatgggtatttttgctaaagctgtgctgggactctggtgcccccaaccctgggcatcctcaggctttgaggagaatacacaggatttgaagtcagaagacctaggtttgagttctggctgagccacgcactgttcatgtgaccttggacaaatcaccaaatttttctgaacagcatctgtaaagtgacagtaacccctacctcacagggttgttgtgaggattacatatatgctaaagcattttgcatatgaaaaagcttcttatgaatattgttattcctaggcaaaccccccttggaagctgtcaaaaaggacaactgtagatgaaattgtcttccttttttcttcattcagcttagcctttctgtttggccagggctacttacaggggctgttggggttgaagtcaagtcaccgcattttggctcctttggtcaaagagaaagaactctaatgtccagctgctccatcgatatactcatagaatggaagtgagcaaaggaaaattttaagccaggatagttaaccgttagggggccagtgggagaatgcttgccttgcatttgcacatccagaatgactaaaacatcttaagtaaatgaggaatagccaccgagatgctcagagataatataagccatgagtgggaagtgggaaaatgagtttgtcaacgccctctcttttctatccctttacctttgaggtcagggacagggcatattactgacaccccactggctattgccctatacctgccaatcacccaaagaaaataatagcttctgagaaagctcaattcactgtagcaactgtgatatatttaccctaataaagccaccacttggtcttttccagtgcttctctcttatggagatcatccctggaatccaaagctctccagttttctaacccagttaagagttaaaaacaaccacaggtcatgagcagtaggcttggcagttacaccccatgcagtcataggagactgctccatcattctcagcacatagggtgcacatctcactatctctggcatgaaccagccttgcgaacttatacagtctcagccactctgctttgatggtaattcttcaccactgatctctcctcaccatgcccttcctgcatccttcccccaaccacccaccagaggagttctggtccccaaaccaaagagttgcctgcaggttggtaatgtgactttgtagatattccttgattaaagccagaccctattggtatcctttttgaagtactggatcgaaatctaattgcttttttttttaattgttggggagaggaggatgagcagaactcctatgcagcctgagagaagttctctatgtgtctgtatatgtacacctctgtgtgtgtgtgtgtaacctcatggttgtgctcaggctgacagggagggcaaagagtgaaaaggaagcatctctttcttgttatccaacattgcttcaaagatgcccaacccccgtagtagcaggcagttcccaagtggagggtcggggcagaggcctccaccaaggccatcaataaccaggtgtgagctacaggtctctgtgtaatgtgaagctctcccgtatttcatttctgcacccagggggcggctctgcaggattgcttacggagaactctgtgtctggcacctctctccacaaggcccaggcgcccagggtcccaccgacctgcccaggaatgcatcacattgttctctggtgctgtaatttggctgcaggagctaggctgaatgcctcccagggatgagaaacatactctccctggcgtcctcccttcgccccagctagcttgagcttctgccctatgaccactgagtgcatttaaataaaaacctcagaaagactgagg

SEQ ID NO: 367787 - DNA, 3506 bp, Homo sapiens
aagaaagccgagtgatggaatcaccgcggcggccgtcggaaggacccgcccggaaacgccgaccaagagggccccatgtcagttatgcgcgggagtgacgtctcctaacgccagcgcccgcgcccgcgccccaggaagtagggtttgccttaggtgatttgaagtctaatatctttcccaatgagttacactcatttcccatccatctaatgggcgctggcagcgtgtttcgattattcttggcttctggcctccatccgaccaaatagctgttgctactcctacaagtttttctggtgcccgttatctccacgacagccgaatccaaagctttaagagctgctcggcagctggaacgatcggtggcttttccaaccccggggggggggcggtgtgaaaggtgaccctcatttcgtttggaagcggtaacacttcggggtcacatctcagtccagttcctccagaataggcgctgctgtccgccccttccctgccccacgaaagaacaggtagccccaatcttgagacacgctcctccaccttcgaaatcttctcggtcccggttccccaggactcagccttcacagaggccaacttcagtgactgtatttttaaattcattgacacccaaattctatgtggcacttacagggacctcttcattgatatcaggactaatatttatatttgaatggtggtacttccataagcatggcacatcttttattgagcaagtatctgtaagccatttgcaaccactgatgggaggaacagagagcagcatttcagaaccaggttctccttcgaggaacagagaaaatgaaaccagcagacagaatttgtcagaatgtaaggtatggagaaaccctctaaatcttttcagaggagcagaatataggagatacacttgggtgactggtaaagagccacttacatactatgacatgaacctgtcagctcaggaccatcagacctttttcacctgtgacacagattttttacgtccttcagacacagttatgcagaaggcttggagggaaagaaatcctccagctcgaatcaaagcagcctatcaagctttagaattaaacaatgaatataagccttccaaagtcagcagcaatctgttacacagcagcactgttgaagacaaggactgtttcagaaaaattctctccagaaacagcctccagaagaggattaagcacagcagaaattaatgccgtggaagcaattcatagagctgtggaatttaatcctcatgttccaaaatatttattagagatgaaaagtttaattttacctccagaacacattctgaaacggggtgatagtgaagcaattgcctatgctttctttcatcttcagcactggaaacaaatagaaggtgctcttaatctgttacagtgtacatgggaaggcacttttagaatgattccatacccgttagagaaaggacatctattttacccttatcccagctgcacagagacggctgatagagagctattacctacctttcatcatgtttctgtttacccaaaaaaggagcttcctttgttcatccatttcacagcaggattttgctcttctacagcaatgatagccattctcactcaccagtttcctgaaatcatgggtatttttgctaaagctgtgctgggactctggtgcccccaaccctgggcatcctcaggctttgaggagaatacacaggatttgaagtcagaagacctaggtttgagttctggctgagccacgcactgttcatgtgaccttggacaaatcaccaaatttttctgaacagcatctgtaaagtgacagtaacccctacctcacagggttgttgtgaggattacatatatgctaaagcattttgcatatgaaaaagcttcttatgaatattgttattcctaggcaaaccccccttggaagctgtcaaaaaggacaactgtagatgaaattgtcttccttttttcttcattcagcttagcctttctgtttggccagggctacttacaggggctgttggggttgaagtcaagtcaccgcattttggctcctttggtcaaagagaaagaactctaatgtccagctgctccatcgatatactcatagaatggaagtgagcaaaggaaaattttaagccaggatagttaaccgttagggggccagtgggagaatgcttgccttgcatttgcacatccagaatgactaaaacatcttaagtaaatgaggaatagccaccgagatgctcagagataatataagccatgagtgggaagtgggaaaatgagtttgtcaacgccctctcttttctatccctttacctttgaggtcagggacagggcatattactgacaccccactggctattgccctatacctgccaatcacccaaagaaaataatagcttctgagaaagctcaattcactgtagcaactgtgatatatttaccctaataaagccaccacttggtcttttccagtgcttctctcttatggagatcatccctggaatccaaagctctccagttttctaacccagttaagagttaaaaacaaccacaggtcatgagcagtaggcttggcagttacaccccatgcagtcataggagactgctccatcattctcagcacatagggtgcacatctcactatctctggcatgaaccagccttgcgaacttatacagtctcagccactctgctttgatggtaattcttcaccactgatctctcctcaccatgcccttcctgcatccttcccccaaccacccaccagaggagttctggtccccaaaccaaagagttgcctgcaggttggtaatgtgactttgtagatattccttgattaaagccagaccctattggtatcctttttgaagtactggatcgaaatctaattgcttttttttttaattgttggggagaggaggatgagcagaactcctatgcagcctgagagaagttctctatgtgtctgtatatgtacacctctgtgtgtgtgtgtgtaacctcatggttgtgctcaggctgacagggagggcaaagagtgaaaaggaagcatctctttcttgttatccaacattgcttcaaagatgcccaacccccgtagtagcaggcagttcccaagtggagggtcggggcagaggcctccaccaaggccatcaataaccaggtgtgagctacaggtctctgtgtaatgtgaagctctcccgtatttcatttctgcacccagggggcggctctgcaggattgcttacggagaactctgtgtctggcacctctctccacaaggcccaggcgcccagggtcccaccgacctgcccaggaatgcatcacattgttctctggtgctgtaatttggctgcaggagctaggctgaatgcctcccagggatgagaaacatactctccctggcgtcctcccttcgccccagctagcttgagcttctgccctatgaccactgagtgcatttaaataaaaacctcagaaagactgagg

SEQ ID NO: 367788 - DNA, 2569 bp, Homo sapiens
gaaaattaggaagaataagagaagcagtaaaaataatgagagatttgatgaaagaatttcctcctcttaccatgttgaacatccatgaaaatctcttagaatcacttttagaattacaggcctatccagatgttcaggcagtcctagcaaaatatgatgatataagccttccaaagtcagcagcaatctgttacacagcagcactgttgaagacaaggactgtttcagaaaaattctctccagaaacagcctccagaagaggattaagcacagcagaaattaatgccgtggaagcaattcatagagctgtggaatttaatcctcatgttccaaaatatttattagagatgaaaagtttaattttacctccagaacacattctgaaacggggtgatagtgaagcaattgcctatgctttctttcatcttcagcactggaaacaaatagaaggtgctcttaatctgttacagtgtacatgggaaggcacttttagaatgattccatacccgttagagaaaggacatctattttacccttatcccagctgcacagagacggctgatagagagctattacctacctttcatcatgtttctgtttacccaaaaaaggagcttcctttgttcatccatttcacagcaggattttgctcttctacagcaatgatagccattctcactcaccagtttcctgaaatcatgggtatttttgctaaagctgtgctgggactctggtgcccccaaccctgggcatcctcaggctttgaggagaatacacaggatttgaagtcagaagacctaggtttgagttctggctgagccacgcactgttcatgtgaccttggacaaatcaccaaatttttctgaacagcatctgtaaagtgacagtaacccctacctcacagggttgttgtgaggattacatatatgctaaagcattttgcatatgaaaaagcttcttatgaatattgttattcctaggcaaaccccccttggaagctgtcaaaaaggacaactgtagatgaaattgtcttccttttttcttcattcagcttagcctttctgtttggccagggctacttacaggggctgttggggttgaagtcaagtcaccgcattttggctcctttggtcaaagagaaagaactctaatgtccagctgctccatcgatatactcatagaatggaagtgagcaaaggaaaattttaagccaggatagttaaccgttagggggccagtgggagaatgcttgccttgcatttgcacatccagaatgactaaaacatcttaagtaaatgaggaatagccaccgagatgctcagagataatataagccatgagtgggaagtgggaaaatgagtttgtcaacgccctctcttttctatccctttacctttgaggtcagggacagggcatattactgacaccccactggctattgccctatacctgccaatcacccaaagaaaataatagcttctgagaaagctcaattcactgtagcaactgtgatatatttaccctaataaagccaccacttggtcttttccagtgcttctctcttatggagatcatccctggaatccaaagctctccagttttctaacccagttaagagttaaaaacaaccacaggtcatgagcagtaggcttggcagttacaccccatgcagtcataggagactgctccatcattctcagcacatagggtgcacatctcactatctctggcatgaaccagccttgcgaacttatacagtctcagccactctgctttgatggtaattcttcaccactgatctctcctcaccatgcccttcctgcatccttcccccaaccacccaccagaggagttctggtccccaaaccaaagagttgcctgcaggttggtaatgtgactttgtagatattccttgattaaagccagaccctattggtatcctttttgaagtactggatcgaaatctaattgcttttttttttaattgttggggagaggaggatgagcagaactcctatgcagcctgagagaagttctctatgtgtctgtatatgtacacctctgtgtgtgtgtgtgtaacctcatggttgtgctcaggctgacagggagggcaaagagtgaaaaggaagcatctctttcttgttatccaacattgcttcaaagatgcccaacccccgtagtagcaggcagttcccaagtggagggtcggggcagaggcctccaccaaggccatcaataaccaggtgtgagctacaggtctctgtgtaatgtgaagctctcccgtatttcatttctgcacccagggggcggctctgcaggattgcttacggagaactctgtgtctggcacctctctccacaaggcccaggcgcccagggtcccaccgacctgcccaggaatgcatcacattgttctctggtgctgtaatttggctgcaggagctaggctgaatgcctcccagggatgagaaacatactctccctggcgtcctcccttcgccccagctagcttgagcttctgccctatgaccactgagtgcatttaaataaaaacctcagaaagactgagg

SEQ ID NO: 367789 - DNA, 3743 bp, Homo sapiens
aagaaagccgagtgatggaatcaccgcggcggccgtcggaaggacccgcccggaaacgccgaccaagagggccccatgtcagttatgcgcgggagtgacgtctcctaacgccagcgcccgcgcccgcgccccaggaagtagggtttgccttaggtgatttgaagtctaatatctttcccaatgagttacactcatttcccatccatctaatgggcgctggcagcgtgtttcgattattcttggcttctggcctccatccgaccaaatagctgttgctactcctacaagtttttctggtgcccgttatctccacgacagccgaatccaaagctttaagagctgctcggcagctggaacgatcggtggcttttccaaccccggggggggggcggtgtgaaaggtgaccctcatttcgtttggaagcggtaacacttcggggtcacatctcagtccagttcctccagaataggcgctgctgtccgccccttccctgccccacgaaagaacaggtagccccaatcttgagacacgctcctccaccttcgaaatcttctcggtcccggttccccaggactcagccttcacagaggccaacttcaggtccgccactatcccaggattcccgactcccggtttcctgtccttctcccctcccagctcctggcgcctgcgatagcggcaagatggcggaccgtggcggcgtgggtgaagccgcagctgttggagcgtctcctgcatctgtccctggcctaaacccgacgctaggctggagggagcgactgcgggccgggctggcggggactggggcctcgttgtggttcgtggcggggctggggctgctttacgccctgaggatccctttgaggctgtgtgagaatttggcagcggatatttgaatggtggtacttccataagcatggcacatcttttattgagcaagtatctgtaagccatttgcaaccactgatgggaggaacagagagcagcatttcagaaccaggttctccttcgaggaacagagaaaatgaaaccagcagacagaatttgtcagaatgtaaggtatggagaaaccctctaaatcttttcagaggagcagaatataggagatacacttgggtgactggtaaagagccacttacatactatgacatgaacctgtcagctcaggaccatcagacctttttcacctgtgacacagattttttacgtccttcagacacagttatgcagaaggcttggagggaaagaaatcctccagctcgaatcaaagcagcctatcaagctttagaattaaacaatgaatataagccttccaaagtcagcagcaatctgttacacagcagcactgttgaagacaaggactgtttcagaaaaattctctccagaaacagcctccagaagaggattaagcacagcagaaattaatgccgtggaagcaattcatagagctgtggaatttaatcctcatgttccaaaacttttagaatgattccatacccgttagagaaaggacatctattttacccttatcccagctgcacagagacggctgatagagagctattacctacctttcatcatgtttctgtttacccaaaaaaggagcttcctttgttcatccatttcacagcaggattttgctcttctacagcaatgatagccattctcactcaccagtttcctgaaatcatgggtatttttgctaaagctgtgctgggactctggtgcccccaaccctgggcatcctcaggctttgaggagaatacacaggatttgaagtcagaagacctaggtttgagttctggctgagccacgcactgttcatgtgaccttggacaaatcaccaaatttttctgaacagcatctgtaaagtgacagtaacccctacctcacagggttgttgtgaggattacatatatgctaaagcattttgcatatgaaaaagcttcttatgaatattgttattcctaggcaaaccccccttggaagctgtcaaaaaggacaactgtagatgaaattgtcttccttttttcttcattcagcttagcctttctgtttggccagggctacttacaggggctgttggggttgaagtcaagtcaccgcattttggctcctttggtcaaagagaaagaactctaatgtccagctgctccatcgatatactcatagaatggaagtgagcaaaggaaaattttaagccaggatagttaaccgttagggggccagtgggagaatgcttgccttgcatttgcacatccagaatgactaaaacatcttaagtaaatgaggaatagccaccgagatgctcagagataatataagccatgagtgggaagtgggaaaatgagtttgtcaacgccctctcttttctatccctttacctttgaggtcagggacagggcatattactgacaccccactggctattgccctatacctgccaatcacccaaagaaaataatagcttctgagaaagctcaattcactgtagcaactgtgatatatttaccctaataaagccaccacttggtcttttccagtgcttctctcttatggagatcatccctggaatccaaagctctccagttttctaacccagttaagagttaaaaacaaccacaggtcatgagcagtaggcttggcagttacaccccatgcagtcataggagactgctccatcattctcagcacatagggtgcacatctcactatctctggcatgaaccagccttgcgaacttatacagtctcagccactctgctttgatggtaattcttcaccactgatctctcctcaccatgcccttcctgcatccttcccccaaccacccaccagaggagttctggtccccaaaccaaagagttgcctgcaggttggtaatgtgactttgtagatattccttgattaaagccagaccctattggtatcctttttgaagtactggatcgaaatctaattgcttttttttttaattgttggggagaggaggatgagcagaactcctatgcagcctgagagaagttctctatgtgtctgtatatgtacacctctgtgtgtgtgtgtgtaacctcatggttgtgctcaggctgacagggagggcaaagagtgaaaaggaagcatctctttcttgttatccaacattgcttcaaagatgcccaacccccgtagtagcaggcagttcccaagtggagggtcggggcagaggcctccaccaaggccatcaataaccaggtgtgagctacaggtctctgtgtaatgtgaagctctcccgtatttcatttctgcacccagggggcggctctgcaggattgcttacggagaactctgtgtctggcacctctctccacaaggcccaggcgcccagggtcccaccgacctgcccaggaatgcatcacattgttctctggtgctgtaatttggctgcaggagctaggctgaatgcctcccagggatgagaaacatactctccctggcgtcctcccttcgccccagctagcttgagcttctgccctatgaccactgagtgcatttaaataaaaacctcagaaagactgaggaaaaaaaaatcctaattatctctcttctgttaagccatgtagagactcgtgtcctgagtgggtctgagaatttggcaaagacttactggttggtgttcttgataagggaagtgagacaaaggagaagaaattactccctgcaacaggaggaatagaaatgaagcagtgagtgttcagaaatta

SEQ ID NO: 367790 - DNA, 785 bp, Homo sapiens
aagaaagccgagtgatggaatcaccgcggcggccgtcggaaggacccgcccggaaacgccgaccaagagggccccatgtcagttatgcgcgggagtgacgtctcctaacgccagcgcccgcgcccgcgccccaggaagtagggtttgccttagtgactgtatttttaaattcattgacacccaaattctatgtggcacttacagggacctcttcattgatatcaggactaatatttatatttgaatggtggtacttccataagcatggcacatcttttattgagcaagtatctgtaagccatttgcaaccactgatgggaggaacagagagcagcatttcagaaccaggttctccttcgaggaacagagaaaatgaaaccagcagacagaatttgtcaggtgactacttttctaatgtgttttcagagctgtgtatttaagattgagtttggctctgggagatagaaaactcaaaacagcagagtgctgtggtgtgcatgtttgtgtttcccccaaaattctaatcaccaatgtgatgttacgaggtagggtctttgggaggtgatcaggtcatgagggcagtgccctcagggatgtgatgaatgcccttatgagagaccccagagagctgcttgccacttctaccgtgggaggacaccacgagaaggcgccgtctgtgaaccagaaagcagaccctcaccagacaccaaatttgttggtaccttggtcatagacttcccagcctccagaactgttaaaaataaatttatactgtttataatcta

SEQ ID NO: 367791 - DNA, 2034 bp, Homo sapiens
aagaaagccgagtgatggaatcaccgcggcggccgtcggaaggacccgcccggaaacgccgaccaagagggccccatgtcagttatgcgcgggagtgacgtctcctaacgccagcgcccgcgcccgcgccccaggaagtagggtttgccttaggtgatttgaagtctaatatctttcccaatgagttacactcatttcccatccatctaatgggcgctggcagcgtgtttcgattattcttggcttctggcctccatccgaccaaatagctgttgctactcctacaagtttttctggtgcccgttatctccacgacagccgaatccaaagctttaagagctgctcggcagctggaacgatcggtggcttttccaaccccggggggggggcggtgtgaaaggtgaccctcatttcgtttggaagcggtaacacttcggggtcacatctcagtccagttcctccagaataggcgctgctgtccgccccttccctgccccacgaaagaacaggtagccccaatcttgagacacgctcctccaccttcgaaatcttctcggtcccggttccccaggactcagccttcacagaggccaacttcaggtccgccactatcccaggattcccgactcccggtttcctgtccttctcccctcccagctcctggcgcctgcgatagcggcaagatggcggaccgtggcggcgtgggtgaagccgcagctgttggagcgtctcctgcatctgtccctggcctaaacccgacgctaggctggagggagcgactgcgggccgggctggcggggactggggcctcgttgtggttcgtggcggggctggggctgctttacgccctgaggatccctttgaggctgtgtgagaatttggcagcggtgactgtatttttaaattcattgacacccaaattctatgtggcacttacagggacctcttcattgatatcaggactaatatttatatttgaatggtggtacttccataagcatggcacatcttttattgagcaagtatctgtaagccatttgcaaccactgatgggaggaacagagagcagcatttcagaaccaggttctccttcgaggaacagagaaaatgaaaccagcagacagaatttgtcagatacacttgggtgactggtaaagagccacttacatactatgacatgaacctgtcagctcaggaccatcagacctttttcacctgtgacacagattttttacgtccttcagacacagttatgcagaaggcttggagggaaagaaatcctccagctcgaatcaaagcagccacccaccagaggagttctggtccccaaaccaaagagttgcctgcaggttggtaatgtgactttgtagatattccttgattaaagccagaccctattggtatcctttttgaagtactggatcgaaatctaattgcttttttttttaattgttggggagaggaggatgagcagaactcctatgcagcctgagagaagttctctatgtgtctgtatatgtacacctctgtgtgtgtgtgtgtaacctcatggttgtgctcaggctgacagggagggcaaagagtgaaaaggaagcatctctttcttgttatccaacattgcttcaaagatgcccaacccccgtagtagcaggcagttcccaagtggagggtcggggcagaggcctccaccaaggccatcaataaccaggtgtgagctacaggtctctgtgtaatgtgaagctctcccgtatttcatttctgcacccagggggcggctctgcaggattgcttacggagaactctgtgtctggcacctctctccacaaggcccaggcgcccagggtcccaccgacctgcccaggaatgcatcacattgttctctggtgctgtaatttggctgcaggagctaggctgaatgcctcccagggatgagaaacatactctccctggcgtcctcccttcgccccagctagcttgagcttctgccctatgaccactgagtgcatttaaataaaaacctcagaaagactgagg

SEQ ID NO: 367792 - DNA, 2115 bp, Homo sapiens
aagaaagccgagtgatggaatcaccgcggcggccgtcggaaggacccgcccggaaacgccgaccaagagggccccatgtcagttatgcgcgggagtgacgtctcctaacgccagcgcccgcgcccgcgccccaggaagtagggtttgccttaggtgatttgaagtctaatatctttcccaatgagttacactcatttcccatccatctaatgggcgctggcagcgtgtttcgattattcttggcttctggcctccatccgaccaaatagctgttgctactcctacaagtttttctggtgcccgttatctccacgacagccgaatccaaagctttaagagctgctcggcagctggaacgatcggtggcttttccaaccccggggggggggcggtgtgaaaggtgaccctcatttcgtttggaagcggtaacacttcggggtcacatctcagtccagttcctccagaataggcgctgctgtccgccccttccctgccccacgaaagaacaggtagccccaatcttgagacacgctcctccaccttcgaaatcttctcggtcccggttccccaggactcagccttcacagaggccaacttcaggtccgccactatcccaggattcccgactcccggtttcctgtccttctcccctcccagctcctggcgcctgcgatagcggcaagatggcggaccgtggcggcgtgggtgaagccgcagctgttggagcgtctcctgcatctgtccctggcctaaacccgacgctaggctggagggagcgactgcgggccgggctggcggggactggggcctcgttgtggttcgtggcggggctggggctgctttacgccctgaggatccctttgaggctgtgtgagaatttggcagcggtgactgtatttttaaattcattgacacccaaattctatgtggcacttacagggacctcttcattgatatcaggactaatatttatatttgaatggtggtacttccataagcatggcacatcttttattgagcaagtatctgtaagccatttgcaaccactgatgggaggaacagagagcagcatttcagaaccaggttctccttcgaggaacagagaaaatgaaaccagcagacagaatttgtcagaatgtaaggtatggagaaaccctctaaatcttttcagaggagcagaatataggagatacacttgggtgactggtaaagagccacttacatactatgacatgaacctgtcagctcaggaccatcagacctttttcacctgtgacacagattttttacgtccttcagacacagttatgcagaaggcttggagggaaagaaatcctccagctcgaatcaaagcagcctatcaagctttagaattaaacaatgaatataagccttccaaagtcagcagcaatctgttacacagcagcactgttgaagacaaggactgtttcagaaaaattctctccagaaacagcctccagaagaggattaagcacagcagaaattaatgccgtggaagcaattcatagagctgtggaatttaatcctcatgttccaaaatatttattagagatgaaaagtttaattttacctccagaacacattctgaaacggggtgatagtgaagcaattgcctatgctttctttcatcttcagcactggaaacaaatagaaggtgctcttaatctgttacagtgtacatgggaaggcacttttagaatgattccatacccgttagagaaaggacatctattttacccttatcccagctgcacagagacggctgatagagagctattacctacctttcatcatgtttctgtttacccaaaaaaggagcttcctttgttcatccatttcacagcaggattttgctcttctacagcaatgatagccattctcactcaccagtttcctgaaatcatgggtatttttgctaaagctgtaagtatgatctcaaggacttgtgtagattatttgtaaaacacacaagaaaccatctctgatctgcctgtgctaacccagctgaacaatggaagatatttgttgtaaattaaaggaattgatttgtatatagttgctgccataaatacatcaaacataaatttttggtga

SEQ ID NO: 367793 - DNA, 1981 bp, Homo sapiens
aagaaagccgagtgatggaatcaccgcggcggccgtcggaaggacccgcccggaaacgccgaccaagagggccccatgtcagttatgcgcgggagtgacgtctcctaacgccagcgcccgcgcccgcgccccaggaagtagggtttgccttaggtgatttgaagtctaatatctttcccaatgagttacactcatttcccatccatctaatgggcgctggcagcgtgtttcgattattcttggcttctggcctccatccgaccaaatagctgttgctactcctacaagtttttctggtgcccgttatctccacgacagccgaatccaaagctttaagagctgctcggcagctggaacgatcggtggcttttccaaccccggggggggggcggtgtgaaaggtgaccctcatttcgtttggaagcggtaacacttcggggtcacatctcagtccagttcctccagaataggcgctgctgtccgccccttccctgccccacgaaagaacaggtagccccaatcttgagacacgctcctccaccttcgaaatcttctcggtcccggttccccaggactcagccttcacagaggccaacttcaggtccgccactatcccaggattcccgactcccggtttcctgtccttctcccctcccagctcctggcgcctgcgatagcggcaagatggcggaccgtggcggcgtgggtgaagccgcagctgttggagcgtctcctgcatctgtccctggcctaaacccgacgctaggctggagggagcgactgcgggccgggctggcggggactggggcctcgttgtggttcgtggcggggctggggctgctttacgccctgaggatccctttgaggctgtgtgagaatttggcagcggatatttgaatggtggtacttccataagcatggcacatcttttattgagcaagtatctgtaagccatttgcaaccactgatgggaggaacagagagcagcatttcagaaccaggttctccttcgaggaacagagaaaatgaaaccagcagacagaatttgtcagatggaatttcactcttgttgcccaggctggagtgcaatgtcgcgatcttggctcactgcaacctccacctcccgggttcaagcgattctcctgccccagcctcccgagtagctgggattacaagcacctgccaccatgccagagtaatttttgtatttttagtagagatgggttttcgccatgttggccagactggtctcaaacccctgacctcagatgattcatccacctcggctcccaaagtgctgggattacaggcatgagccaccaggcctggcccattctgtcttcttttctttcaacattcatagccccatatctaggcccttaaacatctcttcccttggctattgctatagtatcctaagtggtttcccttcctcttacacttccccttctagtacatactctctccttactaggtaaaaaaaaaagtggttctcaaactttttagactaagaaatcctttacattcttaaaaaattatccaggacctcaaagagcctttgtttaaatgtggactatatccatcaatatttatcatattagaaattaaagcaggaaatttaaaaatattttaatagtagtaaatccattacgtgttaacatgttgtagactgaaatgtgtcccccaaaattcacatgttgaaactctaacctctaatgtaactgtattaggagctagggtttttaggagataatcaaggttaaatgaggggatcctaatctgatagtattgatggctttgtaagaagaagagagggattgctgtctctctgccatgcaaagacacagtgagaagactgctctctgaaggccaggaggagagccctcaccagagcccaaccattctagtaccttgatcttggacttccaaccttcagattgtgagaaaataaatttctgttgttaagccactcaaaaaaaaaa

SEQ ID NO: 367794 - DNA, 408 bp, Homo sapiens
cagaactacatctcccagcaggccccagggtagcctgcagcgtccctggctggcccctgcccccggaggctcatgggaattgtagtttgtttagcctggttttgccctgcctctaattatagtggcagcatgccggtgtaaaatcgttccccctctcggggcctcagttgctacttctgtaaagtcagcctcactcagcagaagcaatgtactgagtcctgtggactcaatagccagccttcctggaatcttggccgtccaggttatggagaaaccttgaggagttagttgacctcttagttgcctcaagtgttgaatggagtgaatgctatttattactggtttcataggtagatagaaggactaaatgtgataaaatgtgaaatgtatttaatgtgaggcctgaca

SEQ ID NO: 367795 - DNA, 485 bp, Homo sapiens
tacgttgagtccatttttaatgttctgggtgccctgtcaggtgatcagaacattaaaaatggactcaacgtaaaataatcttctggacccttctaggacgacatggccgtgaccggtagtgctagaaaccagtcttcgagcccccagtgccacaccatgtccccccacctgcatacctgtggtctccccctgccaggcaccctgtgctgggcacagggacatccctgccaggcctagagggccttgtgtttttaaggcagtcaaatcttgcagcctggttcagtgccagctccaagggctattgggtagctgcaagggtcaattatgcattcctgtgagtcaggtttttccaacccaggcccttgactctgccctgagcttgcagctggatacaaagtgcaaaaaagcttggctccttctgtattctttaaaaacaaaacaacaacaaaaaaaaactgtaaaaacagcctccatgtccacgccct

SEQ ID NO: 367796 - DNA, 718 bp, Homo sapiens
gggacagtgggctcccaggggaatgcaggttgaccacatctggctcctgccaggcaacgagcagcatctggcagagtaaggggccaacgcccatgggggatggaccctctcagttcttgggaattctgccccaaaagtcctttccctggggtctcagagggcccccgtccttcccttcttggtgtcactgtggcccctcactgctcttttcctattcaaacctgagtcccaccaggcccagggcttcacctgctgagctgttgtgtccttgcctgtgacgaggcctggccaggggtgcaggagcagaaggtggggagggttatagacgctgcaaaggccaagagaacatctgagagtggcagctggtgacctggccagaggggctggtgaggggcagagaacctggctagaggctgggtccctcaggtggtcctctcaggtgggaggcgagcagcaggtgtgggtgaggggaaggttctgatgacagctgccccccccacccccaccccggctcctgcaggccgaccttattgctgtgctctgggcttgggggcggctgaggtgcccctctgtcctccagcagggcacgagtgacctgagaggcccactcaggcagaagagacgcaagctgggccgtccaactggtttcaactgccagctttaccaatgcagcatttattttaaaattaaattaaattaaaaaaaaaagattgcatca

SEQ ID NO: 367797 - DNA, 6116 bp, Homo sapiens
ggaagatggcggcgggaacctggtcgccgtgccgccgcgccgccgccgcggagcgaaccaggggtgtccggggtgcgcggtccaggccggggccgggccatgagcgcgccgtcctcgagtccccgagccgcggagcccgcccgcgcccctcgggccgccccgcgtccctcgccatggcgcggctcgcggactacttcgtgctggtggcgttcgggccgcacccgcgcgggagtggggaaggccaggccagattctgcagcgcttcccagagaaggactgggaggacaacccattcccccagggcatcgagctgttttgccagcccagcgggtggcagctgtgtcccgagaggaatccaccgaccttctttgttgctgtcctcaccgacatcaactccgagcgccactactgcgcctgcttgaccttctgggagccagcggagccttcacaggaaacgacgcgcgtggaggatgccacagagagggaggaagagggggatgagggaggccagacccacctgtctcccacagcacctgccccatctgcccagctgtttgcaccgaagacgctggtactggtgtcgcgactcgaccacacggaggtgttcaggaacagccttggcctcatctatgccatccacgtggagggcctgaatgtgtgcctggagaacgtgattgggaacctgctgacgtgcactgtgcccctggctgggggctcgcagaggacgatctctttgggggctggtgaccggcaggtcatccagactccactggccgactcgctgcccgtcagccgctgcagcgtggccctgctcttccgccagctaggcatcaccaacgtgctgtctttgttctgtgccgccctcacggagcacaaggttctcttcctgtcccggagctaccagcggctcgccgatgcctgtaggggcctcctggcactgctgtttcctctcagatacagcttcacctatgtgcccatcctgccggctcagctgctggaggtcctcagcacacccacgcccttcatcattggggtcaacgcggccttccaggcagagacccaggagctgctcgatgtgattgttgctgatctggatggagggacggtcaccattcctgagtgtgtgcacattccacccttgccagagccactgcagagtcagacgcacagtgtgctgagcatggtcctggacccggagctggagttggctgacctcgccttccctccgcccacgacatccacctcctccctgaagatgcaggacaaggagctgcgcgcggtcttcctgcggctgttcgctcagctgctgcagggctatcgctggtgcctgcacgtcgtgcgcatccacccggagcctgtcatccgcttccataaggcagccttcctgggccagcgtgggctggtagaggacgatttcctgatgaaggtgctggagggcatggcctttgctggctttgtgtcagagcgtggggtcccataccgccctacggacctgttcgatgagctggtggcccacgaggtggcaaggatgcgggcggatgagaaccacccccagcgtgtcctgcgtcacgtccaggaactggcagagcagctctacaagaacgagaacccgtacccagccgtggcgatgcacaaggtacagaggcccggtgagagcagccacctgcgacgggtgccccgacccttcccccggctggatgagggcaccgtgcagtggatcgtggaccaggctgcagccaagatgcagggtgcacccccagctgtgaaggccgagaggaggaccaccgtgccctcagggccccccatgactgccatactggagcggtgcagtgggctgcatgtcaacagcgcccggcggctggaggttgtgcgcaactgcatctcctacgtgtttgaggggaaaatgcttgaggccaagaagctgctcccagccgtgttgagggccctgaaggggcgagctgcccgccgctgcctcgcccaggagctgcacctgcatgtgcagcagaaccgtgcggtcctggaccaccagcagtttgactttgtcgtccgtatgatgaactgctgcctgcaggactgcacttctctggacgagcatggcattgcggcggctctgctgcctctggtcacagccttctgccggaagctgagcccgggggtgacgcagtttgcatacagctgtgtgcaggagcacgtggtgtggagcacgccacagttctgggaggccatgttctatggggatgtgcagactcacatccgggccctctacctggagcccacggaggacctggcccccgcccaggaggttggggaggcaccttcccaggaggacgagcgctctgccctagacgtggcttctgagcagcggcgcttgtggccaactctgagtcgtgagaagcagcaggagctggtgcagaaggaggagagcacggtgttcagccaggccatccactatgccaaccgcatgagctacctcctcctgcccctggacagcagcaagagccgcctacttcgggagcgtgccgggctgggcgacctggagagcgccagcaacagcctggtcaccaacagcatggctggcagtgtggccgagagctatgacacggagagcggcttcgaggatgcagagacctgcgacgtagctggggctgtggtccgcttcatcaaccgctttgtggacaaggtctgcacggagagtggggtcaccagcgaccacctcaaggggctgcatgtcatggtgccagacattgtccagatgcacatcgagaccctggaggccgtgcagcgggagagccggaggctgccgcccatccagaagcccaagctgctgcggccgcgcctgctgccgggtgaggagtgtgtgctggacggcctgcgcgtctacctgctgccggatgggcgtgaggagggcgcggggggcagtgctgggggaccagcattgctcccagctgagggcgccgtcttcctcaccacgtaccgggtcatcttcacggggatgcccacggaccccctggttggggagcaggtggtggtccgctccttcccggtggctgcgctgaccaaggagaagcgcatcagcgtccagacccctgtggaccagctcctgcaggacgggctccagctgcgctcctgcacattccagctgctgaaaatggcctttgacgaggaggtggggtctgacagcgccgagctcttccgtaagcagctgcataagctgcggtacccgccggacatcagggccacctttgcgttcaccttgggctctgcccacacacctggccggccaccgcgagtcaccaaggacaagggtccttccctcagaaccctgtcccggaacctggtcaagaacgccaagaagaccatcgggcggcagcatgtcactcgcaagaagtacaacccccccagctgggagcaccggggccagccgccccctgaggaccaggaggacgagatctcagtgtcggaggagctggagcccagcacgctgaccccgtcctcagccctgaagccctccgaccgcatgaccatgagcagcctggtggaaagggcttgctgtcgcgactaccagcgcctcggtctgggcaccctgagcagcagcctgagccgggccaagtctgagcccttccgcatttctccggtcaaccgcatgtatgccatctgccgcagctacccagggctgctgatcgtgccccagagtgtccaggacaacgccctgcagcgcgtgtcccgctgctaccgccagaaccgcttccccgtggtctgctggcgcagcgggcggtccaaggcggtgctgctgcgctctggaggcctgcatggcaaaggtgtcgtcggcctcttcaaggcccagaacgcaccttctccaggccagtcccaggcggactcgagtagcctggagcaggagaagtacctgcaggctgtggtcagctccatgccccgctacgccgacgcgtcgggacgcaacacgcttagcggcttctcctcagcccacatgggcagtcacggtaagtggggcagtgtccggaccagtggacgcagcagtggccttggcaccgatgtgggctcccggctagctggcagagacgcgctggccccaccccaggccaacgggggccctcccgacccgggcttcctgcgtccgcagcgagcagccctctatatccttggggacaaagcccagctcaagggtgtgcggtcagaccccctgcagcagtgggagctggtgcccattgaggtattcgaggcacggcaggtgaaggctagcttcaagaagctgctgaaagcatgtgtcccaggctgccccgctgctgagcccagcccagcctccttcctgcgctcactggaggactcagagtggctgatccagatccacaagctgctgcaggtgtctgtgctggtggtggagctcctggattcaggctcctccgtgctggtgggcctggaggatggctgggacatcaccacccaggtggtatccttggtgcagctgctctcagaccccttctaccgcacgctggagggctttcgcctgctggtggagaaggagtggctgtccttcggccatcgcttcagccaccgtggagctcacaccctggccgggcagagcagcggcttcacacccgtcttcctgcagttcctggactgcgtacaccaggtccacctgcagttccccatggagtttgagttcagccagttctacctcaagttcctcggctaccaccatgtgtcccgccgtttccggaccttcctgctcgactctgactatgagcgcattgagctggggctgctgtatgaggagaagggggaacgcaggggccaggtgccgtgcaggtctgtgtgggagtatgtggaccggctgagcaagaggacgcctgtgttccacaattacatgtatgcgcccgaggacgcagaggtcctgcggccctacagcaacgtgtccaacctgaaggtgtgggacttctacactgaggagacgctggccgagggccctccctatgactgggaactggcccaggggccccctgaacccccagaggaagaacggtctgatggaggcgctccccagagcaggcgccgcgtggtgtggccctgttacgacagctgcccgcgggcccagcctgacgccatctcacgcctgctggaggagctgcagaggctggagacagagttgggccaacccgctgagcgctggaaggacacctgggaccgggtgaaggctgcacagcgcctcgagggccggccagacggccgtggcacccctagctccctccttgtgtccaccgcaccccaccaccgtcgctcgctgggtgtgtacctgcaggaggggcccgtgggctccaccctgagcctcagcctggacagcgaccagagtagtggctcaaccacatccggctcccgtcaggctgcccgccgcagcaccagcaccctgtacagccagttccagacagcagagagtgagaacaggtcctacgagggcactctgtacaagaagggggccttcatgaagccttggaaggcccgctggttcgtgctggacaagaccaagcaccagctgcgctactacgaccaccgtgtggacacagagtgcaagggtgtcatcgacttggcggaggtggaggctgtggcacctggcacgcccactatgggtgcccctaagactgtggacgagaaggccttctttgacgtgaagacaacgcgtcgcgtttacaacttctgtgcccaggacgtgccctcggcccagcagtgggtggaccggatccagagctgcctgtcggacgcctgagcctcccagccctgcccggctgctctgcttccggtcgttaccgaccactaggggtgggcagggccgccccggccatgtttacagccccggccctcgacagtattgaggccccgagcccccagcacttgtgtgtacagcccccgtccccgccccgccccgcccggccggccctaacttattttggcgtcacagctgagcaccgtgccgggaggtggccaaggtacagcccgcaatgggcctgtaaatagtccggccccgtcagcgtgtgctggtccagccagcggctgcaggcgagtttctagaaccagagtctatataaagagagaactaacgccaaaaa

SEQ ID NO: 367798 - DNA, 5595 bp, Homo sapiens
atcatcagacacctgcaccagtctggcctgctgtttgcaccgaggacgctgtttctgatgttcttacttggaaaaaccctggtgtcaggaacagccttggcctcatctatgccatccacgtggagggcctgaatgtgtgcctggagaacgtgattgggaacctgctgacgtgcactgtgcccctggctgggggctcgcagaggacgatctctttgggggctggtgaccggcaggtcatccagactccactggccgactcgctgcccgtcagccgctgcagcgtggccctgctcttccgccagctaggcatcaccaacgtgctgtctttgttctgtgccgccctcacggagcacaaggttctcttcctgtcccggagctaccagcggctcgccgatgcctgtaggggcctcctggcactgctgtttcctctcagatacagcttcacctatgtgcccatcctgccggctcagctgctggaggtcctcagcacacccacgcccttcatcattggggtcaacgcggccttccaggcagagacccaggagctgctcgatgtgattgttgctgatctggatggagggacggtcaccattcctgagtgtgtgcacattccacccttgccagagccactgcagagtcagacgcacagtgtgctgagcatggtcctggacccggagctggagttggctgacctcgccttccctccgcccacgacatccacctcctccctgaagatgcaggacaaggagctgcgcgcggtcttcctgcggctgttcgctcagctgctgcagggctatcgctggtgcctgcacgtcgtgcgcatccacccggagcctgtcatccgcttccataaggcagccttcctgggccagcgtgggctggtagaggacgatttcctgatgaaggtgctggagggcatggcctttgctggctttgtgtcagagcgtggggtcccataccgccctacggacctgttcgatgagctggtggcccacgaggtggcaaggatgcgggcggatgagaaccacccccagcgtgtcctgcgtcacgtccaggaactggcagagcagctctacaagaacgagaacccgtacccagccgtggcgatgcacaaggtacagaggcccggtgagagcagccacctgcgacgggtgccccgacccttcccccggctggatgagggcaccgtgcagtggatcgtggaccaggctgcagccaagatgcagggtgcacccccagctgtgaaggccgagaggaggaccaccgtgccctcagggccccccatgactgccatactggagcggtgcagtgggctgcatgtcaacagcgcccggcggctggaggttgtgcgcaactgcatctcctacgtgtttgaggggaaaatgcttgaggccaagaagctgctcccagccgtgttgagggccctgaaggggcgagctgcccgccgctgcctcgcccaggagctgcacctgcatgtgcagcagaaccgtgcggtcctggaccaccagcagtttgactttgtcgtccgtatgatgaactgctgcctgcaggactgcacttctctggacgagcatggcattgcggcggctctgctgcctctggtcacagccttctgccggaagctgagcccgggggtgacgcagtttgcatacagctgtgtgcaggagcacgtggtgtggagcacgccacagttctgggaggccatgttctatggggatgtgcagactcacatccgggccctctacctggagcccacggaggacctggcccccgcccaggaggttggggaggcaccttcccaggaggacgagcgctctgccctagacgtggcttctgagcagcggcgcttgtggccaactctgagtcgtgagaagcagcaggagctggtgcagaaggaggagagcacggtgttcagccaggccatccactatgccaaccgcatgagctacctcctcctgcccctggacagcagcaagagccgcctacttcgggagcgtgccgggctgggcgacctggagagcgccagcaacagcctggtcaccaacagcatggctggcagtgtggccgagagctatgacacggagagcggcttcgaggatgcagagacctgcgacgtagctggggctgtggtccgcttcatcaaccgctttgtggacaaggtctgcacggagagtggggtcaccagcgaccacctcaaggggctgcatgtcatggtgccagacattgtccagatgcacatcgagaccctggaggccgtgcagcgggagagccggaggctgccgcccatccagaagcccaagctgctgcggccgcgcctgctgccgggtgaggagtgtgtgctggacggcctgcgcgtctacctgctgccggatgggcgtgaggagggcgcggggggcagtgctgggggaccagcattgctcccagctgagggcgccgtcttcctcaccacgtaccgggtcatcttcacggggatgcccacggaccccctggttggggagcaggtggtggtccgctccttcccggtggctgcgctgaccaaggagaagcgcatcagcgtccagacccctgtggaccagctcctgcaggacgggctccagctgcgctcctgcacattccagctgctgaaaatggcctttgacgaggaggtggggtctgacagcgccgagctcttccgtaagcagctgcataagctgcggtacccgccggacatcagggccacctttgcgttcaccttgggctctgcccacacacctggccggccaccgcgagtcaccaaggacaagggtccttccctcagaaccctgtcccggaacctggtcaagaacgccaagaagaccatcgggcggcagcatgtcactcgcaagaagtacaacccccccagctgggagcaccggggccagccgccccctgaggaccaggaggacgagatctcagtgtcggaggagctggagcccagcacgctgaccccgtcctcagccctgaagccctccgaccgcatgaccatgagcagcctggtggaaagggcttgctgtcgcgactaccagcgcctcggtctgggcaccctgagcagcagcctgagccgggccaagtctgagcccttccgcatttctccggtcaaccgcatgtatgccatctgccgcagctacccagggctgctgatcgtgccccagagtgtccaggacaacgccctgcagcgcgtgtcccgctgctaccgccagaaccgcttccccgtggtctgctggcgcagcgggcggtccaaggcggtgctgctgcgctctggaggcctgcatggcaaaggtgtcgtcggcctcttcaaggcccagaacgcaccttctccaggccagtcccaggcggactcgagtagcctggagcaggagaagtacctgcaggctgtggtcagctccatgccccgctacgccgacgcgtcgggacgcaacacgcttagcggcttctcctcagcccacatgggcagtcacggtaagtggggcagtgtccggaccagtggacgcagcagtggccttggcaccgatgtgggctcccggctagctggcagagacgcgctggccccaccccaggccaacgggggccctcccgacccgggcttcctgcgtccgcagcgagcagccctctatatccttggggacaaagcccagctcaagggtgtgcggtcagaccccctgcagcagtgggagctggtgcccattgaggtattcgaggcacggcaggtgaaggctagcttcaagaagctgctgaaagcatgtgtcccaggctgccccgctgctgagcccagcccagcctccttcctgcgctcactggaggactcagagtggctgatccagatccacaagctgctgcaggtgtctgtgctggtggtggagctcctggattcaggctcctccgtgctggtgggcctggaggatggctgggacatcaccacccaggtggtatccttggtgcagctgctctcagaccccttctaccgcacgctggagggctttcgcctgctggtggagaaggagtggctgtccttcggccatcgcttcagccaccgtggagctcacaccctggccgggcagagcagcggcttcacacccgtcttcctgcagttcctggactgcgtacaccaggtccacctgcagttccccatggagtttgagttcagccagttctacctcaagttcctcggctaccaccatgtgtcccgccgtttccggaccttcctgctcgactctgactatgagcgcattgagctggggctgctgtatgaggagaagggggaacgcaggggccaggtgccgtgcaggtctgtgtgggagtatgtggaccggctgagcaagaggacgcctgtgttccacaattacatgtatgcgcccgaggacgcagaggtcctgcggccctacagcaacgtgtccaacctgaaggtgtgggacttctacactgaggagacgctggccgagggccctccctatgactgggaactggcccaggggccccctgaacccccagaggaagaacggtctgatggaggcgctccccagagcaggcgccgcgtggtgtggccctgttacgacagctgcccgcgggcccagcctgacgccatctcacgcctgctggaggagctgcagaggctggagacagagttgggccaacccgctgagcgctggaaggacacctgggaccgggtgaaggctgcacagcgcctcgagggccggccagacggccgtggcacccctagctccctccttgtgtccaccgcaccccaccaccgtcgctcgctgggtgtgtacctgcaggaggggcccgtgggctccaccctgagcctcagcctggacagcgaccagagtagtggctcaaccacatccggctcccgtcaggctgcccgccgcagcaccagcaccctgtacagccagttccagacagcagagagtgagaacaggtcctacgagggcactctgtacaagaagggggccttcatgaagccttggaaggcccgctggttcgtgctggacaagaccaagcaccagctgcgctactacgaccaccgtgtggacacagagtgcaagggtgtcatcgacttggcggaggtggaggctgtggcacctggcacgcccactatgggtgcccctaagactgtggacgagaaggccttctttgacgtgaagacaacgcgtcgcgtttacaacttctgtgcccaggacgtgccctcggcccagcagtgggtggaccggatccagagctgcctgtcggacgcctgagcctcccagccctgcccggctgctctgcttccggtcgttaccgaccactaggggtgggcagggccgccccggccatgtttacagccccggccctcgacagtattgaggccccgagcccccagcacttgtgtgtacagcccccgtccccgccccgccccgcccggccggccctaacttattttggcgtcacagctgagcaccgtgccgggaggtggccaaggtacagcccgcaatgggcctgtaaatagtccggccccgtcagcgtgtgctggtccagccagcggctgcaggcgagtttctagaaccagagtctatataaagagagaactaacgccaaaaa

SEQ ID NO: 367799 - DNA, 5326 bp, Homo sapiens
gcccagggtcctctccaagcttctcttcttcctttaggcatcaccaacgtgctgtctttgttctgtgccgccctcacggagcacaaggttctcttcctgtcccggagctaccagcggctcgccgatgcctgtaggggcctcctggcactgctgtttcctctcagatacagcttcacctatgtgcccatcctgccggctcagctgctggaggtcctcagcacacccacgcccttcatcattggggtcaacgcggccttccaggcagagacccaggagctgctcgatgtgattgttgctgatctggatggagggacggtcaccattcctgagtgtgtgcacattccacccttgccagagccactgcagagtcagacgcacagtgtgctgagcatggtcctggacccggagctggagttggctgacctcgccttccctccgcccacgacatccacctcctccctgaagatgcaggacaaggagctgcgcgcggtcttcctgcggctgttcgctcagctgctgcagggctatcgctggtgcctgcacgtcgtgcgcatccacccggagcctgtcatccgcttccataaggcagccttcctgggccagcgtgggctggtagaggacgatttcctgatgaaggtgctggagggcatggcctttgctggctttgtgtcagagcgtggggtcccataccgccctacggacctgttcgatgagctggtggcccacgaggtggcaaggatgcgggcggatgagaaccacccccagcgtgtcctgcgtcacgtccaggaactggcagagcagctctacaagaacgagaacccgtacccagccgtggcgatgcacaaggtacagaggcccggtgagagcagccacctgcgacgggtgccccgacccttcccccggctggatgagggcaccgtgcagtggatcgtggaccaggctgcagccaagatgcagggtgcacccccagctgtgaaggccgagaggaggaccaccgtgccctcagggccccccatgactgccatactggagcggtgcagtgggctgcatgtcaacagcgcccggcggctggaggttgtgcgcaactgcatctcctacgtgtttgaggggaaaatgcttgaggccaagaagctgctcccagccgtgttgagggccctgaaggggcgagctgcccgccgctgcctcgcccaggagctgcacctgcatgtgcagcagaaccgtgcggtcctggaccaccagcagtttgactttgtcgtccgtatgatgaactgctgcctgcaggactgcacttctctggacgagcatggcattgcggcggctctgctgcctctggtcacagccttctgccggaagctgagcccgggggtgacgcagtttgcatacagctgtgtgcaggagcacgtggtgtggagcacgccacagttctgggaggccatgttctatggggatgtgcagactcacatccgggccctctacctggagcccacggaggacctggcccccgcccaggaggttggggaggcaccttcccaggaggacgagcgctctgccctagacgtggcttctgagcagcggcgcttgtggccaactctgagtcgtgagaagcagcaggagctggtgcagaaggaggagagcacggtgttcagccaggccatccactatgccaaccgcatgagctacctcctcctgcccctggacagcagcaagagccgcctacttcgggagcgtgccgggctgggcgacctggagagcgccagcaacagcctggtcaccaacagcatggctggcagtgtggccgagagctatgacacggagagcggcttcgaggatgcagagacctgcgacgtagctggggctgtggtccgcttcatcaaccgctttgtggacaaggtctgcacggagagtggggtcaccagcgaccacctcaaggggctgcatgtcatggtgccagacattgtccagatgcacatcgagaccctggaggccgtgcagcgggagagccggaggctgccgcccatccagaagcccaagctgctgcggccgcgcctgctgccgggtgaggagtgtgtgctggacggcctgcgcgtctacctgctgccggatgggcgtgaggagggcgcggggggcagtgctgggggaccagcattgctcccagctgagggcgccgtcttcctcaccacgtaccgggtcatcttcacggggatgcccacggaccccctggttggggagcaggtggtggtccgctccttcccggtggctgcgctgaccaaggagaagcgcatcagcgtccagacccctgtggaccagctcctgcaggacgggctccagctgcgctcctgcacattccagctgctgaaaatggcctttgacgaggaggtggggtctgacagcgccgagctcttccgtaagcagctgcataagctgcggtacccgccggacatcagggccacctttgcgttcaccttgggctctgcccacacacctggccggccaccgcgagtcaccaaggacaagggtccttccctcagaaccctgtcccggaacctggtcaagaacgccaagaagaccatcgggcggcagcatgtcactcgcaagaagtacaacccccccagctgggagcaccggggccagccgccccctgaggaccaggaggacgagatctcagtgtcggaggagctggagcccagcacgctgaccccgtcctcagccctgaagccctccgaccgcatgaccatgagcagcctggtggaaagggcttgctgtcgcgactaccagcgcctcggtctgggcaccctgagcagcagcctgagccgggccaagtctgagcccttccgcatttctccggtcaaccgcatgtatgccatctgccgcagctacccagggctgctgatcgtgccccagagtgtccaggacaacgccctgcagcgcgtgtcccgctgctaccgccagaaccgcttccccgtggtctgctggcgcagcgggcggtccaaggcggtgctgctgcgctctggaggcctgcatggcaaaggtgtcgtcggcctcttcaaggcccagaacgcaccttctccaggccagtcccaggcggactcgagtagcctggagcaggagaagtacctgcaggctgtggtcagctccatgccccgctacgccgacgcgtcgggacgcaacacgcttagcggcttctcctcagcccacatgggcagtcacggtaagtggggcagtgtccggaccagtggacgcagcagtggccttggcaccgatgtgggctcccggctagctggcagagacgcgctggccccaccccaggccaacgggggccctcccgacccgggcttcctgcgtccgcagcgagcagccctctatatccttggggacaaagcccagctcaagggtgtgcggtcagaccccctgcagcagtgggagctggtgcccattgaggtattcgaggcacggcaggtgaaggctagcttcaagaagctgctgaaagcatgtgtcccaggctgccccgctgctgagcccagcccagcctccttcctgcgctcactggaggactcagagtggctgatccagatccacaagctgctgcaggtgtctgtgctggtggtggagctcctggattcaggctcctccgtgctggtgggcctggaggatggctgggacatcaccacccaggtggtatccttggtgcagctgctctcagaccccttctaccgcacgctggagggctttcgcctgctggtggagaaggagtggctgtccttcggccatcgcttcagccaccgtggagctcacaccctggccgggcagagcagcggcttcacacccgtcttcctgcagttcctggactgcgtacaccaggtccacctgcagttccccatggagtttgagttcagccagttctacctcaagttcctcggctaccaccatgtgtcccgccgtttccggaccttcctgctcgactctgactatgagcgcattgagctggggctgctgtatgaggagaagggggaacgcaggggccaggtgccgtgcaggtctgtgtgggagtatgtggaccggctgagcaagaggacgcctgtgttccacaattacatgtatgcgcccgaggacgcagaggtcctgcggccctacagcaacgtgtccaacctgaaggtgtgggacttctacactgaggagacgctggccgagggccctccctatgactgggaactggcccaggggccccctgaacccccagaggaagaacggtctgatggaggcgctccccagagcaggcgccgcgtggtgtggccctgttacgacagctgcccgcgggcccagcctgacgccatctcacgcctgctggaggagctgcagaggctggagacagagttgggccaacccgctgagcgctggaaggacacctgggaccgggtgaaggctgcacagcgcctcgagggccggccagacggccgtggcacccctagctccctccttgtgtccaccgcaccccaccaccgtcgctcgctgggtgtgtacctgcaggaggggcccgtgggctccaccctgagcctcagcctggacagcgaccagagtagtggctcaaccacatccggctcccgtcaggctgcccgccgcagcaccagcaccctgtacagccagttccagacagcagagagtgagaacaggtcctacgagggcactctgtacaagaagggggccttcatgaagccttggaaggcccgctggttcgtgctggacaagaccaagcaccagctgcgctactacgaccaccgtgtggacacagagtgcaagggtgtcatcgacttggcggaggtggaggctgtggcacctggcacgcccactatgggtgcccctaagactgtggacgagaaggccttctttgacgtgaagacaacgcgtcgcgtttacaacttctgtgcccaggacgtgccctcggcccagcagtgggtggaccggatccagagctgcctgtcggacgcctgagcctcccagccctgcccggctgctctgcttccggtcgttaccgaccactaggggtgggcagggccgccccggccatgtttacagccccggccctcgacagtattgaggccccgagcccccagcacttgtgtgtacagcccccgtccccgccccgccccgcccggccggccctaacttattttggcgtcacagctgagcaccgtgccgggaggtggccaaggtacagcccgcaatgggcctgtaaatagtccggccccgtcagcgtgtgctggtccagccagcggctgcaggcgagtttctagaaccagagtctatataaagagagaactaacgccaaaaa

SEQ ID NO: 367800 - DNA, 4852 bp, Homo sapiens
actcctggatctgagtctggtcgaacatggagaagacgctggagcttccgccctctactgtccttctcttggccctcttgggtgccatgtcttcagtctccggggggcaaggcagccttcctgggccagcgtgggctggtagaggacgatttcctgatgaaggtgctggagggcatggcctttgctggctttgtgtcagagcgtggggtcccataccgccctacggacctgttcgatgagctggtggcccacgaggtggcaaggatgcgggcggatgagaaccacccccagcgtgtcctgcgtcacgtccaggaactggcagagcagctctacaagaacgagaacccgtacccagccgtggcgatgcacaaggtacagaggcccggtgagagcagccacctgcgacgggtgccccgacccttcccccggctggatgagggcaccgtgcagtggatcgtggaccaggctgcagccaagatgcagggtgcacccccagctgtgaaggccgagaggaggaccaccgtgccctcagggccccccatgactgccatactggagcggtgcagtgggctgcatgtcaacagcgcccggcggctggaggttgtgcgcaactgcatctcctacgtgtttgaggggaaaatgcttgaggccaagaagctgctcccagccgtgttgagggccctgaaggggcgagctgcccgccgctgcctcgcccaggagctgcacctgcatgtgcagcagaaccgtgcggtcctggaccaccagcagtttgactttgtcgtccgtatgatgaactgctgcctgcaggactgcacttctctggacgagcatggcattgcggcggctctgctgcctctggtcacagccttctgccggaagctgagcccgggggtgacgcagtttgcatacagctgtgtgcaggagcacgtggtgtggagcacgccacagttctgggaggccatgttctatggggatgtgcagactcacatccgggccctctacctggagcccacggaggacctggcccccgcccaggaggttggggaggcaccttcccaggaggacgagcgctctgccctagacgtggcttctgagcagcggcgcttgtggccaactctgagtcgtgagaagcagcaggagctggtgcagaaggaggagagcacggtgttcagccaggccatccactatgccaaccgcatgagctacctcctcctgcccctggacagcagcaagagccgcctacttcgggagcgtgccgggctgggcgacctggagagcgccagcaacagcctggtcaccaacagcatggctggcagtgtggccgagagctatgacacggagagcggcttcgaggatgcagagacctgcgacgtagctggggctgtggtccgcttcatcaaccgctttgtggacaaggtctgcacggagagtggggtcaccagcgaccacctcaaggggctgcatgtcatggtgccagacattgtccagatgcacatcgagaccctggaggccgtgcagcgggagagccggaggctgccgcccatccagaagcccaagctgctgcggccgcgcctgctgccgggtgaggagtgtgtgctggacggcctgcgcgtctacctgctgccggatgggcgtgaggagggcgcggggggcagtgctgggggaccagcattgctcccagctgagggcgccgtcttcctcaccacgtaccgggtcatcttcacggggatgcccacggaccccctggttggggagcaggtggtggtccgctccttcccggtggctgcgctgaccaaggagaagcgcatcagcgtccagacccctgtggaccagctcctgcaggacgggctccagctgcgctcctgcacattccagctgctgaaaatggcctttgacgaggaggtggggtctgacagcgccgagctcttccgtaagcagctgcataagctgcggtacccgccggacatcagggccacctttgcgttcaccttgggctctgcccacacacctggccggccaccgcgagtcaccaaggacaagggtccttccctcagaaccctgtcccggaacctggtcaagaacgccaagaagaccatcgggcggcagcatgtcactcgcaagaagtacaacccccccagctgggagcaccggggccagccgccccctgaggaccaggaggacgagatctcagtgtcggaggagctggagcccagcacgctgaccccgtcctcagccctgaagccctccgaccgcatgaccatgagcagcctggtggaaagggcttgctgtcgcgactaccagcgcctcggtctgggcaccctgagcagcagcctgagccgggccaagtctgagcccttccgcatttctccggtcaaccgcatgtatgccatctgccgcagctacccagggctgctgatcgtgccccagagtgtccaggacaacgccctgcagcgcgtgtcccgctgctaccgccagaaccgcttccccgtggtctgctggcgcagcgggcggtccaaggcggtgctgctgcgctctggaggcctgcatggcaaaggtgtcgtcggcctcttcaaggcccagaacgcaccttctccaggccagtcccaggcggactcgagtagcctggagcaggagaagtacctgcaggctgtggtcagctccatgccccgctacgccgacgcgtcgggacgcaacacgcttagcggcttctcctcagcccacatgggcagtcacggtaagtggggcagtgtccggaccagtggacgcagcagtggccttggcaccgatgtgggctcccggctagctggcagagacgcgctggccccaccccaggccaacgggggccctcccgacccgggcttcctgcgtccgcagcgagcagccctctatatccttggggacaaagcccagctcaagggtgtgcggtcagaccccctgcagcagtgggagctggtgcccattgaggtattcgaggcacggcaggtgaaggctagcttcaagaagctgctgaaagcatgtgtcccaggctgccccgctgctgagcccagcccagcctccttcctgcgctcactggaggactcagagtggctgatccagatccacaagctgctgcaggtgtctgtgctggtggtggagctcctggattcaggctcctccgtgctggtgggcctggaggatggctgggacatcaccacccaggtggtatccttggtgcagctgctctcagaccccttctaccgcacgctggagggctttcgcctgctggtggagaaggagtggctgtccttcggccatcgcttcagccaccgtggagctcacaccctggccgggcagagcagcggcttcacacccgtcttcctgcagttcctggactgcgtacaccaggtccacctgcagttccccatggagtttgagttcagccagttctacctcaagttcctcggctaccaccatgtgtcccgccgtttccggaccttcctgctcgactctgactatgagcgcattgagctggggctgctgtatgaggagaagggggaacgcaggggccaggtgccgtgcaggtctgtgtgggagtatgtggaccggctgagcaagaggacgcctgtgttccacaattacatgtatgcgcccgaggacgcagaggtcctgcggccctacagcaacgtgtccaacctgaaggtgtgggacttctacactgaggagacgctggccgagggccctccctatgactgggaactggcccaggggccccctgaacccccagaggaagaacggtctgatggaggcgctccccagagcaggcgccgcgtggtgtggccctgttacgacagctgcccgcgggcccagcctgacgccatctcacgcctgctggaggagctgcagaggctggagacagagttgggccaacccgctgagcgctggaaggacacctgggaccgggtgaaggctgcacagcgcctcgagggccggccagacggccgtggcacccctagctccctccttgtgtccaccgcaccccaccaccgtcgctcgctgggtgtgtacctgcaggaggggcccgtgggctccaccctgagcctcagcctggacagcgaccagagtagtggctcaaccacatccggctcccgtcaggctgcccgccgcagcaccagcaccctgtacagccagttccagacagcagagagtgagaacaggtcctacgagggcactctgtacaagaagggggccttcatgaagccttggaaggcccgctggttcgtgctggacaagaccaagcaccagctgcgctactacgaccaccgtgtggacacagagtgcaagggtgtcatcgacttggcggaggtggaggctgtggcacctggcacgcccactatgggtgcccctaagactgtggacgagaaggccttctttgacgtgaagacaacgcgtcgcgtttacaacttctgtgcccaggacgtgccctcggcccagcagtgggtggaccggatccagagctgcctgtcggacgcctgagcctcccagccctgcccggctgctctgcttccggtcgttaccgaccactaggggtgggcagggccgccccggccatgtttacagccccggccctcgacagtattgaggccccgagcccccagcacttgtgtgtacagcccccgtccccgccccgccccgcccggccggccctaacttattttggcgtcacagctgagcaccgtgccgggaggtggccaaggtacagcccgcaatgggcctgtaaatagtccggccccgtcagcgtgtgctggtccagccagcggctgcaggcgagtttctagaaccagagtctatataaagagagaactaacgccaaaaa

SEQ ID NO: 367801 - DNA, 6387 bp, Homo sapiens
ggaagatggcggcgggaacctggtcgccgtgccgccgcgccgccgccgcggagcgaaccaggggtgtccggggtgcgcggtccaggccggggccgggccatgagcgcgccgtcctcgagtccccgagccgcggagcccgcccgcgcccctcgggccgccccgcgtccctcgccatggcgcggctcgcggactacttcgtgctggtggcgttcgggccgcacccgcgcgggagtggggaaggccaggccagattctgcagcgcttcccagagaaggactgggaggacaacccattcccccagggcatcgagctgttttgccagcccagcgggtggcagctgtgtcccgagaggaatccaccgaccttctttgttgctgtcctcaccgacatcaactccgagcgccactactgcgcctgcttgaccttctgggagccagcggagccttcacaggaaacgacgcgcgtggaggatgccacagagagggaggaagagggggatgagggaggccagacccacctgtctcccacagcacctgccccatctgcccagctgtttgcaccgaagacgctggtactggtgtcgcgactcgaccacacggaggtgttcaggaacagccttggcctcatctatgccatccacgtggagggcctgaatgtgtgcctggagaacgtgattgggaacctgctgacgtgcactgtgcccctggctgggggctcgcagaggacgatctctttgggggctggtgaccggcaggtcatccagactccactggccgactcgctgcccgtcagccgctgcagcgtggccctgctcttccgccagctaggcatcaccaacgtgctgtctttgttctgtgccgccctcacggagcacaaggttctcttcctgtcccggagctaccagcggctcgccgatgcctgtaggggcctcctggcactgctgtttcctctcagatacagcttcacctatgtgcccatcctgccggctcagctgctggaggtcctcagcacacccacgcccttcatcattggggtcaacgcggccttccaggcagagacccaggagctgctcgatgtgattgttgctgatctggatggagggacggtcaccattcctgagtgtgtgcacattccacccttgccagagccactgcagagtcagacgcacagtgtgctgagcatggtcctggacccggagctggagttggctgacctcgccttccctccgcccacgacatccacctcctccctgaagatgcaggacaaggagctgcgcgcggtcttcctgcggctgttcgctcagctgctgcagggctatcgctggtgcctgcacgtcgtgcgcatccacccggagcctgtcatccgcttccataaggcagccttcctgggccagcgtgggctggtagaggacgatttcctgatgaaggtgctggagggcatggcctttgctggctttgtgtcagagcgtggggtcccataccgccctacggacctgttcgatgagctggtggcccacgaggtggcaaggatgcgggcggatgagaaccacccccagcgtgtcctgcgtcacgtccaggaactggcagagcagctctacaagaacgagaacccgtacccagccgtggcgatgcacaaggtacagaggcccggtgagagcagccacctgcgacgggtgccccgacccttcccccggctggatgagggcaccgtgcagtggatcgtggaccaggctgcagccaagatgcagggtgcacccccagctgtgaaggccgagaggaggaccaccgtgccctcagggccccccatgactgccatactggagcggtgcagtgggctgcatgtcaacagcgcccggcggctggaggttgtgcgcaactgcatctcctacgtgtttgaggggaaaatgcttgaggccaagaagctgctcccagccgtgttgagggccctgaaggggcgagctgcccgccgctgcctcgcccaggagctgcacctgcatgtgcagcagaaccgtgcggtcctggaccaccagcagtttgactttgtcgtccgtatgatgaactgctgcctgcaggactgcacttctctggacgagcatggcattgcggcggctctgctgcctctggtcacagccttctgccggaagctgagcccgggggtgacgcagtttgcatacagctgtgtgcaggagcacgtggtgtggagcacgccacagttctgggaggccatgttctatggggatgtgcagactcacatccgggccctctacctggagcccacggaggacctggcccccgcccaggaggttggggaggcaccttcccaggaggacgagcgctctgccctagacgtggcttctgagcagcggcgcttgtggccaactctgagtcgtgagaagcagcaggagctggtgcagaaggaggagagcacggtgttcagccaggccatccactatgccaaccgcatgagctacctcctcctgcccctggacagcagcaagagccgcctacttcgggagcgtgccgggctgggcgacctggagagcgccagcaacagcctggtcaccaacagcatggctggcagtgtggccgagagctatgacacggagagcggcttcgaggatgcagagacctgcgacgtagctggggctgtggtccgcttcatcaaccgctttgtggacaaggtctgcacggagagtggggtcaccagcgaccacctcaaggggctgcatgtcatggtgccagacattgtccagatgcacatcgagaccctggaggccgtgcagcgggagagccggaggctgccgcccatccagaagcccaagctgctgcggccgcgcctgctgccgggtgaggagtgtgtgctggacggcctgcgcgtctacctgctgccggatgggcgtgaggagggcgcggggggcagtgctgggggaccagcattgctcccagctgagggcgccgtcttcctcaccacgtaccgggtcatcttcacggggatgcccacggaccccctggttggggagcaggtggtggtccgctccttcccggtggctgcgctgaccaaggagaagcgcatcagcgtccagacccctgtggaccagctcctgcaggacgggctccagctgcgctcctgcacattccagctgctgaaaatggcctttgacgaggaggtggggtctgacagcgccgagctcttccgtaagcagctgcataagctgcggtacccgccggacatcagggccacctttgcgttcaccttgggctctgcccacacacctggccggccaccgcgagtcaccaaggacaagggtccttccctcagaaccctgtcccggaacctggtcaagaacgccaagaagaccatcgggcggcagcatgtcactcgcaagaagtacaacccccccagctgggagcaccggggccagccgccccctgaggaccaggaggacgagatctcagtgtcggaggagctggagcccagcacgctgaccccgtcctcagccctgaagccctccgaccgcatgaccatgagcagcctggtggaaagggcttgctgtcgcgactaccagcgcctcggtctgggcaccctgagcagcagcctgagccgggccaagtctgagcccttccgcatttctccggtcaaccgcatgtatgccatctgccgcagctacccagggctgctgatcgtgccccagagtgtccaggacaacgccctgcagcgcgtgtcccgctgctaccgccagaaccgcttccccgtggtctgctggcgcagcgggcggtccaaggcggtgctgctgcgctctggaggcctgcatggcaaaggtgtcgtcggcctcttcaaggcccagaacgcaccttctccaggccagtcccaggcggactcgagtagcctggagcaggagaagtacctgcaggctgtggtcagctccatgccccgctacgccgacgcgtcgggacgcaacacgcttagcggcttctcctcagcccacatgggcagtcacgttcccagccccagagccagggtcaccacgctgtccaaccccatggcggcctcggcctccagacggaccgcaccccgaggtaccgtaccgagcctgcgcaggcccgcctccccttacttggtgctggcggcctctagtgtgcactgagttattgcgggcactaatgtctccctccacacctgacactaacgacccgtctcccgagccccaccagccccaggtaagtggtgccctggccccctttgggtgcttacctggcatctccttcacaggtaagtggggcagtgtccggaccagtggacgcagcagtggccttggcaccgatgtgggctcccggctagctggcagagacgcgctggccccaccccaggccaacgggggccctcccgacccgggcttcctgcgtccgcagcgagcagccctctatatccttggggacaaagcccagctcaagggtgtgcggtcagaccccctgcagcagtgggagctggtgcccattgaggtattcgaggcacggcaggtgaaggctagcttcaagaagctgctgaaagcatgtgtcccaggctgccccgctgctgagcccagcccagcctccttcctgcgctcactggaggactcagagtggctgatccagatccacaagctgctgcaggtgtctgtgctggtggtggagctcctggattcaggctcctccgtgctggtgggcctggaggatggctgggacatcaccacccaggtggtatccttggtgcagctgctctcagaccccttctaccgcacgctggagggctttcgcctgctggtggagaaggagtggctgtccttcggccatcgcttcagccaccgtggagctcacaccctggccgggcagagcagcggcttcacacccgtcttcctgcagttcctggactgcgtacaccaggtccacctgcagttccccatggagtttgagttcagccagttctacctcaagttcctcggctaccaccatgtgtcccgccgtttccggaccttcctgctcgactctgactatgagcgcattgagctggggctgctgtatgaggagaagggggaacgcaggggccaggtgccgtgcaggtctgtgtgggagtatgtggaccggctgagcaagaggacgcctgtgttccacaattacatgtatgcgcccgaggacgcagaggtcctgcggccctacagcaacgtgtccaacctgaaggtgtgggacttctacactgaggagacgctggccgagggccctccctatgactgggaactggcccaggggccccctgaacccccagaggaagaacggtctgatggaggcgctccccagagcaggcgccgcgtggtgtggccctgttacgacagctgcccgcgggcccagcctgacgccatctcacgcctgctggaggagctgcagaggctggagacagagttgggccaacccgctgagcgctggaaggacacctgggaccgggtgaaggctgcacagcgcctcgagggccggccagacggccgtggcacccctagctccctccttgtgtccaccgcaccccaccaccgtcgctcgctgggtgtgtacctgcaggaggggcccgtgggctccaccctgagcctcagcctggacagcgaccagagtagtggctcaaccacatccggctcccgtcaggctgcccgccgcagcaccagcaccctgtacagccagttccagacagcagagagtgagaacaggtcctacgagggcactctgtacaagaagggggccttcatgaagccttggaaggcccgctggttcgtgctggacaagaccaagcaccagctgcgctactacgaccaccgtgtggacacagagtgcaagggtgtcatcgacttggcggaggtggaggctgtggcacctggcacgcccactatgggtgcccctaagactgtggacgagaaggccttctttgacgtgaagacaacgcgtcgcgtttacaacttctgtgcccaggacgtgccctcggcccagcagtgggtggaccggatccagagctgcctgtcggacgcctgagcctcccagccctgcccggctgctctgcttccggtcgttaccgaccactaggggtgggcagggccgccccggccatgtttacagccccggccctcgacagtattgaggccccgagcccccagcacttgtgtgtacagcccccgtccccgccccgccccgcccggccggccctaacttattttggcgtcacagctgagcaccgtgccgggaggtggccaaggtacagcccgcaatgggcctgtaaatagtccggccccgtcagcgtgtgctggtccagccagcggctgcaggcgagtttctagaaccagagtctatataaagagagaactaacgccaaaaa

SEQ ID NO: 367802 - DNA, 6267 bp, Homo sapiens
ggaagatggcggcgggaacctggtcgccgtgccgccgcgccgccgccgcggagcgaaccaggggtgtccggggtgcgcggtccaggccggggccgggccatgagcgcgccgtcctcgagtccccgagccgcggagcccgcccgcgcccctcgggccgccccgcgtccctcgccatggcgcggctcgcggactacttcgtgctggtggcgttcgggccgcacccgcgcgggagtggggaaggccaggccagattctgcagcgcttcccagagaaggactgggaggacaacccattcccccagggcatcgagctgttttgccagcccagcgggtggcagctgtgtcccgagaggaatccaccgaccttctttgttgctgtcctcaccgacatcaactccgagcgccactactgcgcctgcttgaccttctgggagccagcggagccttcacaggaaacgacgcgcgtggaggatgccacagagagggaggaagagggggatgagggaggccagacccacctgtctcccacagcacctgccccatctgcccagctgtttgcaccgaagacgctggtactggtgtcgcgactcgaccacacggaggtgttcaggaacagccttggcctcatctatgccatccacgtggagggcctgaatgtgtgcctggagaacgtgattgggaacctgctgacgtgcactgtgcccctggctgggggctcgcagaggacgatctctttgggggctggtgaccggcaggtcatccagactccactggccgactcgctgcccgtcagccgctgcagcgtggccctgctcttccgccagctaggcatcaccaacgtgctgtctttgttctgtgccgccctcacggagcacaaggttctcttcctgtcccggagctaccagcggctcgccgatgcctgtaggggcctcctggcactgctgtttcctctcagatacagcttcacctatgtgcccatcctgccggctcagctgctggaggtcctcagcacacccacgcccttcatcattggggtcaacgcggccttccaggcagagacccaggagctgctcgatgtgattgttgctgatctggatggagggacggtcaccattcctgagtgtgtgcacattccacccttgccagagccactgcagagtcagacgcacagtgtgctgagcatggtcctggacccggagctggagttggctgacctcgccttccctccgcccacgacatccacctcctccctgaagatgcaggacaaggagctgcgcgcggtcttcctgcggctgttcgctcagctgctgcagggctatcgctggtgcctgcacgtcgtgcgcatccacccggagcctgtcatccgcttccataaggcagccttcctgggccagcgtgggctggtagaggacgatttcctgatgaaggtgctggagggcatggcctttgctggctttgtgtcagagcgtggggtcccataccgccctacggacctgttcgatgagctggtggcccacgaggtggcaaggatgcgggcggatgagaaccacccccagcgtgtcctgcgtcacgtccaggaactggcagagcagctctacaagaacgagaacccgtacccagccgtggcgatgcacaaggtacagaggcccggtgagagcagccacctgcgacgggtgccccgacccttcccccggctggatgagggcaccgtgcagtggatcgtggaccaggctgcagccaagatgcagggtgcacccccagctgtgaaggccgagaggaggaccaccgtgccctcagggccccccatgactgccatactggagcggtgcagtgggctgcatgtcaacagcgcccggcggctggaggttgtgcgcaactgcatctcctacgtgtttgaggggaaaatgcttgaggccaagaagctgctcccagccgtgttgagggccctgaaggggcgagctgcccgccgctgcctcgcccaggagctgcacctgcatgtgcagcagaaccgtgcggtcctggaccaccagcagtttgactttgtcgtccgtatgatgaactgctgcctgcaggactgcacttctctggacgagcatggcattgcggcggctctgctgcctctggtcacagccttctgccggaagctgagcccgggggtgacgcagtttgcatacagctgtgtgcaggagcacgtggtgtggagcacgccacagttctgggaggccatgttctatggggatgtgcagactcacatccgggccctctacctggagcccacggaggacctggcccccgcccaggaggttggggaggcaccttcccaggaggacgagcgctctgccctagacgtggcttctgagcagcggcgcttgtggccaactctgagtcgtgagaagcagcaggagctggtgcagaaggaggagagcacggtgttcagccaggccatccactatgccaaccgcatgagctacctcctcctgcccctggacagcagcaagagccgcctacttcgggagcgtgccgggctgggcgacctggagagcgccagcaacagcctggtcaccaacagcatggctggcagtgtggccgagagctatgacacggagagcggcttcgaggatgcagagacctgcgacgtagctggggctgtggtccgcttcatcaaccgctttgtggacaaggtctgcacggagagtggggtcaccagcgaccacctcaaggggctgcatgtcatggtgccagacattgtccagatgcacatcgagaccctggaggccgtgcagcgggagagccggaggctgccgcccatccagaagcccaagctgctgcggccgcgcctgctgccgggtgaggagtgtgtgctggacggcctgcgcgtctacctgctgccggatgggcgtgaggagggcgcggggggcagtgctgggggaccagcattgctcccagctgagggcgccgtcttcctcaccacgtaccgggtcatcttcacggggatgcccacggaccccctggttggggagcaggtggtggtccgctccttcccggtggctgcgctgaccaaggagaagcgcatcagcgtccagacccctgtggaccagctcctgcaggacgggctccagctgcgctcctgcacattccagctgctgaaaatggcctttgacgaggaggtggggtctgacagcgccgagctcttccgtaagcagctgcataagctgcggtacccgccggacatcagggccacctttgcgttcaccttgggctctgcccacacacctggccggccaccgcgagtcaccaaggacaagggtccttccctcagaaccctgtcccggaacctggtcaagaacgccaagaagaccatcgggcggcagcatgtcactcgcaagaagtacaacccccccagctgggagcaccggggccagccgccccctgaggaccaggaggacgagatctcagtgtcggaggagctggagcccagcacgctgaccccgtcctcagccctgaagccctccgaccgcatgaccatgagcagcctggtggaaagggcttgctgtcgcgactaccagcgcctcggtctgggcaccctgagcagcagcctgagccgggccaagtctgagcccttccgcatttctccggtcaaccgcatgtatgccatctgccgcagctacccagggctgctgatcgtgccccagagtgtccaggacaacgccctgcagcgcgtgtcccgctgctaccgccagaaccgcttccccgtggtctgctggcgcagcgggcggtccaaggcggtgctgctgcgctctggaggcctgcatggcaaaggtgtcgtcggcctcttcaaggcccagaacgcaccttctccaggccagtcccaggcggactcgagtagcctggagcaggagaagtacctgcaggctgtggtcagctccatgccccgctacgccgacgcgtcgggacgcaacacgcttagcggcttctcctcagcccacatgggcagtcacgttcccagccccagagccagggtcaccacgctgtccaaccccatggcggcctcggcctccagacggaccgcaccccgaggtaagtggggcagtgtccggaccagtggacgcagcagtggccttggcaccgatgtgggctcccggctagctggcagagacgcgctggccccaccccaggccaacgggggccctcccgacccgggcttcctgcgtccgcagcgagcagccctctatatccttggggacaaagcccagctcaagggtgtgcggtcagaccccctgcagcagtgggagctggtgcccattgaggtattcgaggcacggcaggtgaaggctagcttcaagaagctgctgaaagcatgtgtcccaggctgccccgctgctgagcccagcccagcctccttcctgcgctcactggaggactcagagtggctgatccagatccacaagctgctgcaggtgtctgtgctggtggtggagctcctggattcaggctcctccgtgctggtgggcctggaggatggctgggacatcaccacccaggtggtatccttggtgcagctgctctcagaccccttctaccgcacgctggagggctttcgcctgctggtggagaaggagtggctgtccttcggccatcgcttcagccaccgtggagctcacaccctggccgggcagagcagcggcttcacacccgtcttcctgcagttcctggactgcgtacaccaggtccacctgcagttccccatggagtttgagttcagccagttctacctcaagttcctcggctaccaccatgtgtcccgccgtttccggaccttcctgctcgactctgactatgagcgcattgagctgggtatgtggggagtcggggctggggcagccacgggtcaggaggggcccaggctcagtgctgcttctgtgcagggggctgctgtatgaggagaagggggaacgcaggggccaggtgccgtgcaggtctgtgtgggagtatgtggaccggctgagcaagaggacgcctgtgttccacaattacatgtatgcgcccgaggacgcagaggtcctgcggccctacagcaacgtgtccaacctgaaggtgtgggacttctacactgaggagacgctggccgagggccctccctatgactgggaactggcccaggggccccctgaacccccagaggaagaacggtctgatggaggcgctccccagagcaggcgccgcgtggtgtggccctgttacgacagctgcccgcgggcccagcctgacgccatctcacgcctgctggaggagctgcagaggctggagacagagttgggccaacccgctgagcgctggaaggacacctgggaccgggtgaaggctgcacagcgcctcgagggccggccagacggccgtggcacccctagctccctccttgtgtccaccgcaccccaccaccgtcgctcgctgggtgtgtacctgcaggaggggcccgtgggctccaccctgagcctcagcctggacagcgaccagagtagtggctcaaccacatccggctcccgtcaggctgcccgccgcagcaccagcaccctgtacagccagttccagacagcagagagtgagaacaggtcctacgagggcactctgtacaagaagggggccttcatgaagccttggaaggcccgctggttcgtgctggacaagaccaagcaccagctgcgctactacgaccaccgtgtggacacagagtgcaagggtgtcatcgacttggcggaggtggaggctgtggcacctggcacgcccactatgggtgcccctaagactgtggacgagaaggccttctttgacgtgaagacaacgcgtcgcgtttacaacttctgtgcccaggacgtgccctcggcccagcagtgggtggaccggatccagagctgcctgtcggacgcctgagcctcccagccctgcccggctgctctgcttccggtcgttaccgaccactaggggtgggcagggccgccccggccatgtttacagccccggccctcgacagtattgaggccccgagcccccagcacttgtgtgtacagcccccgtccccgccccgccccgcccggccggccctaacttattttggcgtcacagctgagcaccgtgccgggaggtggccaaggtacagcccgcaatgggcctgtaaatagtccggccccgtcagcgtgtgctggtccagccagcggctgcaggcgagtttctagaaccagagtctatataaagagagaactaacgccaaaaa

SEQ ID NO: 367803 - DNA, 7062 bp, Homo sapiens
ggaagatggcggcgggaacctggtcgccgtgccgccgcgccgccgccgcggagcgaaccaggggtgtccggggtgcgcggtccaggccggggccgggccatgagcgcgccgtcctcgagtccccgagccgcggagcccgcccgcgcccctcgggccgccccgcgtccctcgccatggcgcggctcgcggactacttcgtgctggtggcgttcgggccgcacccgcgcgggagtggggaaggccaggccagattctgcagcgcttcccagagaaggactgggaggacaacccattcccccagggcatcgagctgttttgccagcccagcgggtggcagctgtgtcccgagaggaatccaccgaccttctttgttgctgtcctcaccgacatcaactccgagcgccactactgcgcctgcttgaccttctgggagccagcggagccttcacaggaaacgacgcgcgtggaggatgccacagagagggaggaagagggggatgagggaggccagacccacctgtctcccacagcacctgccccatctgcccagctgtttgcaccgaagacgctggtactggtgtcgcgactcgaccacacggaggtgttcaggaacagccttggcctcatctatgccatccacgtggagggcctgaatgtgtgcctggagaacgtgattgggaacctgctgacgtgcactgtgcccctggctgggggctcgcagaggacgatctctttgggggctggtgaccggcaggtcatccagactccactggccgactcgctgcccgtcagccgctgcagcgtggccctgctcttccgccagctaggcatcaccaacgtgctgtctttgttctgtgccgccctcacggagcacaaggttctcttcctgtcccggagctaccagcggctcgccgatgcctgtaggggcctcctggcactgctgtttcctctcagatacagcttcacctatgtgcccatcctgccggctcagctgctggaggtcctcagcacacccacgcccttcatcattggggtcaacgcggccttccaggcagagacccaggagctgctcgatgtgattgttgctgatctggatggagggacggtcaccattcctgagtgtgtgcacattccacccttgccagagccactgcagagtcagacgcacagtgtgctgagcatggtcctggacccggagctggagttggctgacctcgccttccctccgcccacgacatccacctcctccctgaagatgcaggacaaggagctgcgcgcggtcttcctgcggctgttcgctcagctgctgcagggctatcgctggtgcctgcacgtcgtgcgcatccacccggagcctgtcatccgcttccataaggcagccttcctgggccagcgtgggctggtagaggacgatttcctgatgaaggtgctggagggcatggcctttgctggctttgtgtcagagcgtggggtcccataccgccctacggacctgttcgatgagctggtggcccacgaggtggcaaggatgcgggcggatgagaaccacccccagcgtgtcctgcgtcacgtccaggaactggcagagcagctctacaagaacgagaacccgtacccagccgtggcgatgcacaaggtacagaggcccggtgagagcagccacctgcgacgggtgccccgacccttcccccggctggatgagggcaccgtgcagtggatcgtggaccaggctgcagccaagatgcagggtgcacccccagctgtgaaggccgagaggaggaccaccgtgccctcagggccccccatgactgccatactggagcggtgcagtgggctgcatgtcaacagcgcccggcggctggaggttgtgcgcaactgcatctcctacgtgtttgaggggaaaatgcttgaggccaagaagctgctcccagccgtgttgagggccctgaaggggcgagctgcccgccgctgcctcgcccaggagctgcacctgcatgtgcagcagaaccgtgcggtcctggaccaccagcagtttgactttgtcgtccgtatgatgaactgctgcctgcaggactgcacttctctggacgagcatggcattgcggcggctctgctgcctctggtcacagccttctgccggaagctgagcccgggggtgacgcagtttgcatacagctgtgtgcaggagcacgtggtgtggagcacgccacagttctgggaggccatgttctatggggatgtgcagactcacatccgggccctctacctggagcccacggaggacctggcccccgcccaggaggttggggaggcaccttcccaggaggacgagcgctctgccctagacgtggcttctgagcagcggcgcttgtggccaactctgagtcgtgagaagcagcaggagctggtgcagaaggaggagagcacggtgttcagccaggccatccactatgccaaccgcatgagctacctcctcctgcccctggacagcagcaagagccgcctacttcgggagcgtgccgggctgggcgacctggagagcgccagcaacagcctggtcaccaacagcatggctggcagtgtggccgagagctatgacacggagagcggcttcgaggatgcagagacctgcgacgtagctggggctgtggtccgcttcatcaaccgctttgtggacaaggtctgcacggagagtggggtcaccagcgaccacctcaaggggctgcatgtcatggtgccagacattgtccagatgcacatcgagaccctggaggccgtgcagcgggagagccggaggctgccgcccatccagaagcccaagctgctgcggccgcgcctgctgccgggtgaggagtgtgtgctggacggcctgcgcgtctacctgctgccggatgggcgtgaggagggcgcggggggcagtgctgggggaccagcattgctcccagctgagggcgccgtcttcctcaccacgtaccgggtcatcttcacggggatgcccacggaccccctggttggggagcaggtggtggtccgctccttcccggtggctgcgctgaccaaggagaagcgcatcagcgtccagacccctgtggaccagctcctgcaggacgggctccagctgcgctcctgcacattccagctgctgaaaatggcctttgacgaggaggtggggtctgacagcgccgagctcttccgtaagcagctgcataagctgcggtacccgccggacatcagggccacctttgcgttcaccttgggctctgcccacacacctggccggccaccgcgagtcaccaaggacaagggtccttccctcagaaccctgtcccggaacctggtcaagaacgccaagaagaccatcgggcggcagcatgtcactcgcaagaagtacaacccccccagctgggagcaccggggccagccgccccctgaggaccaggaggacgagatctcagtgtcggaggagctggagcccagcacgctgaccccgtcctcagccctgaagccctccgaccgcatgaccatgagcagcctggtggaaagggcttgctgtcgcgactaccagcgcctcggtctgggcaccctgagcagcagcctgagccgggccaagtctgagcccttccgcatttctccggtcaaccgcatgtatgccatctgccgcagctacccagggctgctgatcgtgccccagagtgtccaggacaacgccctgcagcgcgtgtcccgctgctaccgccagaaccgcttccccgtggtctgctggcgcagcgggcggtccaaggcggtgctgctgcgctctggaggcctgcatggcaaaggtgtcgtcggcctcttcaaggcccagaacgcaccttctccaggccagtcccaggcggactcgagtagcctggagcaggagaagtacctgcaggctgtggtcagctccatgccccgctacgccgacgcgtcgggacgcaacacgcttagcggcttctcctcagcccacatgggcagtcacgttcccagccccagagccagggtcaccacgctgtccaaccccatggcggcctcggcctccagacggaccgcaccccgaggtaagtggggcagtgtccggaccagtggacgcagcagtggccttggcaccgatgtgggctcccggctagctggcagagacgcgctggccccaccccaggccaacgggggccctcccgacccgggcttcctgcgtccgcagcgagcagccctctatatccttggggacaaagcccagctcaagggtgtgcggtcagaccccctgcagcagtgggagctggtgcccattgaggtattcgaggcacggcaggtgaaggctagcttcaagaagctgctgaaagcatgtgtcccaggctgccccgctgctgagcccagcccagcctccttcctgcgctcactggaggactcagagtggctgatccagatccacaagctgctgcaggtgtctgtgctggtggtggagctcctggattcaggctcctccgtgctggtgggcctggaggatggctgggacatcaccacccaggtggtatccttggtgcagctgctctcagaccccttctaccgcacgctggagggctttcgcctgctggtggagaaggagtggctgtccttcggccatcgcttcagccaccgtggagctcacaccctggccgggcagagcagcggcttcacacccgtcttcctgcagttcctggactgcgtacaccaggtccacctgcagttccccatggagtttgagttcagccagttctacctcaagttcctcggctaccaccatgtgtcccgccgtttccggaccttcctgctcgactctgactatgagcgcattgagctggggctgctgtatgaggagaagggggaacgcaggggccaggtgccgtgcaggtctgtgtgggagtatgtggaccggctgagcaagaggacgcctgtgttccacaattacatgtatgcgcccgaggacgcagaggtcctgcggccctacagcaacgtgtccaacctgaaggtgtgggacttctacactgaggagacgctggccgagggccctccctatgactgggaactggcccaggggccccctgaacccccagaggaagaacggtctgatggaggcgctccccagagcaggcgccgcgtggtgtggccctgttacgacagctgcccgcgggcccagcctgacgccatctcacgcctgctggaggagctgcagaggctggagacagagttgggccaacccgctgagcgctggaaggacacctgggaccgggtgaaggctgcacagcgcctcgagggccggccagacggccgtggcacccctagctccctccttgtgtccaccgcaccccaccaccgtcgctcgctgggtgtgtacctgcaggaggggcccgtgggctccaccctgagcctcagcctggacagcgaccagagtagtggctcaaccacatccggctcccgtcaggctgcccgccgcagcaccagcaccctgtacagccagttccagacagcagagagtgagaacaggtcctacgagggcactctgtacaagaagggggccttcatgaagccttggaaggcccgctggttcgtgctggacaagaccaagcaccagctgcgctactacgaccaccgtgtggacacagagtgcaagggtgtcatcgacttggcggaggtggaggctgtggcacctggcacgcccactatgggtgcccctaagactgtggacgagaaggccttctttgacgtgaagacaacgcgtcgcgtttacaacttctgtgcccaggacgtgccctcggcccagcagtgggtggaccggatccagagctgcctgtcggacgcctgagcctcccagccctgcccggctgctctgcttccggtcgttaccgaccactaggggtggtgttgggacacctgggcgagatgtgagggtgggctcacttgagccactgaaaccagccaggtcttccctcaggccggacagatggcgcctgaccgaagttcctggcacctggaaaacccacaggtcagagtaaggggagaaaggaccctgccctccctgttccacgtctgtggggggagaggacaaatgccaggcacagggtaggcggcgagaacaaggcactcaatgtgtagctggggcagagactcggcctctggggagctgagcgggttccctccacccccaaccgtggtggaaagacaagctcgctggggcggggtgggggtctggtctccacctgcccctcccactcagccactgaggacaaggtggggcccaggcttctgggagggggagctggcacaaaaggaagtcctggggttgatgtgtttgagcgttaggcgaagtggttccccccatcccccaaacggaaaaatgtcagtatttgctaagctgtagagacctgatgccgtgatgtggcctgttccgcctccacccattacacggggataacgctggggggtggcgggcccacaaaagaggtgctggaggagactctcccacccctggccgggccggggctttggggccggaaggttcacagtacgcggtttgtccgaacgtcacggcttttattgggagttgggggtttggggtgccctgtcaggtgatcagaacattaaaaatggactcaacgtaaaataatcttctggacccttctaggacgacatggccgtgaccggtagtgctagaaaccagtcttcgagcccccagtgccacaccatgtccccccacctgcatacctgtggtctccccctgccaggcaccctgtgctgggcacagggacatccctgccaggcctagagggccttgtgtttttaaggcagtcaaatcttgcagcctggttcagtgccagctccaagggctattgggtagctgcaagggtcaattatgcattcctgtgagtcaggtttttccaacccaggcccttgactctgccctgagcttgcagctggatacaaagtgcaaaaaagcttggctccttctgtattctttaaaaacaaaacaacaacaaaaaaaaactgtaaaaacagcctccatgtccacgccct

SEQ ID NO: 367804 - DNA, 6763 bp, Homo sapiens
ggaagatggcggcgggaacctggtcgccgtgccgccgcgccgccgccgcggagcgaaccaggggtgtccggggtgcgcggtccaggccggggccgggccatgagcgcgccgtcctcgagtccccgagccgcggagcccgcccgcgcccctcgggccgccccgcgtccctcgccatggcgcggctcgcggactacttcgtgctggtggcgttcgggccgcacccgcgcgggagtggggaaggccaggccagattctgcagcgcttcccagagaaggactgggaggacaacccattcccccagggcatcgagctgttttgccagcccagcgggtggcagctgtgtcccgagaggaatccaccgaccttctttgttgctgtcctcaccgacatcaactccgagcgccactactgcgcctgcttgaccttctgggagccagcggagccttcacaggaaacgacgcgcgtggaggatgccacagagagggaggaagagggggatgagggaggccagacccacctgtctcccacagcacctgccccatctgcccagctgtttgcaccgaagacgctggtactggtgtcgcgactcgaccacacggaggtgttcaggaacagccttggcctcatctatgccatccacgtggagggcctgaatgtgtgcctggagaacgtgattgggaacctgctgacgtgcactgtgcccctggctgggggctcgcagaggacgatctctttgggggctggtgaccggcaggtcatccagactccactggccgactcgctgcccgtcagccgctgcagcgtggccctgctcttccgccagctaggcatcaccaacgtgctgtctttgttctgtgccgccctcacggagcacaaggttctcttcctgtcccggagctaccagcggctcgccgatgcctgtaggggcctcctggcactgctgtttcctctcagatacagcttcacctatgtgcccatcctgccggctcagctgctggaggtcctcagcacacccacgcccttcatcattggggtcaacgcggccttccaggcagagacccaggagctgctcgatgtgattgttgctgatctggatggagggacggtcaccattcctgagtgtgtgcacattccacccttgccagagccactgcagagtcagacgcacagtgtgctgagcatggtcctggacccggagctggagttggctgacctcgccttccctccgcccacgacatccacctcctccctgaagatgcaggacaaggagctgcgcgcggtcttcctgcggctgttcgctcagctgctgcagggctatcgctggtgcctgcacgtcgtgcgcatccacccggagcctgtcatccgcttccataaggcagccttcctgggccagcgtgggctggtagaggacgatttcctgatgaaggtgctggagggcatggcctttgctggctttgtgtcagagcgtggggtcccataccgccctacggacctgttcgatgagctggtggcccacgaggtggcaaggatgcgggcggatgagaaccacccccagcgtgtcctgcgtcacgtccaggaactggcagagcagctctacaagaacgagaacccgtacccagccgtggcgatgcacaaggtacagaggcccggtgagagcagccacctgcgacgggtgccccgacccttcccccggctggatgagggcaccgtgcagtggatcgtggaccaggctgcagccaagatgcagggtgcacccccagctgtgaaggccgagaggaggaccaccgtgccctcagggccccccatgactgccatactggagcggtgcagtgggctgcatgtcaacagcgcccggcggctggaggttgtgcgcaactgcatctcctacgtgtttgaggggaaaatgcttgaggccaagaagctgctcccagccgtgttgagggccctgaaggggcgagctgcccgccgctgcctcgcccaggagctgcacctgcatgtgcagcagaaccgtgcggtcctggaccaccagcagtttgactttgtcgtccgtatgatgaactgctgcctgcaggactgcacttctctggacgagcatggcattgcggcggctctgctgcctctggtcacagccttctgccggaagctgagcccgggggtgacgcagtttgcatacagctgtgtgcaggagcacgtggtgtggagcacgccacagttctgggaggccatgttctatggggatgtgcagactcacatccgggccctctacctggagcccacggaggacctggcccccgcccaggaggttggggaggcaccttcccaggaggacgagcgctctgccctagacgtggcttctgagcagcggcgcttgtggccaactctgagtcgtgagaagcagcaggagctggtgcagaaggaggagagcacggtgttcagccaggccatccactatgccaaccgcatgagctacctcctcctgcccctggacagcagcaagagccgcctacttcgggagcgtgccgggctgggcgacctggagagcgccagcaacagcctggtcaccaacagcatggctggcagtgtggccgagagctatgacacggagagcggcttcgaggatgcagagacctgcgacgtagctggggctgtggtccgcttcatcaaccgctttgtggacaaggtctgcacggagagtggggtcaccagcgaccacctcaaggggctgcatgtcatggtgccagacattgtccagatgcacatcgagaccctggaggccgtgcagcgggagagccggaggctgccgcccatccagaagcccaagctgctgcggccgcgcctgctgccgggtgaggagtgtgtgctggacggcctgcgcgtctacctgctgccggatgggcgtgaggagggcgcggggggcagtgctgggggaccagcattgctcccagctgagggcgccgtcttcctcaccacgtaccgggtcatcttcacggggatgcccacggaccccctggttggggagcaggtggtggtccgctccttcccggtggctgcgctgaccaaggagaagcgcatcagcgtccagacccctgtggaccagctcctgcaggacgggctccagctgcgctcctgcacattccagctgctgaaaatggcctttgacgaggaggtggggtctgacagcgccgagctcttccgtaagcagctgcataagctgcggtacccgccggacatcagggccacctttgcgttcaccttgggctctgcccacacacctggccggccaccgcgagtcaccaaggacaagggtccttccctcagaaccctgtcccggaacctggtcaagaacgccaagaagaccatcgggcggcagcatgtcactcgcaagaagtacaacccccccagctgggagcaccggggccagccgccccctgaggaccaggaggacgagatctcagtgtcggaggagctggagcccagcacgctgaccccgtcctcagccctgaagccctccgaccgcatgaccatgagcagcctggtggaaagggcttgctgtcgcgactaccagcgcctcggtctgggcaccctgagcagcagcctgagccgggccaagtctgagcccttccgcatttctccggtcaaccgcatgtatgccatctgccgcagctacccagggctgctgatcgtgccccagagtgtccaggacaacgccctgcagcgcgtgtcccgctgctaccgccagaaccgcttccccgtggtctgctggcgcagcgggcggtccaaggcggtgctgctgcgctctggaggcctgcatggcaaaggtgtcgtcggcctcttcaaggcccagaacgcaccttctccaggccagtcccaggcggactcgagtagcctggagcaggagaagtacctgcaggctgtggtcagctccatgccccgctacgccgacgcgtcgggacgcaacacgcttagcggcttctcctcagcccacatgggcagtcacgttcccagccccagagccagggtcaccacgctgtccaaccccatggcggcctcggcctccagacggaccgcaccccgaggtaagtggggcagtgtccggaccagtggacgcagcagtggccttggcaccgatgtgggctcccggctagctggcagagacgcgctggccccaccccaggccaacgggggccctcccgacccgggcttcctgcgtccgcagcgagcagccctctatatccttggggacaaagcccagctcaagggtgtgcggtcagaccccctgcagcagtgggagctggtgcccattgaggtattcgaggcacggcaggtgaaggctagcttcaagaagctgctgaaagcatgtgtcccaggctgccccgctgctgagcccagcccagcctccttcctgcgctcactggaggactcagagtggctgatccagatccacaagctgctgcaggtgtctgtgctggtggtggagctcctggattcaggctcctccgtgctggtgggcctggaggatggctgggacatcaccacccaggtggtatccttggtgcagctgctctcagaccccttctaccgcacgctggagggctttcgcctgctggtggagaaggagtggctgtccttcggccatcgcttcagccaccgtggagctcacaccctggccgggcagagcagcggcttcacacccgtcttcctgcagttcctggactgcgtacaccaggtccacctgcagttccccatggagtttgagttcagccagttctacctcaagttcctcggctaccaccatgtgtcccgccgtttccggaccttcctgctcgactctgactatgagcgcattgagctggggctgctgtatgaggagaagggggaacgcaggggccaggtgccgtgcaggtctgtgtgggagtatgtggaccggctgagcaagaggacgcctgtgttccacaattacatgtatgcgcccgaggacgcagaggtcctgcggccctacagcaacgtgtccaacctgaaggtgtgggacttctacactgaggagacgctggccgagggccctccctatgactgggaactggcccaggggccccctgaacccccagaggaagaacggtctgatggaggcgctccccagagcaggcgccgcgtggtgtggccctgttacgacagctgcccgcgggcccagcctgacgccatctcacgcctgctggaggagctgcagaggctggagacagagttgggccaacccgctgagcgctggaaggacacctgggaccgggtgaaggctgcacagcgcctcgagggccggccagacggccgtggcacccctagctccctccttgtgtccaccgcaccccaccaccgtcgctcgctgggtgtgtacctgcaggaggggcccgtgggctccaccctgagcctcagcctggacagcgaccagagtagtggctcaaccacatccggctcccgtcaggctgcccgccgcagcaccagcaccctgtacagccagttccagacagcagagagtgagaacaggtcctacgagggcactctgtacaagaagggggccttcatgaagccttggaaggcccgctggttcgtgctggacaagaccaagcaccagctgcgctactacgaccaccgtgtggacacagagtgcaagggtgtcatcgacttggcggaggtggaggctgtggcacctggcacgcccactatgggtgcccctaagactgtggacgagaaggccttctttgacgtgaagacaacgcgtcgcgtttacaacttctgtgcccaggacgtgccctcggcccagcagtgggtggaccggatccagagctgcctgtcggacgcctgagcctcccagccctgcccggctgctctgcttccggtcgttaccgaccactaggggtggtgttgggacacctgggcgagatgtgagggtgggctcacttgagccactgaaaccagccaggtcttccctcaggccggacagatggcgcctgaccgaagttcctggcacctggaaaacccacaggtcagagtaaggggagaaaggaccctgccctccctgttccacgtctgtggggggagaggacaaatgccaggcacagggtaggcggcgagaacaaggcactcaatgtgtagctggggcagagactcggcctctggggagctgagcgggttccctccacccccaaccgtggtggaaagacaagctcgctggggcggggtgggggtctggtctccacctgcccctcccactcagccactgaggacaaggtggggcccaggcttctgggagggggagctggcacaaaaggaagtcctggggttgatgtgtttgagcgttaggcgaagtggttccccccatcccccaaacggaaaaatgtcagtatttgctaagctgtagagacctgatgccgtgatgtggcctgttccgcctccacccattacacggggataacgctggggggtggcgggcccacaaaagaggtgctggaggagactctcccacccctggccgggccggggctttggggccggaaggttcacagtacgcggtttgtccgaacgtcacggcttttattgggagttgggggtttggggtgccctgtcaggtgatcagaacattaaaaatggactcaacgtaaaataatcttctggacccttctaggacgacatggccgtgaccggtagtgctttaataccaattttaatcagttattaattgcctaactatggttccatcaattgcttaccttgc

SEQ ID NO: 367805 - DNA, 5825 bp, Homo sapiens
ggaagatggcggcgggaacctggtcgccgtgccgccgcgccgccgccgcggagcgaaccaggggtgtccggggtgcgcggtccaggccggggccgggccatgagcgcgccgtcctcgagtccccgagccgcggagcccgcccgcgcccctcgggccgccccgcgtccctcgccatggcgcggctcgcggactacttcgtgctggtggcgttcgggccgcacccgcgcgggagtggggaaggccaggccagattctgcagcgcttcccagagaaggactgggaggacaacccattcccccagggcatcgagctgttttgccagcccagcgggtggcagctgtgtcccgagaggaatccaccgaccttctttgttgctgtcctcaccgacatcaactccgagcgccactactgcgcctgcttgaccttctgggagccagcggagccttcacaggaaacgacgcgcgtggaggatgccacagagagggaggaagagggggatgagggaggccagacccacctgtctcccacagcacctgccccatctgcccagctgtttgcaccgaagacgctggtactggtgtcgcgactcgaccacacggaggtgttcaggaacagccttggcctcatctatgccatccacgtggagggcctgaatgtgtgcctggagaacgtgattgggaacctgctgacgtgcactgtgcccctggctgggggctcgcagaggacgatctctttgggggctggtgaccggcaggtcatccagactccactggccgactcgctgcccgtcagccgctgcagcgtggccctgctcttccgccagctaggcatcaccaacgtgctgtctttgttctgtgccgccctcacggagcacaaggttctcttcctgtcccggagctaccagcggctcgccgatgcctgtaggggcctcctggcactgctgtttcctctcagatacagcttcacctatgtgcccatcctgccggctcagctgctggaggtcctcagcacacccacgcccttcatcattggggtcaacgcggccttccaggcagagacccaggagctgctcgatgtgattgttgctgatctggatggagggacggtcaccattcctgagtgtgtgcacattccacccttgccagagccactgcagagtcagacgcacagtgtgctgagcatggtcctggacccggagctggagttggctgacctcgccttccctccgcccacgacatccacctcctccctgaagatgcaggacaaggagctgcgcgcggtcttcctgcggctgttcgctcagctgctgcagggctatcgctggtgcctgcacgtcgtgcgcatccacccggagcctgtcatccgcttccataaggcagccttcctgggccagcgtgggctggtagaggacgatttcctgatgaaggtgctggagggcatggcctttgctggctttgtgtcagagcgtggggtcccataccgccctacggacctgttcgatgagctggtggcccacgaggtggcaaggatgcgggcggatgagaaccacccccagcgtgtcctgcgtcacgtccaggaactggcagagcagctctacaagaacgagaacccgtacccagccgtggcgatgcacaaggtacagaggcccggtgagagcagccacctgcgacgggtgccccgacccttcccccggctggatgagggcaccgtgcagtggatcgtggaccaggctgcagccaagatgcagggtgcacccccagctgtgaaggccgagaggaggaccaccgtgccctcagggccccccatgactgccatactggagcggtgcagtgggctgcatgtcaacagcgcccggcggctggaggttgtgcgcaactgcatctcctacgtgtttgaggggaaaatgcttgaggccaagaagctgctcccagccgtgttgagggccctgaaggggcgagctgcccgccgctgcctcgcccaggagctgcacctgcatgtgcagcagaaccgtgcggtcctggaccaccagcagtttgactttgtcgtccgtatgatgaactgctgcctgcaggactgcacttctctggacgagcatggcattgcggcggctctgctgcctctggtcacagccttctgccggaagctgagcccgggggtgacgcagtttgcatacagctgtgtgcaggagcacgtggtgtggagcacgccacagttctgggaggccatgttctatggggatgtgcagactcacatccgggccctctacctggagcccacggaggacctggcccccgcccaggaggttggggaggcaccttcccaggaggacgagcgctctgccctagacgtggcttctgagcagcggcgcttgtggccaactctgagtcgtgagaagcagcaggagctggtgcagaaggaggagagcacggtgttcagccaggccatccactatgccaaccgcatgagctacctcctcctgcccctggacagcagcaagagccgcctacttcgggagcgtgccgggctgggcgacctggagagcgccagcaacagcctggtcaccaacagcatggctggcagtgtggccgagagctatgacacggagagcggcttcgaggatgcagagacctgcgacgtagctggggctgtggtccgcttcatcaaccgctttgtggacaaggtctgcacggagagtggggtcaccagcgaccacctcaaggggctgcatgtcatggtgccagacattgtccagatgcacatcgagaccctggaggccgtgcagcgggagagccggaggctgccgcccatccagaagcccaagctgctgcggccgcgcctgctgccgggtgaggagtgtgtgctggacggcctgcgcgtctacctgctgccggatgggcgtgaggagggcgcggggggcagtgctgggggaccagcattgctcccagctgagggcgccgtcttcctcaccacgtaccgggtcatcttcacggggatgcccacggaccccctggttggggagcaggtggtggtccgctccttcccggtggctgcgctgaccaaggagaagcgcatcagcgtccagacccctgtggaccagctcctgcaggacgggctccagctgcgctcctgcacattccagctgctgaaaatggcctttgacgaggaggtggggtctgacagcgccgagctcttccgtaagcagctgcataagctgcggtacccgccggacatcagggccacctttgcgttcaccttgggctctgcccacacacctggccggccaccgcgagtcaccaaggacaagggtccttccctcagaaccctgtcccggaacctggtcaagaacgccaagaagaccatcgggcggcagcatgtcactcgcaagaagtacaacccccccagctgggagcaccggggccagccgccccctgaggaccaggaggacgagatctcagtgtcggaggagctggagcccagcacgctgaccccgtcctcagccctgaagccctccgaccgcatgaccatgagcagcctggtggaaagggcttgctgtcgcgactaccagcgcctcggtctgggcaccctgagcagcagcctgagccgggccaagtctgagcccttccgcatttctccggtcaaccgcatgtatgccatctgccgcagctacccagggctgctgatcgtgccccagagtgtccaggacaacgccctgcagcgcgtgtcccgctgctaccgccagaaccgcttccccgtggtctgctggcgcagcgggcggtccaaggcggtgctgctgcgctctggaggcctgcatggcaaaggtgtcgtcggcctcttcaaggcccagaacgcaccttctccaggccagtcccaggcggactcgagtagcctggagcaggagaagtacctgcaggctgtggtcagctccatgccccgctacgccgacgcgtcgggacgcaacacgcttagcggcttctcctcagcccacatgggcagtcacgttcccagccccagagccagggtcaccacgctgtccaaccccatggcggcctcggcctccagacggaccgcaccccgaggtaagtggggcagtgtccggaccagtggacgcagcagtggccttggcaccgatgtgggctcccggctagctggcagagacgcgctggccccaccccaggccaacgggggccctcccgacccgggcttcctgcgtccgcagcgagcagccctctatatccttggggacaaagcccagctcaagggtgtgcggtcagaccccctgcagcagtgggagctggtgcccattgaggtattcgaggcacggcaggtgaaggctagcttcaagaagctgctgaaagcatgtgtcccaggctgccccgctgctgagcccagcccagcctccttcctgcgctcactggaggactcagagtggctgatccagatccacaagctgctgcaggtgtctgtgctggtggtggagctcctggattcaggctcctccgtgctggtgggcctggaggatggctgggacatcaccacccaggtggtatccttggtgcagctgctctcagaccccttctaccgcacgctggagggctttcgcctgctggtggagaaggagtggctgtccttcggccatcgcttcagccaccgtggagctcacaccctggccgggcagagcagcggcttcacacccgtcttcctgcagttcctggactgcgtacaccaggtccacctgcagttccccatggagtttgagttcagccagttctacctcaagttcctcggctaccaccatgtgtcccgccgtttccggaccttcctgctcgactctgactatgagcgcattgagctggggctgctgtatgaggagaagggggaacgcaggggccaggtgccgtgcaggtctgtgtgggagtatgtggaccggctgagcaagaggacgcctgtgttccacaattacatgtatgcgcccgaggacgcagaggtcctgcggccctacagcaacgtgtccaacctgaaggtgtgggacttctacactgaggagacgctggccgagggccctccctatgactgggaactggcccaggggccccctgaacccccagaggaagaacggtctgatggaggcgctccccagagcaggcgccgcgtggtgtggccctgttacgacagctgcccgcgggcccagcctgacgccatctcacgcctgctggaggagctgcagaggctggagacagagttgggccaacccgctgagcgctggaaggacacctgggaccgggtgaaggctgcacagcgcctcgagggccggccagacggccgtggcacccctagctccctccttgtgtccaccgcaccccaccaccgtcgctcgctgggtgtgtacctgcaggaggggcccgtgggctccaccctgagcctcagcctggacagcgaccagagtagtggctcaaccacatccggctcccgtcaggctgcccgccgcagcaccagcaccctgtacagccagttccagacagcagagagtgagaacaggtcctacgagggcactctgtacaagaagggggccttcatgaagccttggaaggcccgctggttcgtgctggacaagaccaagcaccagccccgtccccgccccgccccgcccggccggccctaacttattttggcgtcacagctgagcaccgtgccgggaggtggccaaggtacagcccgcaatgggcctgtaaatagtccggccccgtcagcgtgtgctggtccagccagcggctgcaggcgagtttctagaaccagagtctatataaagagagaactaacgccaaaaa

SEQ ID NO: 367806 - DNA, 5674 bp, Homo sapiens
ggaagatggcggcgggaacctggtcgccgtgccgccgcgccgccgccgcggagcgaaccaggggtgtccggggtgcgcggtccaggccggggccgggccatgagcgcgccgtcctcgagtccccgagccgcggagcccgcccgcgcccctcgggccgccccgcgtccctcgccatggcgcggctcgcggactacttcgtgctggtggcgttcgggccgcacccgcgcgggagtggggaaggccaggccagattctgcagcgcttcccagagaaggactgggaggacaacccattcccccagggcatcgagctgttttgccagcccagcgggtggcagctgtgtcccgagaggaatccaccgaccttctttgttgctgtcctcaccgacatcaactccgagcgccactactgcgcctgcttgaccttctgggagccagcggagccttcacaggaaacgacgcgcgtggaggatgccacagagagggaggaagagggggatgagggaggccagacccacctgtctcccacagcacctgccccatctgcccagctgtttgcaccgaagacgctggtactggtgtcgcgactcgaccacacggaggtgttcaggaacagccttggcctcatctatgccatccacgtggagggcctgaatgtgtgcctggagaacgtgattgggaacctgctgacgtgcactgtgcccctggctgggggctcgcagaggacgatctctttgggggctggtgaccggcaggtcatccagactccactggccgactcgctgcccgtcagccgctgcagcgtggccctgctcttccgccagctaggcatcaccaacgtgctgtctttgttctgtgccgccctcacggagcacaaggttctcttcctgtcccggagctaccagcggctcgccgatgcctgtaggggcctcctggcactgctgtttcctctcagatacagcttcacctatgtgcccatcctgccggctcagctgctggaggtcctcagcacacccacgcccttcatcattggggtcaacgcggccttccaggcagagacccaggagctgctcgatgtgattgttgctgatctggatggagggacggtcaccattcctgagtgtgtgcacattccacccttgccagagccactgcagagtcagacgcacagtgtgctgagcatggtcctggacccggagctggagttggctgacctcgccttccctccgcccacgacatccacctcctccctgaagatgcaggacaaggagctgcgcgcggtcttcctgcggctgttcgctcagctgctgcagggctatcgctggtgcctgcacgtcgtgcgcatccacccggagcctgtcatccgcttccataaggcagccttcctgggccagcgtgggctggtagaggacgatttcctgatgaaggtgctggagggcatggcctttgctggctttgtgtcagagcgtggggtcccataccgccctacggacctgttcgatgagctggtggcccacgaggtggcaaggatgcgggcggatgagaaccacccccagcgtgtcctgcgtcacgtccaggaactggcagagcagctctacaagaacgagaacccgtacccagccgtggcgatgcacaaggtacagaggcccggtgagagcagccacctgcgacgggtgccccgacccttcccccggctggatgagggcaccgtgcagtggatcgtggaccaggctgcagccaagatgcagggtgcacccccagctgtgaaggccgagaggaggaccaccgtgccctcagggccccccatgactgccatactggagcggtgcagtgggctgcatgtcaacagcgcccggcggctggaggttgtgcgcaactgcatctcctacgtgtttgaggggaaaatgcttgaggccaagaagctgctcccagccgtgttgagggccctgaaggggcgagctgcccgccgctgcctcgcccaggagctgcacctgcatgtgcagcagaaccgtgcggtcctggaccaccagcagtttgactttgtcgtccgtatgatgaactgctgcctgcaggactgcacttctctggacgagcatggcattgcggcggctctgctgcctctggtcacagccttctgccggaagctgagcccgggggtgacgcagtttgcatacagctgtgtgcaggagcacgtggtgtggagcacgccacagttctgggaggccatgttctatggggatgtgcagactcacatccgggccctctacctggagcccacggaggacctggcccccgcccaggaggttggggaggcaccttcccaggaggacgagcgctctgccctagacgtggcttctgagcagcggcgcttgtggccaactctgagtcgtgagaagcagcaggagctggtgcagaaggaggagagcacggtgttcagccaggccatccactatgccaaccgcatgagctacctcctcctgcccctggacagcagcaagagccgcctacttcgggagcgtgccgggctgggcgacctggagagcgccagcaacagcctggtcaccaacagcatggctggcagtgtggccgagagctatgacacggagagcggcttcgaggatgcagagacctgcgacgtagctggggctgtggtccgcttcatcaaccgctttgtggacaaggtctgcacggagagtggggtcaccagcgaccacctcaaggggctgcatgtcatggtgccagacattgtccagatgcacatcgagaccctggaggccgtgcagcgggagagccggaggctgccgcccatccagaagcccaagctgctgcggccgcgcctgctgccgggtgaggagtgtgtgctggacggcctgcgcgtctacctgctgccggatgggcgtgaggagggcgcggggggcagtgctgggggaccagcattgctcccagctgagggcgccgtcttcctcaccacgtaccgggtcatcttcacggggatgcccacggaccccctggttggggagcaggtggtggtccgctccttcccggtggctgcgctgaccaaggagaagcgcatcagcgtccagacccctgtggaccagctcctgcaggacgggctccagctgcgctcctgcacattccagctgctgaaaatggcctttgacgaggaggtggggtctgacagcgccgagctcttccgtaagcagctgcataagctgcggtacccgccggacatcagggccacctttgcgttcaccttgggctctgcccacacacctggccggccaccgcgagtcaccaaggacaagggtccttccctcagaaccctgtcccggaacctggtcaagaacgccaagaagaccatcgggcggcagcatgtcactcgcaagaagtacaacccccccagctgggagcaccggggccagccgccccctgaggaccaggaggacgagatctcagtgtcggaggagctggagcccagcacgctgaccccgtcctcagccctgaagccctccgaccgcatgaccatgagcagcctggtggaaagggcttgctgtcgcgactaccagcgcctcggtctgggcaccctgagcagcagcctgagccgggccaagtctgagcccttccgcatttctccggtcaaccgcatgtatgccatctgccgcagctacccagggctgctgatcgtgccccagagtgtccaggacaacgccctgcagcgcgtgtcccgctgctaccgccagaaccgcttccccgtggtctgctggcgcagcgggcggtccaaggcggtgctgctgcgctctggaggcctgcatggcaaaggtgtcgtcggcctcttcaaggcccagaacgcaccttctccaggccagtcccaggcggactcgagtagcctggagcaggagaagtacctgcaggctgtggtcagctccatgccccgctacgccgacgcgtcgggacgcaacacgcttagcggcttctcctcagcccacatgggcagtcacgttcccagccccagagccagggtcaccacgctgtccaaccccatggcggcctcggcctccagacggaccgcaccccgaggtaagtggggcagtgtccggaccagtggacgcagcagtggccttggcaccgatgtgggctcccggctagctggcagagacgcgctggccccaccccaggccaacgggggccctcccgacccgggcttcctgcgtccgcagcgagcagccctctatatccttggggacaaagcccagctcaagggtgtgcggtcagaccccctgcagcagtgggagctggtgcccattgaggtattcgaggcacggcaggtgaaggctagcttcaagaagctgctgaaagcatgtgtcccaggctgccccgctgctgagcccagcccagcctccttcctgcgctcactggaggactcagagtggctgatccagatccacaagctgctgcaggtgtctgtgctggtggtggagctcctggattcaggctcctccgtgctggtgggcctggaggatggctgggacatcaccacccaggtggtatccttggtgcagctgctctcagaccccttctaccgcacgctggagggctttcgcctgctggtggagaaggagtggctgtccttcggccatcgcttcagccaccgtggagctcacaccctggccgggcagagcagcggcttcacacccgtcttcctgcagttcctggactgcgtacaccaggtccacctgcagttccccatggagtttgagttcagccagttctacctcaagttcctcggctaccaccatgtgtcccgccgtttccggaccttcctgctcgactctgactatgagcgcattgagctggggctgctgtatgaggagaagggggaacgcaggggccaggtgccgtgcaggtctgtgtgggagtatgtggaccggctgagcaagaggacgcctgtgttccacaattacatgtatgcgcccgaggacgcagaggtcctgcggccctacagcaacgtgtccaacctgaaggtgtgggacttctacactgaggagacgctggccgagggccctccctatgactgggaactggcccaggggccccctgaacccccagaggaagaacggtctgatggaggcgctccccagagcaggcgccgcgtggtgtggccctgttacgacagctgcccgcgggcccagcctgacgccatctcacgcctgctggaggagctgcagaggctggagacagagttgggccaacccgctgagcgctggaaggacacctgggaccgggtgaaggctgcacagcgcctcgagggccggccagacggccgtggcacccctagctccctccttgtgtccaccgcaccccaccaccgtcgctcgctgggtgtgtacctgcaggaggggcccgtgggctccaccctgagcctcagcctggacagcgaccagagtagtggctcaaccacatccggctcccgtcaggctgcccgccgcagcaccagcaccctgtacagccagttccagacagcagagagtgagaacaggtcctacgagggcactctgtacaagaagggggccttcatgaagccttggaaggcccgctggttcgtgctggacaagaccaagcaccagctgcgctactacaccaccgtgtgacacgaatgttcaggtacacgctcgatt

SEQ ID NO: 367807 - DNA, 5586 bp, Homo sapiens
ggaagatggcggcgggaacctggtcgccgtgccgccgcgccgccgccgcggagcgaaccaggggtgtccggggtgcgcggtccaggccggggccgggccatgagcgcgccgtcctcgagtccccgagccgcggagcccgcccgcgcccctcgggccgccccgcgtccctcgccatggcgcggctcgcggactacttcgtgctggtggcgttcgggccgcacccgcgcgggagtggggaaggccaggccagattctgcagcgcttcccagagaaggactgggaggacaacccattcccccagggcatcgagctgttttgccagcccagcgggtggcagctgtgtcccgagaggaatccaccgaccttctttgttgctgtcctcaccgacatcaactccgagcgccactactgcgcctgcttgaccttctgggagccagcggagccttcacaggaaacgacgcgcgtggaggatgccacagagagggaggaagagggggatgagggaggccagacccacctgtctcccacagcacctgccccatctgcccagctgtttgcaccgaagacgctggtactggtgtcgcgactcgaccacacggaggtgttcaggaacagccttggcctcatctatgccatccacgtggagggcctgaatgtgtgcctggagaacgtgattgggaacctgctgacgtgcactgtgcccctggctgggggctcgcagaggacgatctctttgggggctggtgaccggcaggtcatccagactccactggccgactcgctgcccgtcagccgctgcagcgtggccctgctcttccgccagctaggcatcaccaacgtgctgtctttgttctgtgccgccctcacggagcacaaggttctcttcctgtcccggagctaccagcggctcgccgatgcctgtaggggcctcctggcactgctgtttcctctcagatacagcttcacctatgtgcccatcctgccggctcagctgctggaggtcctcagcacacccacgcccttcatcattggggtcaacgcggccttccaggcagagacccaggagctgctcgatgtgattgttgctgatctggatggagggacggtcaccattcctgagtgtgtgcacattccacccttgccagagccactgcagagtcagacgcacagtgtgctgagcatggtcctggacccggagctggagttggctgacctcgccttccctccgcccacgacatccacctcctccctgaagatgcaggacaaggagctgcgcgcggtcttcctgcggctgttcgctcagctgctgcagggctatcgctggtgcctgcacgtcgtgcgcatccacccggagcctgtcatccgcttccataaggcagccttcctgggccagcgtgggctggtagaggacgatttcctgatgaaggtgctggagggcatggcctttgctggctttgtgtcagagcgtggggtcccataccgccctacggacctgttcgatgagctggtggcccacgaggtggcaaggatgcgggcggatgagaaccacccccagcgtgtcctgcgtcacgtccaggaactggcagagcagctctacaagaacgagaacccgtacccagccgtggcgatgcacaaggtacagaggcccggtgagagcagccacctgcgacgggtgccccgacccttcccccggctggatgagggcaccgtgcagtggatcgtggaccaggctgcagccaagatgcagggtgcacccccagctgtgaaggccgagaggaggaccaccgtgccctcagggccccccatgactgccatactggagcggtgcagtgggctgcatgtcaacagcgcccggcggctggaggttgtgcgcaactgcatctcctacgtgtttgaggggaaaatgcttgaggccaagaagctgctcccagccgtgttgagggccctgaaggggcgagctgcccgccgctgcctcgcccaggagctgcacctgcatgtgcagcagaaccgtgcggtcctggaccaccagcagtttgactttgtcgtccgtatgatgaactgctgcctgcaggactgcacttctctggacgagcatggcattgcggcggctctgctgcctctggtcacagccttctgccggaagctgagcccgggggtgacgcagtttgcatacagctgtgtgcaggagcacgtggtgtggagcacgccacagttctgggaggccatgttctatggggatgtgcagactcacatccgggccctctacctggagcccacggaggacctggcccccgcccaggaggttggggaggcaccttcccaggaggacgagcgctctgccctagacgtggcttctgagcagcggcgcttgtggccaactctgagtcgtgagaagcagcaggagctggtgcagaaggaggagagcacggtgttcagccaggccatccactatgccaaccgcatgagctacctcctcctgcccctggacagcagcaagagccgcctacttcgggagcgtgccgggctgggcgacctggagagcgccagcaacagcctggtcaccaacagcatggctggcagtgtggccgagagctatgacacggagagcggcttcgaggatgcagagacctgcgacgtagctggggctgtggtccgcttcatcaaccgctttgtggacaaggtctgcacggagagtggggtcaccagcgaccacctcaaggggctgcatgtcatggtgccagacattgtccagatgcacatcgagaccctggaggccgtgcagcgggagagccggaggctgccgcccatccagaagcccaagctgctgcggccgcgcctgctgccgggtgaggagtgtgtgctggacggcctgcgcgtctacctgctgccggatgggcgtgaggagggcgcggggggcagtgctgggggaccagcattgctcccagctgagggcgccgtcttcctcaccacgtaccgggtcatcttcacggggatgcccacggaccccctggttggggagcaggtggtggtccgctccttcccggtggctgcgctgaccaaggagaagcgcatcagcgtccagacccctgtggaccagctcctgcaggacgggctccagctgcgctcctgcacattccagctgctgaaaatggcctttgacgaggaggtggggtctgacagcgccgagctcttccgtaagcagctgcataagctgcggtacccgccggacatcagggccacctttgcgttcaccttgggctctgcccacacacctggccggccaccgcgagtcaccaaggacaagggtccttccctcagaaccctgtcccggaacctggtcaagaacgccaagaagaccatcgggcggcagcatgtcactcgcaagaagtacaacccccccagctgggagcaccggggccagccgccccctgaggaccaggaggacgagatctcagtgtcggaggagctggagcccagcacgctgaccccgtcctcagccctgaagccctccgaccgcatgaccatgagcagcctggtggaaagggcttgctgtcgcgactaccagcgcctcggtctgggcaccctgagcagcagcctgagccgggccaagtctgagcccttccgcatttctccggtcaaccgcatgtatgccatctgccgcagctacccagggctgctgatcgtgccccagagtgtccaggacaacgccctgcagcgcgtgtcccgctgctaccgccagaaccgcttccccgtggtctgctggcgcagcgggcggtccaaggcggtgctgctgcgctctggaggcctgcatggcaaaggtgtcgtcggcctcttcaaggcccagaacgcaccttctccaggccagtcccaggcggactcgagtagcctggagcaggagaagtacctgcaggctgtggtcagctccatgccccgctacgccgacgcgtcgggacgcaacacgcttagcggcttctcctcagcccacatgggcagtcacgttcccagccccagagccagggtcaccacgctgtccaaccccatggcggcctcggcctccagacggaccgcaccccgaggtaagtggggcagtgtccggaccagtggacgcagcagtggccttggcaccgatgtgggctcccggctagctggcagagacgcgctggccccaccccaggccaacgggggccctcccgacccgggcttcctgcgtccgcagcgagcagccctctatatccttggggacaaagcccagctcaagggtgtgcggtcagaccccctgcagcagtgggagctggtgcccattgaggtattcgaggcacggcaggtgaaggctagcttcaagaagctgctgaaagcatgtgtcccaggctgccccgctgctgagcccagcccagcctccttcctgcgctcactggaggactcagagtggctgatccagatccacaagctgctgcaggtgtctgtgctggtggtggagctcctggattcaggctcctccgtgctggtgggcctggaggatggctgggacatcaccacccaggtggtatccttggtgcagctgctctcagaccccttctaccgcacgctggagggctttcgcctgctggtggagaaggagtggctgtccttcggccatcgcttcagccaccgtggagctcacaccctggccgggcagagcagcggcttcacacccgtcttcctgcagttcctggactgcgtacaccaggtccacctgcagttccccatggagtttgagttcagccagttctacctcaagttcctcggctaccaccatgtgtcccgccgtttccggaccttcctgctcgactctgactatgagcgcattgagctggggctgctgtatgaggagaagggggaacgcaggggccaggtgccgtgcaggtctgtgtgggagtatgtggaccggctgagcaagaggacgcctgtgttccacaattacatgtatgcgcccgaggacgcagaggtcctgcggccctacagcaacgtgtccaacctgaaggtgtgggacttctacactgaggagacgctggccgagggccctccctatgactgggaactggcccaggggccccctgaacccccagaggaagaacggtctgatggaggcgctccccagagcaggcgccgcgtggtgtggccctgttacgacagctgcccgcgggcccagcctgacgccatctcacgcctgctggaggagctgcagaggctggagacagagttgggccaacccgctgagcgctggaaggacacctgggaccgggtgaaggctgcacagcgcctcgagggccggccagacggccgtggcacccctagctccctccttgtgtccaccgcaccccaccaccgtcgctcgctgggtgtgtacctgcaggaggggcccgtgggctccaccctgagcctcagcctggacagcgaccagagtagtggctcaaccacatccggctcccgtcaggctgcccgccgcagcaccagcaccctgtacagccagttccagacagcagagagtgagaacaggtcctacgagggcactctgtacaaatcctaacaccgggccggtaccagcct

SEQ ID NO: 367808 - DNA, 3226 bp, Homo sapiens
agaggatcacccagtttcacggggatgccacggaccccctgtattggggagcaggtggtggtccgctccttcccggtggctgcgctgaccaaggagaagcgcatcagcgtccagacccctgtggaccagctcctgcaggacgggctccagctgcgctcctgcacattccagctgctgaaaatggcctttgacgaggaggtggggtctgacagcgccgagctcttccgtaagcagctgcataagctgcggtacccgccggacatcagggccacctttgcgttcaccttgggctctgcccacacacctggccggccaccgcgagtcaccaaggacaagggtccttccctcagaaccctgtcccggaacctggtcaagaacgccaagaagaccatcgggcggcagcatgtcactcgcaagaagtacaacccccccagctgggagcaccggggccagccgccccctgaggaccaggaggacgagatctcagtgtcggaggagctggagcccagcacgctgaccccgtcctcagccctgaagccctccgaccgcatgaccatgagcagcctggtggaaagggcttgctgtcgcgactaccagcgcctcggtctgggcaccctgagcagcagcctgagccgggccaagtctgagcccttccgcatttctccggtcaaccgcatgtatgccatctgccgcagctacccagggctgctgatcgtgccccagagtgtccaggacaacgccctgcagcgcgtgtcccgctgctaccgccagaaccgcttccccgtggtctgctggcgcagcgggcggtccaaggcggtgctgctgcgctctggaggcctgcatggcaaaggtgtcgtcggcctcttcaaggcccagaacgcaccttctccaggccagtcccaggcggactcgagtagcctggagcaggagaagtacctgcaggctgtggtcagctccatgccccgctacgccgacgcgtcgggacgcaacacgcttagcggcttctcctcagcccacatgggcagtcacgttcccagccccagagccagggtcaccacgctgtccaaccccatggcggcctcggcctccagacggaccgcaccccgaggtaagtggggcagtgtccggaccagtggacgcagcagtggccttggcaccgatgtgggctcccggctagctggcagagacgcgctggccccaccccaggccaacgggggccctcccgacccgggcttcctgcgtccgcagcgagcagccctctatatccttggggacaaagcccagctcaagggtgtgcggtcagaccccctgcagcagtgggagctggtgcccattgaggtattcgaggcacggcaggtgaaggctagcttcaagaagctgctgaaagcatgtgtcccaggctgccccgctgctgagcccagcccagcctccttcctgcgctcactggaggactcagagtggctgatccagatccacaagctgctgcaggtgtctgtgctggtggtggagctcctggattcaggctcctccgtgctggtgggcctggaggatggctgggacatcaccacccaggtggtatccttggtgcagctgctctcagaccccttctaccgcacgctggagggctttcgcctgctggtggagaaggagtggctgtccttcggccatcgcttcagccaccgtggagctcacaccctggccgggcagagcagcggcttcacacccgtcttcctgcagttcctggactgcgtacaccaggtccacctgcagttccccatggagtttgagttcagccagttctacctcaagttcctcggctaccaccatgtgtcccgccgtttccggaccttcctgctcgactctgactatgagcgcattgagctggggctgctgtatgaggagaagggggaacgcaggggccaggtgccgtgcaggtctgtgtgggagtatgtggaccggctgagcaagaggacgcctgtgttccacaattacatgtatgcgcccgaggacgcagaggtcctgcggccctacagcaacgtgtccaacctgaaggtgtgggacttctacactgaggagacgctggccgagggccctccctatgactgggaactggcccaggggccccctgaacccccagaggaagaacggtctgatggaggcgctccccagagcaggcgccgcgtggtgtggccctgttacgacagctgcccgcgggcccagcctgacgccatctcacgcctgctggaggagctgcagaggctggagacagagttgggccaacccgctgagcgctggaaggacacctgggaccgggtgaaggctgcacagcgcctcgagggccggccagacggccgtggcacccctagctccctccttgtgtccaccgcaccccaccaccgtcgctcgctgggtgtgtacctgcaggaggggcccgtgggctccaccctgagcctcagcctggacagcgaccagagtagtggctcaaccacatccggctcccgtcaggctgcccgccgcagcaccagcaccctgtacagccagttccagacagcagagagtgagaacaggtcctacgagggcactctgtacaagaagggggccttcatgaagccttggaaggcccgctggttcgtgctggacaagaccaagcaccagctgcgctactacgaccaccgtgtggacacagagtgcaagggtgtcatcgacttggcggaggtggaggctgtggcacctggcacgcccactatgggtgcccctaagactgtggacgagaaggccttctttgacgtgaagacaacgcgtcgcgtttacaacttctgtgcccaggacgtgccctcggcccagcagtgggtggaccggatccagagctgcctgtcggacgcctgagcctcccagccctgcccggctgctctgcttccggtcgttaccgaccactaggggtgggcagggccgccccggccatgtttacagccccggccctcgacagtattgaggccccgagcccccagcacttgtgtgtacagcccccgtccccgccccgccccgcccggccggccctaacttattttggcgtcacagctgagcaccgtgccgggaggtggccaaggtacagcccgcaatgggcctgtaaatagtccggccccgtcagcgtgtgctggtccagccagcggctgcaggcgagtttctagaaccagagtctatataaagagagaactaacgccaaaaa

SEQ ID NO: 367809 - DNA, 1942 bp, Homo sapiens
gggaccttcctgctcgactctgactatgagcgcattgagctggggctgctgtatgaggagaagggggaacgcaggggccaggtgccgtgcaggtctgtgtgggagtatgtggaccggctgagcaagaggacgcctgtgttccacaattacacgttgctgtagggccgccggagcgtgggcggacgcatccacaagctgctgcaggtgtctgtgctggtggtggagctcctggattcaggctcctccgtgctggtgggcctggaggatggctgggacatcaccacccaggtggtatccttggtgcagctgctctcagaccccttctaccgcacgctggagggctttcgcctgctggtggagaaggagtggctgtccttcggccatcgcttcagccaccgtggagctcacaccctggccgggcagagcagcggcttcacacccgtcttcctgcagttcctggactgcgtacaccaggtccacctgcagttccccatggagtttgagttcagccagttctacctcaagttcctcggctaccaccatgtgtcccgccgtttccggaccttcctgctcgactctgactatgagcgcattgagctggggctgctgtatgaggagaagggggaacgcaggggccaggtgccgtgcaggtctgtgtgggagtatgtggaccggctgagcaagaggacgcctgtgttccacaattacatgtatgcgcccgaggacgcagaggtcctgcggccctacagcaacgtgtccaacctgaaggtgtgggacttctacactgaggagacgctggccgagggccctccctatgactgggaactggcccaggggccccctgaacccccagaggaagaacggtctgatggaggcgctccccagagcaggcgccgcgtggtgtggccctgttacgacagctgcccgcgggcccagcctgacgccatctcacgcctgctggaggagctgcagaggctggagacagagttgggccaacccgctgagcgctggaaggacacctgggaccgggtgaaggctgcacagcgcctcgagggccggccagacggccgtggcacccctagctccctccttgtgtccaccgcaccccaccaccgtcgctcgctgggtgtgtacctgcaggaggggcccgtgggctccaccctgagcctcagcctggacagcgaccagagtagtggctcaaccacatccggctcccgtcaggctgcccgccgcagcaccagcaccctgtacagccagttccagacagcagagagtgagaacaggtcctacgagggcactctgtacaagaagggggccttcatgaagccttggaaggcccgctggttcgtgctggacaagaccaagcaccagctgcgctactacgaccaccgtgtggacacagagtgcaagggtgtcatcgacttggcggaggtggaggctgtggcacctggcacgcccactatgggtgcccctaagactgtggacgagaaggccttctttgacgtgaagacaacgcgtcgcgtttacaacttctgtgcccaggacgtgccctcggcccagcagtgggtggaccggatccagagctgcctgtcggacgcctgagcctcccagccctgcccggctgctctgcttccggtcgttaccgaccactaggggtgggcagggccgccccggccatgtttacagccccggccctcgacagtattgaggccccgagcccccagcacttgtgtgtacagcccccgtccccgccccgccccgcccggccggccctaacttattttggcgtcacagctgagcaccgtgccgggaggtggccaaggtacagcccgcaatgggcctgtaaatagtccggccccgtcagcgtgtgctggtccagccagcggctgcaggcgagtttctagaaccagagtctatataaagagagaactaacgccaaaaa

SEQ ID NO: 367810 - DNA, 808 bp, Homo sapiens
  misc_feature (4)..(4): n is a, c, g, or t
gctntacctaccctctctaatggcccctcctgcaggtacacacccagcgaccagagtagtggctcaaccacatccggctcccgtcaggctgcccgccgcagcaccagcaccctgtacagccagttccagacagcagagagtgagaacaggtcctacgagggcactctgtacaagaagggggccttcatgaagccttggaaggcccgctggttcgtgctggacaagaccaagcaccagctgcgctactacgaccaccgtgtggacacagagtgcaagggtgtcatcgacttggcggaggtggaggctgtggcacctggcacgcccactatgggtgcccctaagactgtggacgagaaggccttctttgacgtgaagacaacgcgtcgcgtttacaacttctgtgcccaggacgtgccctcggcccagcagtgggtggaccggatccagagctgcctgtcggacgcctgagcctcccagccctgcccggctgctctgcttccggtcgttaccgaccactaggggtgggcagggccgccccggccatgtttacagccccggccctcgacagtattgaggccccgagcccccagcacttgtgtgtacagcccccgtccccgccccgccccgcccggccggccctaacttattttggcgtcacagctgagcaccgtgccgggaggtggccaaggtacagcccgcaatgggcctgtaaatagtccggccccgtcagcgtgtgctggtccagccagcggctgcaggcgagtttctagaaccagagtctatataaagagagaactaacgccaaaaa

SEQ ID NO: 367811 - DNA, 1770 bp, Homo sapiens
gggacagtgggctcccaggggaatgcaggttgaccacatctggctcctgccaggcaacgagcagcatctggcagagtaaggggccaacgcccatgggggatggaccctctcagttcttgggaattctgccccaaaagtcctttccctggggtctcagagggcccccgtccttcccttcttggtgtcactgtggcccctcactgctcttttcctattcaaacctgagtcccaccaggcccagggcttcacctgctgagctgttgtgtccttgcctgtgacgaggcctggccaggggtgcaggagcagaaggtggggagggttatagacgctgcaaaggccaagagaacatctgagagtggcagctggtgacctggccagaggggctggtgaggggcagagaacctggctagaggctgggtccctcaggtggtcctctcaggtgggaggcgagcagcaggtgtgggtgaggggaaggttctgatgacagctgcagaggcagggcccagtgctggcaggtggggggccaagaccctcccctggtgggacgttgaagccaaggatggccttggaccctgtcaggcccagcatggtcccgccacctcccccaccccacaggtggtgttgggacacctgggcgagatgtgagggtgggctcacttgagccactgaaaccagccaggtcttccctcaggccggacagatggcgcctgaccgaagttcctggcacctggaaaacccacaggtcagagtaaggggagaaaggaccctgccctccctgttccacgtctgtggggggagaggacaaatgccaggcacagggtaggcggcgagaacaaggcactcaatgtgtagctggggcagagactcggcctctggggagctgagcgggttccctccacccccaaccgtggtggaaagacaagctcgctggggcggggtgggggtctggtctccacctgcccctcccactcagccactgaggacaaggtggggcccaggcttctgggagggggagctggcacaaaaggaagtcctggggttgatgtgtttgagcgttaggcgaagtggttccccccatcccccaaacggaaaaatgtcagtatttgctaagctgtagagacctgatgccgtgatgtggcctgttccgcctccacccattacacggggataacgctggggggtggcgggcccacaaaagaggtgctggaggagactctcccacccctggccgggccggggctttggggccggaaggttcacagtacgcggtttgtccgaacgtcacggcttttattgggagttgggggtttggggtgccctgtcaggtgatcagaacattaaaaatggactcaacgtaaaataatcttctggacccttctaggacgacatggccgtgaccggtagtgctagaaaccagtcttcgagcccccagtgccacaccatgtccccccacctgcatacctgtggtctccccctgccaggcaccctgtgctgggcacagggacatccctgccaggcctagagggccttgtgtttttaaggcagtcaaatcttgcagcctggttcagtgccagctccaagggctattgggtagctgcaagggtcaattatgcattcctgtgagtcaggtttttccaacccaggcccttgactctgccctgagcttgcagctggatacaaagtgcaaaaaagcttggctccttctgtattctttaaaaacaaaacaacaacaaaaaaaaactgtaaaaacagcctccatgtccacgccct

SEQ ID NO: 367812 - DNA, 393 bp, Homo sapiens
gcggccgcgcctgctgccgggtgaggagtgtgtgctggacggcctgcgcgtctacctgctgccggatgggcgtgaggagggcgcggggggcagtgctgggggaccagcattgctcccagctgagggcgccgtcttcctcaccacgtaccgggtcatcttcacggggatgcccacggaccccctgggtgagcctgcagactctctggccctgtcgccccctctcccccaggtctttgggatggatgggctttccctgcctccctctcccttttctcgggggttctgggtgcccgtgggaaacgggcctttgtctgctccttccccacccacttgggattccccataactgtggtaccctgagattctgggacccccccccccttaccttccttg

SEQ ID NO: 367813 - DNA, 426 bp, Homo sapiens
gtgtgagcgtccacggtgggcgtgttgctgggagaaagtggagtctgtccagccctgacccaagtcccaacctcctgttcccagggcacccctagctccctccttgtgtccaccgcaccccaccaccgtcgctcgctgggtgtgtacctgcaggaggggcccgtgggctccaccctgagcctcagcctggacagcgaccagagtagtggctcaaccacatccggctcccgtcaggctgcccgccgcagcaccagcaccctgtacagccagttccagacagcagagagtgagaacaggtatgagggcacctcccactgccacatggacacctctgagctggtgttctggggtcccaggcagtcctctggtgggagattgcgggtgcttttgaggagcttgcctaagtatacaccaccactgggaggg

SEQ ID NO: 367814 - DNA, 293 bp, Homo sapiens
gtgagtgatcaggtggtgggggggactcacgggggagggggctccgctgactctgtggcctcctccagctgcgctactacgaccaccgtgtggacacagagtgcaagggtgtcatcgacttggcggaggtggaggctgtggcacctggcacgcccactatgggtgcccctaagactgtggacgagaaggccttctttgacgtgagccttggccggggcttgggagaggggaggggctctgcggtgtgggggctgcggagtcagtaacccgcccttccccaggtgaagacaacg

SEQ ID NO: 367815 - DNA, 6340 bp, Homo sapiens
ggaagatggcggcgggaacctggtcgccgtgccgccgcgccgccgccgcggagcgaaccaggggtgtccggggtgcgcggtccaggccggggccgggccatgagcgcgccgtcctcgagtccccgagccgcggagcccgcccgcgcccctcgggccgccccgcgtccctcgccatggcgcggctcgcggactacttcgtgctggtggcgttcgggccgcacccgcgcgggagtggggaaggccaggccagattctgcagcgcttcccagagaaggactgggaggacaacccattcccccagggcatcgagctgttttgccagcccagcgggtggcagctgtgtcccgagaggaatccaccgaccttctttgttgctgtcctcaccgacatcaactccgagcgccactactgcgcctgcttgaccttctgggagccagcggagccttcacaggaaacgacgcgcgtggaggatgccacagagagggaggaagagggggatgagggaggccagacccacctgtctcccacagcacctgccccatctgcccagctgtttgcaccgaagacgctggtactggtgtcgcgactcgaccacacggaggtgttcaggaacagccttggcctcatctatgccatccacgtggagggcctgaatgtgtgcctggagaacgtgattgggaacctgctgacgtgcactgtgcccctggctgggggctcgcagaggacgatctctttgggggctggtgaccggcaggtcatccagactccactggccgactcgctgcccgtcagccgctgcagcgtggccctgctcttccgccagctaggcatcaccaacgtgctgtctttgttctgtgccgccctcacggagcacaaggttctcttcctgtcccggagctaccagcggctcgccgatgcctgtaggggcctcctggcactgctgtttcctctcagatacagcttcacctatgtgcccatcctgccggctcagctgctggaggtcctcagcacacccacgcccttcatcattggggtcaacgcggccttccaggcagagacccaggagctgctcgatgtgattgttgctgatctggatggagggacggtcaccattcctgagtgtgtgcacattccacccttgccagagccactgcagagtcagacgcacagtgtgctgagcatggtcctggacccggagctggagttggctgacctcgccttccctccgcccacgacatccacctcctccctgaagatgcaggacaaggagctgcgcgcggtcttcctgcggctgttcgctcagctgctgcagggctatcgctggtgcctgcacgtcgtgcgcatccacccggagcctgtcatccgcttccataaggcagccttcctgggccagcgtgggctggtagaggacgatttcctgatgaaggtgctggagggcatggcctttgctggctttgtgtcagagcgtggggtcccataccgccctacggacctgttcgatgagctggtggcccacgaggtggcaaggatgcgggcggatgagaaccacccccagcgtgtcctgcgtcacgtccaggaactggcagagcagctctacaagaacgagaacccgtacccagccgtggcgatgcacaaggtacagaggcccggtgagagcagccacctgcgacgggtgccccgacccttcccccggctggatgagggcaccgtgcagtggatcgtggaccaggctgcagccaagatgcagggtgcacccccagctgtgaaggccgagaggaggaccaccgtgccctcagggccccccatgactgccatactggagcggtgcagtgggctgcatgtcaacagcgcccggcggctggaggttgtgcgcaactgcatctcctacgtgtttgaggggaaaatgcttgaggccaagaagctgctcccagccgtgttgagggccctgaaggggcgagctgcccgccgctgcctcgcccaggagctgcacctgcatgtgcagcagaaccgtgcggtcctggaccaccagcagtttgactttgtcgtccgtatgatgaactgctgcctgcaggactgcacttctctggacgagcatggcattgcggcggctctgctgcctctggtcacagccttctgccggaagctgagcccgggggtgacgcagtttgcatacagctgtgtgcaggagcacgtggtgtggagcacgccacagttctgggaggccatgttctatggggatgtgcagactcacatccgggccctctacctggagcccacggaggacctggcccccgcccaggaggttggggaggcaccttcccaggaggacgagcgctctgccctagacgtggcttctgagcagcggcgcttgtggccaactctgagtcgtgagaagcagcaggagctggtgcagaaggaggagagcacggtgttcagccaggccatccactatgccaaccgcatgagctacctcctcctgcccctggacagcagcaagagccgcctacttcgggagcgtgccgggctgggcgacctggagagcgccagcaacagcctggtcaccaacagcatggctggcagtgtggccgagagctatgacacggagagcggcttcgaggatgcagagacctgcgacgtagctggggctgtggtccgcttcatcaaccgctttgtggacaaggtctgcacggagagtggggtcaccagcgaccacctcaaggggctgcatgtcatggtgccagacattgtccagatgcacatcgagaccctggaggccgtgcagcgggagagccggaggctgccgcccatccagaagcccaagctgctgcggccgcgcctgctgccgggtgaggagtgtgtgctggacggcctgcgcgtctacctgctgccggatgggcgtgaggagggcgcggggggcagtgctgggggaccagcattgctcccagctgagggcgccgtcttcctcaccacgtaccgggtcatcttcacggggatgcccacggaccccctggttggggagcaggtggtggtccgctccttcccggtggctgcgctgaccaaggagaagcgcatcagcgtccagacccctgtggaccagctcctgcaggacgggctccagctgcgctcctgcacattccagctgctgaaaatggcctttgacgaggaggtggggtctgacagcgccgagctcttccgtaagcagctgcataagctgcggtacccgccggacatcagggccacctttgcgttcaccttgggctctgcccacacacctggccggccaccgcgagtcaccaaggacaagggtccttccctcagaaccctgtcccggaacctggtcaagaacgccaagaagaccatcgggcggcagcatgtcactcgcaagaagtacaacccccccagctgggagcaccggggccagccgccccctgaggaccaggaggacgagatctcagtgtcggaggagctggagcccagcacgctgaccccgtcctcagccctgaagccctccgaccgcatgaccatgagcagcctggtggaaagggcttgctgtcgcgactaccagcgcctcggtctgggcaccctgagcagcagcctgagccgggccaagtctgagcccttccgcatttctccggtcaaccgcatgtatgccatctgccgcagctacccagggctgctgatcgtgccccagagtgtccaggacaacgccctgcagcgcgtgtcccgctgctaccgccagaaccgcttccccgtggtctgctggcgcagcgggcggtccaaggcggtgctgctgcgctctggaggcctgcatggcaaaggtgtcgtcggcctcttcaaggcccagaacgcaccttctccaggccagtcccaggcggactcgagtagcctggagcaggagaagtacctgcaggctgtggtcagctccatgccccgctacgccgacgcgtcgggacgcaacacgcttagcggcttctcctcagcccacatgggcagtcacggtaagtggggcagtgtccggaccagtggacgcagcagtggccttggcaccgatgtgggctcccggctagctggcagagacgcgctggccccaccccaggccaacgggggccctcccgacccgggcttcctgcgtccgcagcgagcagccctctatatccttggggacaaagcccagctcaagggtgtgcggtcagaccccctgcagcagtgggagctggtgcccattgaggtattcgaggcacggcaggtgaaggctagcttcaagaagctgctgaaagcatgtgtcccaggctgccccgctgctgagcccagcccagcctccttcctgcgctcactggaggactcagagtggctgatccagatccacaagctgctgcaggtgtctgtgctggtggtggagctcctggattcaggctcctccgtgctggtgggcctggaggatggctgggacatcaccacccaggtggtatccttggtgcagctgctctcagaccccttctaccgcacgctggagggctttcgcctgctggtggagaaggagtggctgtccttcggccatcgcttcagccaccgtggagctcacaccctggccgggcagagcagcggcttcacacccgtcttcctgcagttcctggactgcgtacaccaggtccacctgcagttccccatggagtttgagttcagccagttctacctcaagttcctcggctaccaccatgtgtcccgccgtttccggaccttcctgctcgactctgactatgagcgcattgagctggggctgctgtatgaggagaagggggaacgcaggggccaggtgccgtgcaggtctgtgtgggagtatgtggaccggctgagcaagaggacgcctgtgttccacaattacatgtatgcgcccgaggacgcagaggtcctgcggccctacagcaacgtgtccaacctgaaggtgtgggacttctacactgaggagacgctggccgagggccctccctatgactgggaactggcccaggggccccctgaacccccagaggaagaacggtctgatggaggcgctccccagagcaggcgccgcgtggtgtggccctgttacgacagctgcccgcgggcccagcctgacgccatctcacgcctgctggaggagctgcagaggctggagacagagttgggccaacccgctgagcgctggaaggacacctgggaccgggtgaaggctgcacagcgcctcgagggccggccagacggccgtggcacccctagctccctccttgtgtccaccgcaccccaccaccgtcgctcgctgggtgtgtacctgcaggaggggcccgtgggctccaccctgagcctcagcctggacagcgaccagagtagtggctcaaccacatccggctcccgtcaggctgcccgccgcagcaccagcaccctgtacagccagttccagacagcagagagtgagaacaggtcctacgagggcactctgtacaagaagggggccttcatgaagccttggaaggcccgctggttcgtgctggacaagaccaagcaccagctgcgctactacgaccaccgtgtggacacagagtgcaagggtgtcatcgacttggcggaggtggaggctgtggcacctggcacgcccactatgggtgcccctaagactgtggacgagaaggccttctttgacgtgaagacaacgcgtcgcgtttacaacttctgtgcccaggacgtgccctcggcccagcagtgggtggaccggatccagagctgcctgtcggacgcctgagcctcccagccctgcccggctgctctgcttccggtcgttaccgaccactaggggtgggcagggccgccccggccatgtttacagccccggccctcgacagtattgaggccccgagcccccagcacttgtgtgtacagcccccgtccccgccccgccccgcccggccggccctaacttattttggcgtcacagctgagcaccgtgccgggaggtggccaaggtacagcccgcaatgggcctgtaaatagtccggccccgtcagcgtgtgctggtccagccagcggctgcaggcgagtttctagaaccagagtctatataaagagagaactaacgccaaaaaaaaaaacaagacaaacaaacaaaaaaaacacacagcacttgtcgcgtggccacaagcatcaatgccggctcactggtctgcccccttttcacgggacaccgcggcccatagagttaacatcgaacggacgagcacacaaaggaaatataggctggcaacgcgggactaatcacacaaaccacaacacataatcacatataaacaaagaagacataatagcatga

SEQ ID NO: 367816 - DNA, 4803 bp, Homo sapiens
taaataggctagagaggctgggttatcggccgaggcggagcctgtcatccaggcttcataaggcagccttcctgggccagcgtgggctggtagaggacgatttcctgatgaaggtgctggagggcatggcctttgctggctttgtgtcagagcgtggggtcccataccgccctacggacctgttcgatgagctggtggcccacgaggtggcaaggatgcgggcggatgagaaccacccccagcgtgtcctgcgtcacgtccaggaactggcagagcagctctacaagaacgagaacccgtacccagccgtggcgatgcacaaggtacagaggcccggtgagagcagccacctgcgacgggtgccccgacccttcccccggctggatgagggcaccgtgcagtggatcgtggaccaggctgcagccaagatgcagggtgcacccccagctgtgaaggccgagaggaggaccaccgtgccctcagggccccccatgactgccatactggagcggtgcagtgggctgcatgtcaacagcgcccggcggctggaggttgtgcgcaactgcatctcctacgtgtttgaggggaaaatgcttgaggccaagaagctgctcccagccgtgttgagggccctgaaggggcgagctgcccgccgctgcctcgcccaggagctgcacctgcatgtgcagcagaaccgtgcggtcctggaccaccagcagtttgactttgtcgtccgtatgatgaactgctgcctgcaggactgcacttctctggacgagcatggcattgcggcggctctgctgcctctggtcacagccttctgccggaagctgagcccgggggtgacgcagtttgcatacagctgtgtgcaggagcacgtggtgtggagcacgccacagttctgggaggccatgttctatggggatgtgcagactcacatccgggccctctacctggagcccacggaggacctggcccccgcccaggaggttggggaggcaccttcccaggaggacgagcgctctgccctagacgtggcttctgagcagcggcgcttgtggccaactctgagtcgtgagaagcagcaggagctggtgcagaaggaggagagcacggtgttcagccaggccatccactatgccaaccgcatgagctacctcctcctgcccctggacagcagcaagagccgcctacttcgggagcgtgccgggctgggcgacctggagagcgccagcaacagcctggtcaccaacagcatggctggcagtgtggccgagagctatgacacggagagcggcttcgaggatgcagagacctgcgacgtagctggggctgtggtccgcttcatcaaccgctttgtggacaaggtctgcacggagagtggggtcaccagcgaccacctcaaggggctgcatgtcatggtgccagacattgtccagatgcacatcgagaccctggaggccgtgcagcgggagagccggaggctgccgcccatccagaagcccaagctgctgcggccgcgcctgctgccgggtgaggagtgtgtgctggacggcctgcgcgtctacctgctgccggatgggcgtgaggagggcgcggggggcagtgctgggggaccagcattgctcccagctgagggcgccgtcttcctcaccacgtaccgggtcatcttcacggggatgcccacggaccccctggttggggagcaggtggtggtccgctccttcccggtggctgcgctgaccaaggagaagcgcatcagcgtccagacccctgtggaccagctcctgcaggacgggctccagctgcgctcctgcacattccagctgctgaaaatggcctttgacgaggaggtggggtctgacagcgccgagctcttccgtaagcagctgcataagctgcggtacccgccggacatcagggccacctttgcgttcaccttgggctctgcccacacacctggccggccaccgcgagtcaccaaggacaagggtccttccctcagaaccctgtcccggaacctggtcaagaacgccaagaagaccatcgggcggcagcatgtcactcgcaagaagtacaacccccccagctgggagcaccggggccagccgccccctgaggaccaggaggacgagatctcagtgtcggaggagctggagcccagcacgctgaccccgtcctcagccctgaagccctccgaccgcatgaccatgagcagcctggtggaaagggcttgctgtcgcgactaccagcgcctcggtctgggcaccctgagcagcagcctgagccgggccaagtctgagcccttccgcatttctccggtcaaccgcatgtatgccatctgccgcagctacccagggctgctgatcgtgccccagagtgtccaggacaacgccctgcagcgcgtgtcccgctgctaccgccagaaccgcttccccgtggtctgctggcgcagcgggcggtccaaggcggtgctgctgcgctctggaggcctgcatggcaaaggtgtcgtcggcctcttcaaggcccagaacgcaccttctccaggccagtcccaggcggactcgagtagcctggagcaggagaagtacctgcaggctgtggtcagctccatgccccgctacgccgacgcgtcgggacgcaacacgcttagcggcttctcctcagcccacatgggcagtcacggtaagtggggcagtgtccggaccagtggacgcagcagtggccttggcaccgatgtgggctcccggctagctggcagagacgcgctggccccaccccaggccaacgggggccctcccgacccgggcttcctgcgtccgcagcgagcagccctctatatccttggggacaaagcccagctcaagggtgtgcggtcagaccccctgcagcagtgggagctggtgcccattgaggtattcgaggcacggcaggtgaaggctagcttcaagaagctgctgaaagcatgtgtcccaggctgccccgctgctgagcccagcccagcctccttcctgcgctcactggaggactcagagtggctgatccagatccacaagctgctgcaggtgtctgtgctggtggtggagctcctggattcaggctcctccgtgctggtgggcctggaggatggctgggacatcaccacccaggtggtatccttggtgcagctgctctcagaccccttctaccgcacgctggagggctttcgcctgctggtggagaaggagtggctgtccttcggccatcgcttcagccaccgtggagctcacaccctggccgggcagagcagcggcttcacacccgtcttcctgcagttcctggactgcgtacaccaggtccacctgcagttccccatggagtttgagttcagccagttctacctcaagttcctcggctaccaccatgtgtcccgccgtttccggaccttcctgctcgactctgactatgagcgcattgagctggggctgctgtatgaggagaagggggaacgcaggggccaggtgccgtgcaggtctgtgtgggagtatgtggaccggctgagcaagaggacgcctgtgttccacaattacatgtatgcgcccgaggacgcagaggtcctgcggccctacagcaacgtgtccaacctgaaggtgtgggacttctacactgaggagacgctggccgagggccctccctatgactgggaactggcccaggggccccctgaacccccagaggaagaacggtctgatggaggcgctccccagagcaggcgccgcgtggtgtggccctgttacgacagctgcccgcgggcccagcctgacgccatctcacgcctgctggaggagctgcagaggctggagacagagttgggccaacccgctgagcgctggaaggacacctgggaccgggtgaaggctgcacagcgcctcgagggccggccagacggccgtggcacccctagctccctccttgtgtccaccgcaccccaccaccgtcgctcgctgggtgtgtacctgcaggaggggcccgtgggctccaccctgagcctcagcctggacagcgaccagagtagtggctcaaccacatccggctcccgtcaggctgcccgccgcagcaccagcaccctgtacagccagttccagacagcagagagtgagaacaggtcctacgagggcactctgtacaagaagggggccttcatgaagccttggaaggcccgctggttcgtgctggacaagaccaagcaccagctgcgctactacgaccaccgtgtggacacagagtgcaagggtgtcatcgacttggcggaggtggaggctgtggcacctggcacgcccactatgggtgcccctaagactgtggacgagaaggccttctttgacgtgaagacaacgcgtcgcgtttacaacttctgtgcccaggacgtgccctcggcccagcagtgggtggaccggatccagagctgcctgtcggacgcctgagcctcccagccctgcccggctgctctgcttccggtcgttaccgaccactaggggtgggcagggccgccccggccatgtttacagccccggccctcgacagtattgaggccccgagcccccagcacttgtgtgtacagcccccgtccccgccccgccccgcccggccggccctaacttattttggcgtcacagctgagcaccgtgccgggaggtggccaaggtacagcccgcaatgggcctgtaaatagtccggccccgtcagcgtgtgctggtccagccagcggctgcaggcgagtttctagaaccagagtctatataaagagagaactaacgccaaaaa

SEQ ID NO: 367817 - DNA, 6194 bp, Homo sapiens
ggaagatggcggcgggaacctggtcgccgtgccgccgcgccgccgccgcggagcgaaccaggggtgtccggggtgcgcggtccaggccggggccgggccatgagcgcgccgtcctcgagtccccgagccgcggagcccgcccgcgcccctcgggccgccccgcgtccctcgccatggcgcggctcgcggactacttcgtgctggtggcgttcgggccgcacccgcgcgggagtggggaaggccaggccagattctgcagcgcttcccagagaaggactgggaggacaacccattcccccagggcatcgagctgttttgccagcccagcgggtggcagctgtgtcccgagaggaatccaccgaccttctttgttgctgtcctcaccgacatcaactccgagcgccactactgcgcctgcttgaccttctgggagccagcggagccttcacaggaaacgacgcgcgtggaggatgccacagagagggaggaagagggggatgagggaggccagacccacctgtctcccacagcacctgccccatctgcccagctgtttgcaccgaagacgctggtactggtgtcgcgactcgaccacacggaggtgttcaggaacagccttggcctcatctatgccatccacgtggagggcctgaatgtgtgcctggagaacgtgattgggaacctgctgacgtgcactgtgcccctggctgggggctcgcagaggacgatctctttgggggctggtgaccggcaggtcatccagactccactggccgactcgctgcccgtcagccgctgcagcgtggccctgctcttccgccagctaggcatcaccaacgtgctgtctttgttctgtgccgccctcacggagcacaaggttctcttcctgtcccggagctaccagcggctcgccgatgcctgtaggggcctcctggcactgctgtttcctctcagatacagcttcacctatgtgcccatcctgccggctcagctgctggaggtcctcagcacacccacgcccttcatcattggggtcaacgcggccttccaggcagagacccaggagctgctcgatgtgattgttgctgatctggatggagggacggtcaccattcctgagtgtgtgcacattccacccttgccagagccactgcagagtcagacgcacagtgtgctgagcatggtcctggacccggagctggagttggctgacctcgccttccctccgcccacgacatccacctcctccctgaagatgcaggacaaggagctgcgcgcggtcttcctgcggctgttcgctcagctgctgcagggctatcgctggtgcctgcacgtcgtgcgcatccacccggagcctgtcatccgcttccataaggcagccttcctgggccagcgtgggctggtagaggacgatttcctgatgaaggtgctggagggcatggcctttgctggctttgtgtcagagcgtggggtcccataccgccctacggacctgttcgatgagctggtggcccacgaggtggcaaggatgcgggcggatgagaaccacccccagcgtgtcctgcgtcacgtccaggaactggcagagcagctctacaagaacgagaacccgtacccagccgtggcgatgcacaaggtacagaggcccggtgagagcagccacctgcgacgggtgccccgacccttcccccggctggatgagggcaccgtgcagtggatcgtggaccaggctgcagccaagatgcagggtgcacccccagctgtgaaggccgagaggaggaccaccgtgccctcagggccccccatgactgccatactggagcggtgcagtgggctgcatgtcaacagcgcccggcggctggaggttgtgcgcaactgcatctcctacgtgtttgaggggaaaatgcttgaggccaagaagctgctcccagccgtgttgagggccctgaaggggcgagctgcccgccgctgcctcgcccaggagctgcacctgcatgtgcagcagaaccgtgcggtcctggaccaccagcagtttgactttgtcgtccgtatgatgaactgctgcctgcaggactgcacttctctggacgagcatggcattgcggcggctctgctgcctctggtcacagccttctgccggaagctgagcccgggggtgacgcagtttgcatacagctgtgtgcaggagcacgtggtgtggagcacgccacagttctgggaggccatgttctatggggatgtgcagactcacatccgggccctctacctggagcccacggaggacctggcccccgcccaggaggttggggaggcaccttcccaggaggacgagcgctctgccctagacgtggcttctgagcagcggcgcttgtggccaactctgagtcgtgagaagcagcaggagctggtgcagaaggaggagagcacggtgttcagccaggccatccactatgccaaccgcatgagctacctcctcctgcccctggacagcagcaagagccgcctacttcgggagcgtgccgggctgggcgacctggagagcgccagcaacagcctggtcaccaacagcatggctggcagtgtggccgagagctatgacacggagagcggcttcgaggatgcagagacctgcgacgtagctggggctgtggtccgcttcatcaaccgctttgtggacaaggtctgcacggagagtggggtcaccagcgaccacctcaaggggctgcatgtcatggtgccagacattgtccagatgcacatcgagaccctggaggccgtgcagcgggagagccggaggctgccgcccatccagaagcccaagctgctgcggccgcgcctgctgccgggtgaggagtgtgtgctggacggcctgcgcgtctacctgctgccggatgggcgtgaggagggcgcggggggcagtgctgggggaccagcattgctcccagctgagggcgccgtcttcctcaccacgtaccgggtcatcttcacggggatgcccacggaccccctggttggggagcaggtggtggtccgctccttcccggtggctgcgctgaccaaggagaagcgcatcagcgtccagacccctgtggaccagctcctgcaggacgggctccagctgcgctcctgcacattccagctgctgaaaatggcctttgacgaggaggtggggtctgacagcgccgagctcttccgtaagcagctgcataagctgcggtacccgccggacatcagggccacctttgcgttcaccttgggctctgcccacacacctggccggccaccgcgagtcaccaaggacaagggtccttccctcagaaccctgtcccggaacctggtcaagaacgccaagaagaccatcgggcggcagcatgtcactcgcaagaagtacaacccccccagctgggagcaccggggccagccgccccctgaggaccaggaggacgagatctcagtgtcggaggagctggagcccagcacgctgaccccgtcctcagccctgaagccctccgaccgcatgaccatgagcagcctggtggaaagggcttgctgtcgcgactaccagcgcctcggtctgggcaccctgagcagcagcctgagccgggccaagtctgagcccttccgcatttctccggtcaaccgcatgtatgccatctgccgcagctacccagggctgctgatcgtgccccagagtgtccaggacaacgccctgcagcgcgtgtcccgctgctaccgccagaaccgcttccccgtggtctgctggcgcagcgggcggtccaaggcggtgctgctgcgctctggaggcctgcatggcaaaggtgtcgtcggcctcttcaaggcccagaacgcaccttctccaggccagtcccaggcggactcgagtagcctggagcaggagaagtacctgcaggctgtggtcagctccatgccccgctacgccgacgcgtcgggacgcaacacgcttagcggcttctcctcagcccacatgggcagtcacgttcccagccccagagccagggtcaccacgctgtccaaccccatggcggcctcggcctccagacggaccgcaccccgaggtaagtggggcagtgtccggaccagtggacgcagcagtggccttggcaccgatgtgggctcccggctagctggcagagacgcgctggccccaccccaggccaacgggggccctcccgacccgggcttcctgcgtccgcagcgagcagccctctatatccttggggacaaagcccagctcaagggtgtgcggtcagaccccctgcagcagtgggagctggtgcccattgaggtattcgaggcacggcaggtgaaggctagcttcaagaagctgctgaaagcatgtgtcccaggctgccccgctgctgagcccagcccagcctccttcctgcgctcactggaggactcagagtggctgatccagatccacaagctgctgcaggtgtctgtgctggtggtggagctcctggattcaggctcctccgtgctggtgggcctggaggatggctgggacatcaccacccaggtggtatccttggtgcagctgctctcagaccccttctaccgcacgctggagggctttcgcctgctggtggagaaggagtggctgtccttcggccatcgcttcagccaccgtggagctcacaccctggccgggcagagcagcggcttcacacccgtcttcctgcagttcctggactgcgtacaccaggtccacctgcagttccccatggagtttgagttcagccagttctacctcaagttcctcggctaccaccatgtgtcccgccgtttccggaccttcctgctcgactctgactatgagcgcattgagctggggctgctgtatgaggagaagggggaacgcaggggccaggtgccgtgcaggtctgtgtgggagtatgtggaccggctgagcaagaggacgcctgtgttccacaattacatgtatgcgcccgaggacgcagaggtcctgcggccctacagcaacgtgtccaacctgaaggtgtgggacttctacactgaggagacgctggccgagggccctccctatgactgggaactggcccaggggccccctgaacccccagaggaagaacggtctgatggaggcgctccccagagcaggcgccgcgtggtgtggccctgttacgacagctgcccgcgggcccagcctgacgccatctcacgcctgctggaggagctgcagaggctggagacagagttgggccaacccgctgagcgctggaaggacacctgggaccgggtgaaggctgcacagcgcctcgagggccggccagacggccgtggcacccctagctccctccttgtgtccaccgcaccccaccaccgtcgctcgctgggtgtgtacctgcaggaggggcccgtgggctccaccctgagcctcagcctggacagcgaccagagtagtggctcaaccacatccggctcccgtcaggctgcccgccgcagcaccagcaccctgtacagccagttccagacagcagagagtgagaacaggtcctacgagggcactctgtacaagaagggggccttcatgaagccttggaaggcccgctggttcgtgctggacaagaccaagcaccagctgcgctactacgaccaccgtgtggacacagagtgcaagggtgtcatcgacttggcggaggtggaggctgtggcacctggcacgcccactatgggtgcccctaagactgtggacgagaaggccttctttgacgtgaagacaacgcgtcgcgtttacaacttctgtgcccaggacgtgccctcggcccagcagtgggtggaccggatccagagctgcctgtcggacgcctgagcctcccagccctgcccggctgctctgcttccggtcgttaccgaccactaggggtgggcagggccgccccggccatgtttacagccccggccctcgacagtattgaggccccgagcccccagcacttgtgtgtacagcccccgtccccgccccgccccgcccggccggccctaacttattttggcgtcacagctgagcaccgtgccgggaggtggccaaggtacagcccgcaatgggcctgtaaatagtccggccccgtcagcgtgtgctggtccagccagcggctgcaggcgagtttctagaaccagagtctatataaagagagaactaacgccaaaaa

SEQ ID NO: 367818 - DNA, 6275 bp, Homo sapiens
ggaagatggcggcgggaacctggtcgccgtgccgccgcgccgccgccgcggagcgaaccaggggtgtccggggtgcgcggtccaggccggggccgggccatgagcgcgccgtcctcgagtccccgagccgcggagcccgcccgcgcccctcgggccgccccgcgtccctcgccatggcgcggctcgcggactacttcgtgctggtggcgttcgggccgcacccgcgcgggagtggggaaggccaggccagattctgcagcgcttcccagagaaggactgggaggacaacccattcccccagggcatcgagctgttttgccagcccagcgggtggcagctgtgtcccgagaggaatccaccgaccttctttgttgctgtcctcaccgacatcaactccgagcgccactactgcgcctgcttgaccttctgggagccagcggagccttcacaggaaacgacgcgcgtggaggatgccacagagagggaggaagagggggatgagggaggccagacccacctgtctcccacagcacctgccccatctgcccagctgtttgcaccgaagacgctggtactggtgtcgcgactcgaccacacggaggtgttcaggaacagccttggcctcatctatgccatccacgtggagggcctgaatgtgtgcctggagaacgtgattgggaacctgctgacgtgcactgtgcccctggctgggggctcgcagaggacgatctctttgggggctggtgaccggcaggtcatccagactccactggccgactcgctgcccgtcagccgctgcagcgtggccctgctcttccgccagctaggcatcaccaacgtgctgtctttgttctgtgccgccctcacggagcacaaggttctcttcctgtcccggagctaccagcggctcgccgatgcctgtaggggcctcctggcactgctgtttcctctcagatacagcttcacctatgtgcccatcctgccggctcagctgctggaggtcctcagcacacccacgcccttcatcattggggtcaacgcggccttccaggcagagacccaggagctgctcgatgtgattgttgctgatctggatggagggacggtcaccattcctgagtgtgtgcacattccacccttgccagagccactgcagagtcagacgcacagtgtgctgagcatggtcctggacccggagctggagttggctgacctcgccttccctccgcccacgacatccacctcctccctgaagatgcaggacaaggagctgcgcgcggtcttcctgcggctgttcgctcagctgctgcagggctatcgctggtgcctgcacgtcgtgcgcatccacccggagcctgtcatccgcttccataaggcagccttcctgggccagcgtgggctggtagaggacgatttcctgatgaaggtgctggagggcatggcctttgctggctttgtgtcagagcgtggggtcccataccgccctacggacctgttcgatgagctggtggcccacgaggtggcaaggatgcgggcggatgagaaccacccccagcgtgtcctgcgtcacgtccaggaactggcagagcagctctacaagaacgagaacccgtacccagccgtggcgatgcacaaggtacagaggcccggtgagagcagccacctgcgacgggtgccccgacccttcccccggctggatgagggcaccgtgcagtggatcgtggaccaggctgcagccaagatgcagggtgcacccccagctgtgaaggccgagaggaggaccaccgtgccctcagggccccccatgactgccatactggagcggtgcagtgggctgcatgtcaacagcgcccggcggctggaggttgtgcgcaactgcatctcctacgtgtttgaggggaaaatgcttgaggccaagaagctgctcccagccgtgttgagggccctgaaggggcgagctgcccgccgctgcctcgcccaggagctgcacctgcatgtgcagcagaaccgtgcggtcctggaccaccagcagtttgactttgtcgtccgtatgatgaactgctgcctgcaggactgcacttctctggacgagcatggcattgcggcggctctgctgcctctggtcacagccttctgccggaagctgagcccgggggtgacgcagtttgcatacagctgtgtgcaggagcacgtggtgtggagcacgccacagttctgggaggccatgttctatggggatgtgcagactcacatccgggccctctacctggagcccacggaggacctggcccccgcccaggaggttggggaggcaccttcccaggaggacgagcgctctgccctagacgtggcttctgagcagcggcgcttgtggccaactctgagtcgtgagaagcagcaggagctggtgcagaaggaggagagcacggtgttcagccaggccatccactatgccaaccgcatgagctacctcctcctgcccctggacagcagcaagagccgcctacttcgggagcgtgccgggctgggcgacctggagagcgccagcaacagcctggtcaccaacagcatggctggcagtgtggccgagagctatgacacggagagcggcttcgaggatgcagagacctgcgacgtagctggggctgtggtccgcttcatcaaccgctttgtggacaaggtctgcacggagagtggggtcaccagcgaccacctcaaggggctgcatgtcatggtgccagacattgtccagatgcacatcgagaccctggaggccgtgcagcgggagagccggaggctgccgcccatccagaagcccaagctgctgcggccgcgcctgctgccgggtgaggagtgtgtgctggacggcctgcgcgtctacctgctgccggatgggcgtgaggagggcgcggggggcagtgctgggggaccagcattgctcccagctgagggcgccgtcttcctcaccacgtaccgggtcatcttcacggggatgcccacggaccccctggttggggagcaggtggtggtccgctccttcccggtggctgcgctgaccaaggagaagcgcatcagcgtccagacccctgtggaccagctcctgcaggacgggctccagctgcgctcctgcacattccagctgctgaaaatggcctttgacgaggaggtggggtctgacagcgccgagctcttccgtaagcagctgcataagctgcggtacccgccggacatcagggccacctttgcgttcaccttgggctctgcccacacacctggccggccaccgcgagtcaccaaggacaagggtccttccctcagaaccctgtcccggaacctggtcaagaacgccaagaagaccatcgggcggcagcatgtcactcgcaagaagtacaacccccccagctgggagcaccggggccagccgccccctgaggaccaggaggacgagatctcagtgtcggaggagctggagcccagcacgctgaccccgtcctcagccctgaagccctccgaccgcatgaccatgagcagcctggtggaaagggcttgctgtcgcgactaccagcgcctcggtctgggcaccctgagcagcagcctgagccgggccaagtctgagcccttccgcatttctccggtcaaccgcatgtatgccatctgccgcagctacccagggctgctgatcgtgccccagagtgtccaggacaacgccctgcagcgcgtgtcccgctgctaccgccagaaccgcttccccgtggtctgctggcgcagcgggcggtccaaggcggtgctgctgcgctctggaggcctgcatggcaaaggtgtcgtcggcctcttcaaggcccagaacgcaccttctccaggccagtcccaggcggactcgagtagcctggagcaggagaagtacctgcaggctgtggtcagctccatgccccgctacgccgacgcgtcgggacgcaacacgcttagcggcttctcctcagcccacatgggcagtcacgttcccagccccagagccagggtcaccacgctgtccaaccccatggcggcctcggcctccagacggaccgcaccccgaggtaagtggggcagtgtccggaccagtggacgcagcagtggccttggcaccgatgtgggctcccggctagctggcagagacgcgctggccccaccccaggccaacgggggccctcccgacccgggcttcctgcgtccgcagcgagcagccctctatatccttggggacaaagcccagctcaagggtgtgcggtcagaccccctgcagcagtgggagctggtgcccattgaggtattcgaggcacggcaggtgaaggctagcttcaagaagctgctgaaagcatgtgtcccaggctgccccgctgctgagcccagcccagcctccttcctgcgctcactggaggactcagagtggctgatccagatccacaagctgctgcaggtgtctgtgctggtggtggagctcctggattcaggctcctccgtgctggtgggcctggaggatggctgggacatcaccacccaggtggtatccttggtgcagctgctctcagaccccttctaccgcacgctggagggctttcgcctgctggtggagaaggagtggctgtccttcggccatcgcttcagccaccgtggagctcacaccctggccgggcagagcagcggcttcacacccgtcttcctgcagttcctggactgcgtacaccaggtccacctgcagttccccatggagtttgagttcagccagttctacctcaagttcctcggctaccaccatgtgtcccgccgtttccggaccttcctgctcgactctgactatgagcgcattgagctggggctgctgtatgaggagaagggggaacgcaggggccaggtgccgtgcaggtctgtgtgggagtatgtggaccggctgagcaagaggacgcctgtgttccacaattacatgtatgcgcccgaggacgcagaggtcctgcggccctacagcaacgtgtccaacctgaaggtgtgggacttctacactgaggagacgctggccgagggccctccctatgactgggaactggcccaggggccccctgaacccccagaggaagaacggtctgatggaggcgctccccagagcaggcgccgcgtggtgtggccctgttacgacagctgcccgcgggcccagcctgacgccatctcacgcctgctggaggagctgcagaggctggagacagagttgggccaacccgctgagcgctggaaggacacctgggaccgggtgaaggctgcacagcgcctcgagggccggccagacggccgtggcacccctagctccctccttgtgtccaccgcaccccaccaccgtcgctcgctgggtgtgtacctgcaggaggggcccgtgggctccaccctgagcctcagcctggacagcgaccagagtagtggctcaaccacatccggctcccgtcaggctgcccgccgcagcaccagcaccctgtacagccagttccagacagcagagagtgagaacaggtcctacgagggcactctgtacaagaagggggccttcatgaagccttggaaggcccgctggttcgtgctggacaagaccaagcaccagctgcgctactacgaccaccgtgtggacacagagtgcaagggtgtcatcgacttggcggaggtggaggctgtggcacctggcacgcccactatgggtgcccctaagactgtggacgagaaggccttctttgacgtgagccttggccggggcttgggagaggggaggggctctgcggtgtgggggctgcggagtcagtaacccgcccttccccaggtgaagacaacgcgtcgcgtttacaacttctgtgcccaggacgtgccctcggcccagcagtgggtggaccggatccagagctgcctgtcggacgcctgagcctcccagccctgcccggctgctctgcttccggtcgttaccgaccactaggggtgggcagggccgccccggccatgtttacagccccggccctcgacagtattgaggccccgagcccccagcacttgtgtgtacagcccccgtccccgccccgccccgcccggccggccctaacttattttggcgtcacagctgagcaccgtgccgggaggtggccaaggtacagcccgcaatgggcctgtaaatagtccggccccgtcagcgtgtgctggtccagccagcggctgcaggcgagtttctagaaccagagtctatataaagagagaactaacgccaaaaa

SEQ ID NO: 367819 - DNA, 6423 bp, Homo sapiens
ggaagatggcggcgggaacctggtcgccgtgccgccgcgccgccgccgcggagcgaaccaggggtgtccggggtgcgcggtccaggccggggccgggccatgagcgcgccgtcctcgagtccccgagccgcggagcccgcccgcgcccctcgggccgccccgcgtccctcgccatggcgcggctcgcggactacttcgtgctggtggcgttcgggccgcacccgcgcgggagtggggaaggccaggccagattctgcagcgcttcccagagaaggactgggaggacaacccattcccccagggcatcgagctgttttgccagcccagcgggtggcagctgtgtcccgagaggaatccaccgaccttctttgttgctgtcctcaccgacatcaactccgagcgccactactgcgcctgcttgaccttctgggagccagcggagccttcacaggaaacgacgcgcgtggaggatgccacagagagggaggaagagggggatgagggaggccagacccacctgtctcccacagcacctgccccatctgcccagctgtttgcaccgaagacgctggtactggtgtcgcgactcgaccacacggaggtgttcaggaacagccttggcctcatctatgccatccacgtggagggcctgaatgtgtgcctggagaacgtgattgggaacctgctgacgtgcactgtgcccctggctgggggctcgcagaggacgatctctttgggggctggtgaccggcaggtcatccagactccactggccgactcgctgcccgtcagccgctgcagcgtggccctgctcttccgccagctaggcatcaccaacgtgctgtctttgttctgtgccgccctcacggagcacaaggttctcttcctgtcccggagctaccagcggctcgccgatgcctgtaggggcctcctggcactgctgtttcctctcagatacagcttcacctatgtgcccatcctgccggctcagctgctggaggtcctcagcacacccacgcccttcatcattggggtcaacgcggccttccaggcagagacccaggagctgctcgatgtgattgttgctgatctggatggagggacggtcaccattcctgagtgtgtgcacattccacccttgccagagccactgcagagtcagacgcacagtgtgctgagcatggtcctggacccggagctggagttggctgacctcgccttccctccgcccacgacatccacctcctccctgaagatgcaggacaaggagctgcgcgcggtcttcctgcggctgttcgctcagctgctgcagggctatcgctggtgcctgcacgtcgtgcgcatccacccggagcctgtcatccgcttccataaggcagccttcctgggccagcgtgggctggtagaggacgatttcctgatgaaggtgctggagggcatggcctttgctggctttgtgtcagagcgtggggtcccataccgccctacggacctgttcgatgagctggtggcccacgaggtggcaaggatgcgggcggatgagaaccacccccagcgtgtcctgcgtcacgtccaggaactggcagagcagctctacaagaacgagaacccgtacccagccgtggcgatgcacaaggtacagaggcccggtgagagcagccacctgcgacgggtgccccgacccttcccccggctggatgagggcaccgtgcagtggatcgtggaccaggctgcagccaagatgcagggtgcacccccagctgtgaaggccgagaggaggaccaccgtgccctcagggccccccatgactgccatactggagcggtgcagtgggctgcatgtcaacagcgcccggcggctggaggttgtgcgcaactgcatctcctacgtgtttgaggggaaaatgcttgaggccaagaagctgctcccagccgtgttgagggccctgaaggggcgagctgcccgccgctgcctcgcccaggagctgcacctgcatgtgcagcagaaccgtgcggtcctggaccaccagcagtttgactttgtcgtccgtatgatgaactgctgcctgcaggactgcacttctctggacgagcatggcattgcggcggctctgctgcctctggtcacagccttctgccggaagctgagcccgggggtgacgcagtttgcatacagctgtgtgcaggagcacgtggtgtggagcacgccacagttctgggaggccatgttctatggggatgtgcagactcacatccgggccctctacctggagcccacggaggacctggcccccgcccaggaggttggggaggcaccttcccaggaggacgagcgctctgccctagacgtggcttctgagcagcggcgcttgtggccaactctgagtcgtgagaagcagcaggagctggtgcagaaggaggagagcacggtgttcagccaggccatccactatgccaaccgcatgagctacctcctcctgcccctggacagcagcaagagccgcctacttcgggagcgtgccgggctgggcgacctggagagcgccagcaacagcctggtcaccaacagcatggctggcagtgtggccgagagctatgacacggagagcggcttcgaggatgcagagacctgcgacgtagctggggctgtggtccgcttcatcaaccgctttgtggacaaggtctgcacggagagtggggtcaccagcgaccacctcaaggggctgcatgtcatggtgccagacattgtccagatgcacatcgagaccctggaggccgtgcagcgggagagccggaggctgccgcccatccagaagcccaagctgctgcggccgcgcctgctgccgggtgaggagtgtgtgctggacggcctgcgcgtctacctgctgccggatgggcgtgaggagggcgcggggggcagtgctgggggaccagcattgctcccagctgagggcgccgtcttcctcaccacgtaccgggtcatcttcacggggatgcccacggaccccctggttggggagcaggtggtggtccgctccttcccggtggctgcgctgaccaaggagaagcgcatcagcgtccagacccctgtggaccagctcctgcaggacgggctccagctgcgctcctgcacattccagctgctgaaaatggcctttgacgaggaggtggggtctgacagcgccgagctcttccgtaagcagctgcataagctgcggtacccgccggacatcagggccacctttgcgttcaccttgggctctgcccacacacctggccggccaccgcgagtcaccaaggacaagggtccttccctcagaaccctgtcccggaacctggtcaagaacgccaagaagaccatcgggcggcagcatgtcactcgcaagaagtacaacccccccagctgggagcaccggggccagccgccccctgaggaccaggaggacgagatctcagtgtcggaggagctggagcccagcacgctgaccccgtcctcagccctgaagccctccgaccgcatgaccatgagcagcctggtggaaagggcttgctgtcgcgactaccagcgcctcggtctgggcaccctgagcagcagcctgagccgggccaagtctgagcccttccgcatttctccggtcaaccgcatgtatgccatctgccgcagctacccagggctgctgatcgtgccccagagtgtccaggacaacgccctgcagcgcgtgtcccgctgctaccgccagaaccgcttccccgtggtctgctggcgcagcgggcggtccaaggcggtgctgctgcgctctggaggcctgcatggcaaaggtgtcgtcggcctcttcaaggcccagaacgcaccttctccaggccagtcccaggcggactcgagtagcctggagcaggagaagtacctgcaggctgtggtcagctccatgccccgctacgccgacgcgtcgggacgcaacacgcttagcggcttctcctcagcccacatgggcagtcacgttcccagccccagagccagggtcaccacgctgtccaaccccatggcggcctcggcctccagacggaccgcaccccgaggtaagtggggcagtgtccggaccagtggacgcagcagtggccttggcaccgatgtgggctcccggctagctggcagagacgcgctggccccaccccaggccaacgggggccctcccgacccgggcttcctgcgtccgcagcgagcagccctctatatccttggggacaaagcccagctcaagggtgtgcggtcagaccccctgcagcagtgggagctggtgcccattgaggtattcgaggcacggcaggtgaaggctagcttcaagaagctgctgaaagcatgtgtcccaggctgccccgctgctgagcccagcccagcctccttcctgcgctcactggaggactcagagtggctgatccagatccacaagctgctgcaggtgtctgtgctggtggtggagctcctggattcaggctcctccgtgctggtgggcctggaggatggctgggacatcaccacccaggtggtatccttggtgcagctgctctcagaccccttctaccgcacgctggagggctttcgcctgctggtggagaaggagtggctgtccttcggccatcgcttcagccaccgtggagctcacaccctggccgggcagagcagcggcttcacacccgtcttcctgcagttcctggactgcgtacaccaggtccacctgcagttccccatggagtttgagttcagccagttctacctcaagttcctcggctaccaccatgtgtcccgccgtttccggaccttcctgctcgactctgactatgagcgcattgagctggggctgctgtatgaggagaagggggaacgcaggggccaggtgccgtgcaggtctgtgtgggagtatgtggaccggctgagcaagaggacgcctgtgttccacaattacatgtatgcgcccgaggacgcagaggtcctgcggccctacagcaacgtgtccaacctgaaggtgtgggacttctacactgaggagacgctggccgagggccctccctatgactgggaactggcccaggggccccctgaacccccagaggaagaacggtctgatggaggcgctccccagagcaggcgccgcgtggtgtggccctgttacgacagctgcccgcgggcccagcctgacgccatctcacgcctgctggaggagctgcagaggctggagacagagttgggccaacccgctgagcgctggaaggacacctgggaccgggtgaaggctgcacagcgcctcgagggccggccagacggccgtggcacccctagctccctccttgtgtccaccgcaccccaccaccgtcgctcgctgggtgtgtacctgcaggaggggcccgtgggctccaccctgagcctcagcctggacagcgaccagagtagtggctcaaccacatccggctcccgtcaggctgcccgccgcagcaccagcaccctgtacagccagttccagacagcagagagtgagaacaggtcctacgagggcactctgtacaagaagggggccttcatgaagccttggaaggcccgctggttcgtgctggacaagaccaagcaccagctgcgctactacgaccaccgtgtggacacagagtgcaagggtgtcatcgacttggcggaggtggaggctgtggcacctggcacgcccactatgggtgcccctaagactgtggacgagaaggccttctttgacgtgaagacaacgcgtcgcgtttacaacttctgtgcccaggacgtgccctcggcccagcagtgggtggaccggatccagagctgcctgtcggacgcctgagcctcccagccctgcccggctgctctgcttccggtcgttaccgaccactaggggtggtgttgggacacctgggcgagatgtgagggtgggctcacttgagccactgaaaccagccaggtcttccctcaggccggacagatggcgcctgaccgaagttcctggcacctggaaaacccacaggacgacatggccgtgaccggtagtgctagaaaccagtcttcgagcccccagtgccacaccatgtccccccacctgcatacctgtggtctccccctgccaggcaccctgtgctgggcacagggacatccctgccaggcctagagggccttgtgtttttaaggcagtcaaatcttgcagcctggttcagtgccagctccaagggctattgggtagctgcaagggtcaattatgcattcctgtgagtcaggtttttccaacccaggcccttgactctgccctgagcttgcagctggatacaaagtgcaaaaaagcttggctccttctgtattctttaaaaacaaaacaacaacaaaaaaaaactgtaaaaacagcctccatgtccacgccct

SEQ ID NO: 367820 - DNA, 6172 bp, Homo sapiens
ggaagatggcggcgggaacctggtcgccgtgccgccgcgccgccgccgcggagcgaaccaggggtgtccggggtgcgcggtccaggccggggccgggccatgagcgcgccgtcctcgagtccccgagccgcggagcccgcccgcgcccctcgggccgccccgcgtccctcgccatggcgcggctcgcggactacttcgtgctggtggcgttcgggccgcacccgcgcgggagtggggaaggccaggccagattctgcagcgcttcccagagaaggactgggaggacaacccattcccccagggcatcgagctgttttgccagcccagcgggtggcagctgtgtcccgagaggaatccaccgaccttctttgttgctgtcctcaccgacatcaactccgagcgccactactgcgcctgcttgaccttctgggagccagcggagccttcacaggaaacgacgcgcgtggaggatgccacagagagggaggaagagggggatgagggaggccagacccacctgtctcccacagcacctgccccatctgcccagctgtttgcaccgaagacgctggtactggtgtcgcgactcgaccacacggaggtgttcaggaacagccttggcctcatctatgccatccacgtggagggcctgaatgtgtgcctggagaacgtgattgggaacctgctgacgtgcactgtgcccctggctgggggctcgcagaggacgatctctttgggggctggtgaccggcaggtcatccagactccactggccgactcgctgcccgtcagccgctgcagcgtggccctgctcttccgccagctaggcatcaccaacgtgctgtctttgttctgtgccgccctcacggagcacaaggttctcttcctgtcccggagctaccagcggctcgccgatgcctgtaggggcctcctggcactgctgtttcctctcagatacagcttcacctatgtgcccatcctgccggctcagctgctggaggtcctcagcacacccacgcccttcatcattggggtcaacgcggccttccaggcagagacccaggagctgctcgatgtgattgttgctgatctggatggagggacggtcaccattcctgagtgtgtgcacattccacccttgccagagccactgcagagtcagacgcacagtgtgctgagcatggtcctggacccggagctggagttggctgacctcgccttccctccgcccacgacatccacctcctccctgaagatgcaggacaaggagctgcgcgcggtcttcctgcggctgttcgctcagctgctgcagggctatcgctggtgcctgcacgtcgtgcgcatccacccggagcctgtcatccgcttccataaggcagccttcctgggccagcgtgggctggtagaggacgatttcctgatgaaggtgctggagggcatggcctttgctggctttgtgtcagagcgtggggtcccataccgccctacggacctgttcgatgagctggtggcccacgaggtggcaaggatgcgggcggatgagaaccacccccagcgtgtcctgcgtcacgtccaggaactggcagagcagctctacaagaacgagaacccgtacccagccgtggcgatgcacaaggtacagaggcccggtgagagcagccacctgcgacgggtgccccgacccttcccccggctggatgagggcaccgtgcagtggatcgtggaccaggctgcagccaagatgcagggtgcacccccagctgtgaaggccgagaggaggaccaccgtgccctcagggccccccatgactgccatactggagcggtgcagtgggctgcatgtcaacagcgcccggcggctggaggttgtgcgcaactgcatctcctacgtgtttgaggggaaaatgcttgaggccaagaagctgctcccagccgtgttgagggccctgaaggggcgagctgcccgccgctgcctcgcccaggagctgcacctgcatgtgcagcagaaccgtgcggtcctggaccaccagcagtttgactttgtcgtccgtatgatgaactgctgcctgcaggactgcacttctctggacgagcatggcattgcggcggctctgctgcctctggtcacagccttctgccggaagctgagcccgggggtgacgcagtttgcatacagctgtgtgcaggagcacgtggtgtggagcacgccacagttctgggaggccatgttctatggggatgtgcagactcacatccgggccctctacctggagcccacggaggacctggcccccgcccaggaggttggggaggcaccttcccaggaggacgagcgctctgccctagacgtggcttctgagcagcggcgcttgtggccaactctgagtcgtgagaagcagcaggagctggtgcagaaggaggagagcacggtgttcagccaggccatccactatgccaaccgcatgagctacctcctcctgcccctggacagcagcaagagccgcctacttcgggagcgtgccgggctgggcgacctggagagcgccagcaacagcctggtcaccaacagcatggctggcagtgtggccgagagctatgacacggagagcggcttcgaggatgcagagacctgcgacgtagctggggctgtggtccgcttcatcaaccgctttgtggacaaggtctgcacggagagtggggtcaccagcgaccacctcaaggggctgcatgtcatggtgccagacattgtccagatgcacatcgagaccctggaggccgtgcagcgggagagccggaggctgccgcccatccagaagcccaagctgctgcggccgcgcctgctgccgggtgaggagtgtgtgctggacggcctgcgcgtctacctgctgccggatgggcgtgaggagggcgcggggggcagtgctgggggaccagcattgctcccagctgagggcgccgtcttcctcaccacgtaccgggtcatcttcacggggatgcccacggaccccctggttggggagcaggtggtggtccgctccttcccggtggctgcgctgaccaaggagaagcgcatcagcgtccagacccctgtggaccagctcctgcaggacgggctccagctgcgctcctgcacattccagctgctgaaaatggcctttgacgaggaggtggggtctgacagcgccgagctcttccgtaagcagctgcataagctgcggtacccgccggacatcagggccacctttgcgttcaccttgggctctgcccacacacctggccggccaccgcgagtcaccaaggacaagggtccttccctcagaaccctgtcccggaacctggtcaagaacgccaagaagaccatcgggcggcagcatgtcactcgcaagaagtacaacccccccagctgggagcaccggggccagccgccccctgaggaccaggaggacgagatctcagtgtcggaggagctggagcccagcacgctgaccccgtcctcagccctgaagccctccgaccgcatgaccatgagcagcctggtggaaagggcttgctgtcgcgactaccagcgcctcggtctgggcaccctgagcagcagcctgagccgggccaagtctgagcccttccgcatttctccggtcaaccgcatgtatgccatctgccgcagctacccagggctgctgatcgtgccccagagtgtccaggacaacgccctgcagcgcgtgtcccgctgctaccgccagaaccgcttccccgtggtctgctggcgcagcgggcggtccaaggcggtgctgctgcgctctggaggcctgcatggcaaaggtgtcgtcggcctcttcaaggcccagaacgcaccttctccaggccagtcccaggcggactcgagtagcctggagcaggagaagtacctgcaggctgtggtcagctccatgccccgctacgccgacgcgtcgggacgcaacacgcttagcggcttctcctcagcccacatgggcagtcacgttcccagccccagagccagggtcaccacgctgtccaaccccatggcggcctcggcctccagacggaccgcaccccgaggtaagtggggcagtgtccggaccagtggacgcagcagtggccttggcaccgatgtgggctcccggctagctggcagagacgcgctggccccaccccaggccaacgggggccctcccgacccgggcttcctgcgtccgcagcgagcagccctctatatccttggggacaaagcccagctcaagggtgtgcggtcagaccccctgcagcagtgggagctggtgcccattgaggtattcgaggcacggcaggtgaaggctagcttcaagaagctgctgaaagcatgtgtcccaggctgccccgctgctgagcccagcccagcctccttcctgcgctcactggaggactcagagtggctgatccagatccacaagctgctgcaggtgtctgtgctggtggtggagctcctggattcaggctcctccgtgctggtgggcctggaggatggctgggacatcaccacccaggtggtatccttggtgcagctgctctcagaccccttctaccgcacgctggagggctttcgcctgctggtggagaaggagtggctgtccttcggccatcgcttcagccaccgtggagctcacaccctggccgggcagagcagcggcttcacacccgtcttcctgcagttcctggactgcgtacaccaggtccacctgcagttccccatggagtttgagttcagccagttctacctcaagttcctcggctaccaccatgtgtcccgccgtttccggaccttcctgctcgactctgactatgagcgcattgagctggggctgctgtatgaggagaagggggaacgcaggggccaggtgccgtgcaggtctgtgtgggagtatgtggaccggctgagcaagaggacgcctgtgttccacaattacatgtatgcgcccgaggacgcagaggtcctgcggccctacagcaacgtgtccaacctgaaggtgtgggacttctacactgaggagacgctggccgagggccctccctatgactgggaactggcccaggggccccctgaacccccagaggaagaacggtctgatggaggcgctccccagagcaggcgccgcgtggtgtggccctgttacgacagctgcccgcgggcccagcctgacgccatctcacgcctgctggaggagctgcagaggctggagacagagttgggccaacccgctgagcgctggaaggacacctgggaccgggtgaaggctgcacagcgcctcgagggccggccagacggccgtggcacccctagctccctccttgtgtccaccgcaccccaccaccgtcgctcgctgggtgtgtacctgcaggaggggcccgtgggctccaccctgagcctcagcctggacagcgaccagagtagtggctcaaccacatccggctcccgtcaggctgcccgccgcagcaccagcaccctgtacagccagttccagacagcagagagtgagaacaggtcctacgagggcactctgtacaagaagggggccttcatgaagccttggaaggcccgctggttcgtgctggacaagaccaagcaccagctgcgctactacgaccaccgtgtggacacagagtgcaagggtgtcatcgacttggcggaggtggaggctgtggcacctggcacgcccactatgggtgcccctaagactgtggacgagaaggccttctttgacgtgaagacaacgcgtcgcgtttacaacttctgtgcccaggacgtgccctcggcccagcagtgggtggaccggatccagagctgcctgtcggacgcctgagcctcccagccctgcccggctgctctgcttccggtcgttaccgaccactaggggtggtgttgggacacctgggcgagatgtgagggtgggctcacttgagccactgaaaccagccaggtcttccctcaggccggacagatggcgcctgaccgaagttcctggcacctggaaaacccacagcagggcacgagtgacctgagaggcccactcaggcagaagagacgcaagctgggccgtccaactggtttcaactgccagctttaccaatgcagcatttattttaaaattaaattaaattaaaaaaaaaagattgcatca

SEQ ID NO: 367821 - DNA, 5662 bp, Homo sapiens
ggaagatggcggcgggaacctggtcgccgtgccgccgcgccgccgccgcggagcgaaccaggggtgtccggggtgcgcggtccaggccggggccgggccatgagcgcgccgtcctcgagtccccgagccgcggagcccgcccgcgcccctcgggccgccccgcgtccctcgccatggcgcggctcgcggactacttcgtgctggtggcgttcgggccgcacccgcgcgggagtggggaaggccaggccagattctgcagcgcttcccagagaaggactgggaggacaacccattcccccagggcatcgagctgttttgccagcccagcgggtggcagctgtgtcccgagaggaatccaccgaccttctttgttgctgtcctcaccgacatcaactccgagcgccactactgcgcctgcttgaccttctgggagccagcggagccttcacaggaaacgacgcgcgtggaggatgccacagagagggaggaagagggggatgagggaggccagacccacctgtctcccacagcacctgccccatctgcccagctgtttgcaccgaagacgctggtactggtgtcgcgactcgaccacacggaggtgttcaggaacagccttggcctcatctatgccatccacgtggagggcctgaatgtgtgcctggagaacgtgattgggaacctgctgacgtgcactgtgcccctggctgggggctcgcagaggacgatctctttgggggctggtgaccggcaggtcatccagactccactggccgactcgctgcccgtcagccgctgcagcgtggccctgctcttccgccagctaggcatcaccaacgtgctgtctttgttctgtgccgccctcacggagcacaaggttctcttcctgtcccggagctaccagcggctcgccgatgcctgtaggggcctcctggcactgctgtttcctctcagatacagcttcacctatgtgcccatcctgccggctcagctgctggaggtcctcagcacacccacgcccttcatcattggggtcaacgcggccttccaggcagagacccaggagctgctcgatgtgattgttgctgatctggatggagggacggtcaccattcctgagtgtgtgcacattccacccttgccagagccactgcagagtcagacgcacagtgtgctgagcatggtcctggacccggagctggagttggctgacctcgccttccctccgcccacgacatccacctcctccctgaagatgcaggacaaggagctgcgcgcggtcttcctgcggctgttcgctcagctgctgcagggctatcgctggtgcctgcacgtcgtgcgcatccacccggagcctgtcatccgcttccataaggcagccttcctgggccagcgtgggctggtagaggacgatttcctgatgaaggtgctggagggcatggcctttgctggctttgtgtcagagcgtggggtcccataccgccctacggacctgttcgatgagctggtggcccacgaggtggcaaggatgcgggcggatgagaaccacccccagcgtgtcctgcgtcacgtccaggaactggcagagcagctctacaagaacgagaacccgtacccagccgtggcgatgcacaaggtacagaggcccggtgagagcagccacctgcgacgggtgccccgacccttcccccggctggatgagggcaccgtgcagtggatcgtggaccaggctgcagccaagatgcagggtgcacccccagctgtgaaggccgagaggaggaccaccgtgccctcagggccccccatgactgccatactggagcggtgcagtgggctgcatgtcaacagcgcccggcggctggaggttgtgcgcaactgcatctcctacgtgtttgaggggaaaatgcttgaggccaagaagctgctcccagccgtgttgagggccctgaaggggcgagctgcccgccgctgcctcgcccaggagctgcacctgcatgtgcagcagaaccgtgcggtcctggaccaccagcagtttgactttgtcgtccgtatgatgaactgctgcctgcaggactgcacttctctggacgagcatggcattgcggcggctctgctgcctctggtcacagccttctgccggaagctgagcccgggggtgacgcagtttgcatacagctgtgtgcaggagcacgtggtgtggagcacgccacagttctgggaggccatgttctatggggatgtgcagactcacatccgggccctctacctggagcccacggaggacctggcccccgcccaggaggttggggaggcaccttcccaggaggacgagcgctctgccctagacgtggcttctgagcagcggcgcttgtggccaactctgagtcgtgagaagcagcaggagctggtgcagaaggaggagagcacggtgttcagccaggccatccactatgccaaccgcatgagctacctcctcctgcccctggacagcagcaagagccgcctacttcgggagcgtgccgggctgggcgacctggagagcgccagcaacagcctggtcaccaacagcatggctggcagtgtggccgagagctatgacacggagagcggcttcgaggatgcagagacctgcgacgtagctggggctgtggtccgcttcatcaaccgctttgtggacaaggtctgcacggagagtggggtcaccagcgaccacctcaaggggctgcatgtcatggtgccagacattgtccagatgcacatcgagaccctggaggccgtgcagcgggagagccggaggctgccgcccatccagaagcccaagctgctgcggccgcgcctgctgccgggtgaggagtgtgtgctggacggcctgcgcgtctacctgctgccggatgggcgtgaggagggcgcggggggcagtgctgggggaccagcattgctcccagctgagggcgccgtcttcctcaccacgtaccgggtcatcttcacggggatgcccacggaccccctggttggggagcaggtggtggtccgctccttcccggtggctgcgctgaccaaggagaagcgcatcagcgtccagacccctgtggaccagctcctgcaggacgggctccagctgcgctcctgcacattccagctgctgaaaatggcctttgacgaggaggtggggtctgacagcgccgagctcttccgtaagcagctgcataagctgcggtacccgccggacatcagggccacctttgcgttcaccttgggctctgcccacacacctggccggccaccgcgagtcaccaaggacaagggtccttccctcagaaccctgtcccggaacctggtcaagaacgccaagaagaccatcgggcggcagcatgtcactcgcaagaagtacaacccccccagctgggagcaccggggccagccgccccctgaggaccaggaggacgagatctcagtgtcggaggagctggagcccagcacgctgaccccgtcctcagccctgaagccctccgaccgcatgaccatgagcagcctggtggaaagggcttgctgtcgcgactaccagcgcctcggtctgggcaccctgagcagcagcctgagccgggccaagtctgagcccttccgcatttctccggtcaaccgcatgtatgccatctgccgcagctacccagggctgctgatcgtgccccagagtgtccaggacaacgccctgcagcgcgtgtcccgctgctaccgccagaaccgcttccccgtggtctgctggcgcagcgggcggtccaaggcggtgctgctgcgctctggaggcctgcatggcaaaggtgtcgtcggcctcttcaaggcccagaacgcaccttctccaggccagtcccaggcggactcgagtagcctggagcaggagaagtacctgcaggctgtggtcagctccatgccccgctacgccgacgcgtcgggacgcaacacgcttagcggcttctcctcagcccacatgggcagtcacgttcccagccccagagccagggtcaccacgctgtccaaccccatggcggcctcggcctccagacggaccgcaccccgaggtaagtggggcagtgtccggaccagtggacgcagcagtggccttggcaccgatgtgggctcccggctagctggcagagacgcgctggccccaccccaggccaacgggggccctcccgacccgggcttcctgcgtccgcagcgagcagccctctatatccttggggacaaagcccagctcaagggtgtgcggtcagaccccctgcagcagtgggagctggtgcccattgaggtattcgaggcacggcaggtgaaggctagcttcaagaagctgctgaaagcatgtgtcccaggctgccccgctgctgagcccagcccagcctccttcctgcgctcactggaggactcagagtggctgatccagatccacaagctgctgcaggtgtctgtgctggtggtggagctcctggattcaggctcctccgtgctggtgggcctggaggatggctgggacatcaccacccaggtggtatccttggtgcagctgctctcagaccccttctaccgcacgctggagggctttcgcctgctggtggagaaggagtggctgtccttcggccatcgcttcagccaccgtggagctcacaccctggccgggcagagcagcggcttcacacccgtcttcctgcagttcctggactgcgtacaccaggtccacctgcagttccccatggagtttgagttcagccagttctacctcaagttcctcggctaccaccatgtgtcccgccgtttccggaccttcctgctcgactctgactatgagcgcattgagctggggctgctgtatgaggagaagggggaacgcaggggccaggtgccgtgcaggtctgtgtgggagtatgtggaccggctgagcaagaggacgcctgtgttccacaattacatgtatgcgcccgaggacgcagaggtcctgcggccctacagcaacgtgtccaacctgaaggtgtgggacttctacactgaggagacgctggccgagggccctccctatgactgggaactggcccaggggccccctgaacccccagaggaagaacggtctgatggaggcgctccccagagcaggcgccgcgtggtgtggccctgttacgacagctgcccgcgggcccagcctgacgccatctcacgcctgctggaggagctgcagaggctggagacagagttgggccaacccgctgagcgctggaaggacacctgggaccgggtgaaggctgcacagcgcctcgagggccggccagacggccgtggcacccctagctccctccttgtgtccaccgcaccccaccaccgtcgctcgctgggtgtgtacctgcaggaggggcccgtgggctccaccctgagcctcagcctggacagcgaccagagtagtggctcaaccacatccggctcccgtcaggctgcccgccgcagcaccagcaccctgtacagccagttccagacagcagagagtgagaacaggtcctacgagggcactctgtacaagaagggggccttcatgaagccttggaaggcccgctggttcgtgctggacaagaccaagcaccagctgcgctactacgaccactcgcgcaagactgggatcctc

SEQ ID NO: 367822 - DNA, 5270 bp, Homo sapiens
ggaagatggcggcgggaacctggtcgccgtgccgccgcgccgccgccgcggagcgaaccaggggtgtccggggtgcgcggtccaggccggggccgggccatgagcgcgccgtcctcgagtccccgagccgcggagcccgcccgcgcccctcgggccgccccgcgtccctcgccatggcgcggctcgcggactacttcgtgctggtggcgttcgggccgcacccgcgcgggagtggggaaggccaggccagattctgcagcgcttcccagagaaggactgggaggacaacccattcccccagggcatcgagctgttttgccagcccagcgggtggcagctgtgtcccgagaggaatccaccgaccttctttgttgctgtcctcaccgacatcaactccgagcgccactactgcgcctgcttgaccttctgggagccagcggagccttcacaggaaacgacgcgcgtggaggatgccacagagagggaggaagagggggatgagggaggccagacccacctgtctcccacagcacctgccccatctgcccagctgtttgcaccgaagacgctggtactggtgtcgcgactcgaccacacggaggtgttcaggaacagccttggcctcatctatgccatccacgtggagggcctgaatgtgtgcctggagaacgtgattgggaacctgctgacgtgcactgtgcccctggctgggggctcgcagaggacgatctctttgggggctggtgaccggcaggtcatccagactccactggccgactcgctgcccgtcagccgctgcagcgtggccctgctcttccgccagctaggcatcaccaacgtgctgtctttgttctgtgccgccctcacggagcacaaggttctcttcctgtcccggagctaccagcggctcgccgatgcctgtaggggcctcctggcactgctgtttcctctcagatacagcttcacctatgtgcccatcctgccggctcagctgctggaggtcctcagcacacccacgcccttcatcattggggtcaacgcggccttccaggcagagacccaggagctgctcgatgtgattgttgctgatctggatggagggacggtcaccattcctgagtgtgtgcacattccacccttgccagagccactgcagagtcagacgcacagtgtgctgagcatggtcctggacccggagctggagttggctgacctcgccttccctccgcccacgacatccacctcctccctgaagatgcaggacaaggagctgcgcgcggtcttcctgcggctgttcgctcagctgctgcagggctatcgctggtgcctgcacgtcgtgcgcatccacccggagcctgtcatccgcttccataaggcagccttcctgggccagcgtgggctggtagaggacgatttcctgatgaaggtgctggagggcatggcctttgctggctttgtgtcagagcgtggggtcccataccgccctacggacctgttcgatgagctggtggcccacgaggtggcaaggatgcgggcggatgagaaccacccccagcgtgtcctgcgtcacgtccaggaactggcagagcagctctacaagaacgagaacccgtacccagccgtggcgatgcacaaggtacagaggcccggtgagagcagccacctgcgacgggtgccccgacccttcccccggctggatgagggcaccgtgcagtggatcgtggaccaggctgcagccaagatgcagggtgcacccccagctgtgaaggccgagaggaggaccaccgtgccctcagggccccccatgactgccatactggagcggtgcagtgggctgcatgtcaacagcgcccggcggctggaggttgtgcgcaactgcatctcctacgtgtttgaggggaaaatgcttgaggccaagaagctgctcccagccgtgttgagggccctgaaggggcgagctgcccgccgctgcctcgcccaggagctgcacctgcatgtgcagcagaaccgtgcggtcctggaccaccagcagtttgactttgtcgtccgtatgatgaactgctgcctgcaggactgcacttctctggacgagcatggcattgcggcggctctgctgcctctggtcacagccttctgccggaagctgagcccgggggtgacgcagtttgcatacagctgtgtgcaggagcacgtggtgtggagcacgccacagttctgggaggccatgttctatggggatgtgcagactcacatccgggccctctacctggagcccacggaggacctggcccccgcccaggaggttggggaggcaccttcccaggaggacgagcgctctgccctagacgtggcttctgagcagcggcgcttgtggccaactctgagtcgtgagaagcagcaggagctggtgcagaaggaggagagcacggtgttcagccaggccatccactatgccaaccgcatgagctacctcctcctgcccctggacagcagcaagagccgcctacttcgggagcgtgccgggctgggcgacctggagagcgccagcaacagcctggtcaccaacagcatggctggcagtgtggccgagagctatgacacggagagcggcttcgaggatgcagagacctgcgacgtagctggggctgtggtccgcttcatcaaccgctttgtggacaaggtctgcacggagagtggggtcaccagcgaccacctcaaggggctgcatgtcatggtgccagacattgtccagatgcacatcgagaccctggaggccgtgcagcgggagagccggaggctgccgcccatccagaagcccaagctgctgcggccgcgcctgctgccgggtgaggagtgtgtgctggacggcctgcgcgtctacctgctgccggatgggcgtgaggagggcgcggggggcagtgctgggggaccagcattgctcccagctgagggcgccgtcttcctcaccacgtaccgggtcatcttcacggggatgcccacggaccccctggttggggagcaggtggtggtccgctccttcccggtggctgcgctgaccaaggagaagcgcatcagcgtccagacccctgtggaccagctcctgcaggacgggctccagctgcgctcctgcacattccagctgctgaaaatggcctttgacgaggaggtggggtctgacagcgccgagctcttccgtaagcagctgcataagctgcggtacccgccggacatcagggccacctttgcgttcaccttgggctctgcccacacacctggccggccaccgcgagtcaccaaggacaagggtccttccctcagaaccctgtcccggaacctggtcaagaacgccaagaagaccatcgggcggcagcatgtcactcgcaagaagtacaacccccccagctgggagcaccggggccagccgccccctgaggaccaggaggacgagatctcagtgtcggaggagctggagcccagcacgctgaccccgtcctcagccctgaagccctccgaccgcatgaccatgagcagcctggtggaaagggcttgctgtcgcgactaccagcgcctcggtctgggcaccctgagcagcagcctgagccgggccaagtctgagcccttccgcatttctccggtcaaccgcatgtatgccatctgccgcagctacccagggctgctgatcgtgccccagagtgtccaggacaacgccctgcagcgcgtgtcccgctgctaccgccagaaccgcttccccgtggtctgctggcgcagcgggcggtccaaggcggtgctgctgcgctctggaggcctgcatggcaaaggtgtcgtcggcctcttcaaggcccagaacgcaccttctccaggccagtcccaggcggactcgagtagcctggagcaggagaagtacctgcaggctgtggtcagctccatgccccgctacgccgacgcgtcgggacgcaacacgcttagcggcttctcctcagcccacatgggcagtcacgttcccagccccagagccagggtcaccacgctgtccaaccccatggcggcctcggcctccagacggaccgcaccccgaggtaagtggggcagtgtccggaccagtggacgcagcagtggccttggcaccgatgtgggctcccggctagctggcagagacgcgctggccccaccccaggccaacgggggccctcccgacccgggcttcctgcgtccgcagcgagcagccctctatatccttggggacaaagcccagctcaagggtgtgcggtcagaccccctgcagcagtgggagctggtgcccattgaggtattcgaggcacggcaggtgaaggctagcttcaagaagctgctgaaagcatgtgtcccaggctgccccgctgctgagcccagcccagcctccttcctgcgctcactggaggactcagagtggctgatccagatccacaagctgctgcaggtgtctgtgctggtggtggagctcctggattcaggctcctccgtgctggtgggcctggaggatggctgggacatcaccacccaggtggtatccttggtgcagctgctctcagaccccttctaccgcacgctggagggctttcgcctgctggtggagaaggagtggctgtccttcggccatcgcttcagccaccgtggagctcacaccctggccgggcagagcagcggcttcacacccgtcttcctgcagttcctggactgcgtacaccaggtccacctgcagttccccatggagtttgagttcagccagttctacctcaagttcctcggctaccaccatgtgtcccgccgtttccggaccttcctgctcgactctgactatgagcgcattgagctggggctgctgtatgaggagaagggggaacgcaggggccaggtgccgtgcaggtctgtgtgggagtatgtggaccggctgagcaagaggacgcctgtgttccacaattacatgtatgcgcccgaggacgcagaggtcctgcggccctacagcaacgtgtccaacctgaaggtgtgggacttctacactgaggagacgctggccgagggccctccctatgactgggaactggcccaggggccccctgaacccccagaggaagaacggtctgatggaggcgctccccagagcaggcgccgcgtggtgtggccctgttacgacagctgcccgcgggcccagcctgacgccatctcacgcctgctggagtgcaggcgagtttctagaaccagagtctatataaagagagaactaacgccaaaaa

SEQ ID NO: 367823 - DNA, 2702 bp, Homo sapiens
tagccaggctgtcaccgcgagtaaggatatgtcgaccgggcctccgggaagggcttgctgtcgcgactaccagcgcctcggtctgggcaccctgagcagcagcctgagccgggccaagtctgagcccttccgcatttctccggtcaaccgcatgtatgccatctgccgcagctacccagggctgctgatcgtgccccagagtgtccaggacaacgccctgcagcgcgtgtcccgctgctaccgccagaaccgcttccccgtggtctgctggcgcagcgggcggtccaaggcggtgctgctgcgctctggaggcctgcatggcaaaggtgtcgtcggcctcttcaaggcccagaacgcaccttctccaggccagtcccaggcggactcgagtagcctggagcaggagaagtacctgcaggctgtggtcagctccatgccccgctacgccgacgcgtcgggacgcaacacgcttagcggcttctcctcagcccacatgggcagtcacgttcccagccccagagccagggtcaccacgctgtccaaccccatggcggcctcggcctccagacggaccgcaccccgaggtaagtggggcagtgtccggaccagtggacgcagcagtggccttggcaccgatgtgggctcccggctagctggcagagacgcgctggccccaccccaggccaacgggggccctcccgacccgggcttcctgcgtccgcagcgagcagccctctatatccttggggacaaagcccagctcaagggtgtgcggtcagaccccctgcagcagtgggagctggtgcccattgaggtattcgaggcacggcaggtgaaggctagcttcaagaagctgctgaaagcatgtgtcccaggctgccccgctgctgagcccagcccagcctccttcctgcgctcactggaggactcagagtggctgatccagatccacaagctgctgcaggtgtctgtgctggtggtggagctcctggattcaggctcctccgtgctggtgggcctggaggatggctgggacatcaccacccaggtggtatccttggtgcagctgctctcagaccccttctaccgcacgctggagggctttcgcctgctggtggagaaggagtggctgtccttcggccatcgcttcagccaccgtggagctcacaccctggccgggcagagcagcggcttcacacccgtcttcctgcagttcctggactgcgtacaccaggtccacctgcagttccccatggagtttgagttcagccagttctacctcaagttcctcggctaccaccatgtgtcccgccgtttccggaccttcctgctcgactctgactatgagcgcattgagctggggctgctgtatgaggagaagggggaacgcaggggccaggtgccgtgcaggtctgtgtgggagtatgtggaccggctgagcaagaggacgcctgtgttccacaattacatgtatgcgcccgaggacgcagaggtcctgcggccctacagcaacgtgtccaacctgaaggtgtgggacttctacactgaggagacgctggccgagggccctccctatgactgggaactggcccaggggccccctgaacccccagaggaagaacggtctgatggaggcgctccccagagcaggcgccgcgtggtgtggccctgttacgacagctgcccgcgggcccagcctgacgccatctcacgcctgctggaggagctgcagaggctggagacagagttgggccaacccgctgagcgctggaaggacacctgggaccgggtgaaggctgcacagcgcctcgagggccggccagacggccgtggcacccctagctccctccttgtgtccaccgcaccccaccaccgtcgctcgctgggtgtgtacctgcaggaggggcccgtgggctccaccctgagcctcagcctggacagcgaccagagtagtggctcaaccacatccggctcccgtcaggctgcccgccgcagcaccagcaccctgtacagccagttccagacagcagagagtgagaacaggtcctacgagggcactctgtacaagaagggggccttcatgaagccttggaaggcccgctggttcgtgctggacaagaccaagcaccagctgcgctactacgaccaccgtgtggacacagagtgcaagggtgtcatcgacttggcggaggtggaggctgtggcacctggcacgcccactatgggtgcccctaagactgtggacgagaaggccttctttgacgtgaagacaacgcgtcgcgtttacaacttctgtgcccaggacgtgccctcggcccagcagtgggtggaccggatccagagctgcctgtcggacgcctgagcctcccagccctgcccggctgctctgcttccggtcgttaccgaccactaggggtgggcagggccgccccggccatgtttacagccccggccctcgacagtattgaggccccgagcccccagcacttgtgtgtacagcccccgtccccgccccgccccgcccggccggccctaacttattttggcgtcacagctgagcaccgtgccgggaggtggccaaggtacagcccgcaatgggcctgtaaatagtccggccccgtcagcgtgtgctggtccagccagcggctgcaggcgagtttctagaaccagagtctatataaagagagaactaacgccaaaaa

SEQ ID NO: 367824 - DNA, 3444 bp, Homo sapiens
ggaagatggcggcgggaacctggtcgccgtgccgccgcgccgccgccgcggagcgaaccaggggtgtccggggtgcgcggtccaggccggggccgggccatgagcgcgccgtcctcgagtccccgagccgcggagcccgcccgcgcccctcgggccgccccgcgtccctcgccatggcgcggctcgcggactacttcgtgctggtggcgttcgggccgcacccgcgcgggagtggggaaggccaggccagattctgcagcgcttcccagagaaggactgggaggacaacccattcccccagggcatcgagctgttttgccagcccagcgggtggcagctgtgtcccgagaggaatccaccgaccttctttgttgctgtcctcaccgacatcaactccgagcgccactactgcgcctgcttgaccttctgggagccagcggagccttcacaggaaacgacgcgcgtggaggatgccacagagagggaggaagagggggatgagggaggccagacccacctgtctcccacagcacctgccccatctgcccagctgtttgcaccgaagacgctggtactggtgtcgcgactcgaccacacggaggtgttcaggaacagccttggcctcatctatgccatccacgtggagggcctgaatgtgtgcctggagaacgtgattgggaacctgctgacgtgcactgtgcccctggctgggggctcgcagaggacgatctctttgggggctggtgaccggcaggtcatccagactccactggccgactcgctgcccgtcagccgctgcagcgtggccctgctcttccgccagctaggcatcaccaacgtgctgtctttgttctgtgccgccctcacggagcacaaggttctcttcctgtcccggagctaccagcggctcgccgatgcctgtaggggcctcctggcactgctgtttcctctcagatacagcttcacctatgtgcccatcctgccggctcagctgctggaggtcctcagcacacccacgcccttcatcattggggtcaacgcggccttccaggcagagacccaggagctgctcgatgtgattgttgctgatctggatggagggacggtcaccattcctgagtgtgtgcacattccacccttgccagagccactgcagagtcagacgcacagtgtgctgagcatggtcctggacccggagctggagttggctgacctcgccttccctccgcccacgacatccacctcctccctgaagatgcaggacaaggagctgcgcgcggtcttcctgcggctgttcgctcagctgctgcagggctatcgctggtgcctgcacgtcgtgcgcatccacccggagcctgtcatccgcttccataaggcagccttcctgggccagcgtgggctggtagaggacgatttcctgatgaaggtgctggagggcatggcctttgctggctttgtgtcagagcgtggggtcccataccgccctacggacctgttcgatgagctggtggcccacgaggtggcaaggatgcgggcggatgagaaccacccccagcgtgtcctgcgtcacgtccaggaactggcagagcagctctacaagaacgagaacccgtacccagccgtggcgatgcacaaggtacagaggcccggtgagagcagccacctgcgacgggtgccccgacccttcccccggctggatgagggcaccgtgcagtggatcgtggaccaggctgcagccaagatgcagggtgcacccccagctgtgaaggccgagaggaggaccaccgtgccctcagggccccccatgactgccatactggagcggtgcagtgggctgcatgtcaacagcgcccggcggctggaggttgtgcgcaactgcatctcctacgtgtttgaggggaaaatgcttgaggccaagaagctgctcccagccgtgttgagggccctgaaggggcgagctgcccgccgctgcctcgcccaggagctgcacctgcatgtgcagcagaaccgtgcggtcctggaccaccagcagtttgactttgtcgtccgtatgatgaactgctgcctgcaggactgcacttctctggacgagcatggcattgcggcggctctgctgcctctggtcacagccttctgccggaagctgagcccgggggtgacgcagtttgcatacagctgtgtgcaggagcacgtggtgtggagcacgccacagttctgggaggccatgttctatggggatgtgcagactcacatccgggccctctacctggagcccacggaggacctggcccccgcccaggaggttggggaggcaccttcccaggaggacgagcgctctgccctagacgtggcttctgagcagcggcgcttgtggccaactctgagtcgtgagaagcagcaggagctggtgcagaaggaggagagcacggtgttcagccaggccatccactatgccaaccgcatgagctacctcctcctgcccctggacagcagcaagagccgcctacttcgggagcgtgccgggctgggcgacctggagagcgccagcaacagcctggtcaccaacagcatggctggcagtgtggccgagagctatgacacggagagcggcttcgaggatgcagagacctgcgacgtagctggggctgtggtccgcttcatcaaccgctttgtggacaaggtctgcacggagagtggggtcaccagcgaccacctcaaggggctgcatgtcatggtgccagacattgtccagatgcacatcgagaccctggaggccgtgcagcgggagagccggaggctgccgcccatccagaagcccaagctgctgcggccgcgcctgctgccgggtgaggagtgtgtgctggacggcctgcgcgtctacctgctgccggatgggcgtgaggagggcgcggggggcagtgctgggggaccagcattgctcccagctgagggcgccgtcttcctcaccacgtaccgggtcatcttcacggggatgcccacggaccccctggttggggagcaggtggtggtccgctccttcccggtggctgcgctgaccaaggagaagcgcatcagcgtccagacccctgtggaccagctcctgcaggacgggctccagctgcgctcctgcacattccagctgctgaaaatggcctttgacgaggaggtggggtctgacagcgccgagctcttccgtaagcagctgcataagctgcggtacccgccggacatcagggccacctttgcgttcaccttgggctctgcccacacacctggccggccaccgcgagtcacagctgagcaccgtgccgggaggtggccaaggtacagcccgcaatgggcctgtaaatagtccggccccgtcagcgtgtgctggtccagccagcggctgcaggcgagtttctagaaccagagtctatataaagagagaactaacgccaaaaa

SEQ ID NO: 367825 - DNA, 343 bp, Homo sapiens
ggccctctacctggagcccacggaggacctggcccccgcccaggtgcgcagggactccctgggctgggggctgggggctaggggctggggcagcgtggccccggctcatgcgtgtggtgccgtggcaggaggttggggaggcaccttcccaggaggacgagcgctctgccctagacgtggcttctgagcagcggcgcttgtggccaactctgagtcgtgagaagcagcaggagctggtgcagaaggaggagagcacggtgttcagccaggccatccactatgccaaccgcatgagctacctcctcctgcccctggacagcagcaagagccgcctacttcggga

SEQ ID NO: 367826 - DNA, 1075 bp, Homo sapiens
ttagattttgcatgacctaggaggcttaggacccagggggcgcctttcagctgaaaaacagctcgcgctgcagcaagctagctgggaagctcccagttctaaagagaggctgtttaccagaacagcataacaagggcaggtctgactgcaaggctgggactgggaggcagagccgccgccaagggggcctcggttaaacactggtcgttcaatcacctgcaagacgaaggaggcaaggatgctgttggcctgggtacaagcattcctcgtcagcaacatgctcctagcagaagcctatggatctggaggtgagattacaatctttcctttccgcagcaacttcatgaaacagaaggggtaaagccccctatttcccaaacagggccaggatgacaggaaacgaagcgtttagccggtttctgttgtcccgtgaaagcttttccacccctcctttccttgtcaggggcttgcagctccatctttgccattaagaacaaaggcaagaagccactttctctctgcctttccttgctcatgagtggatggagcttgggggttcatctcccctactccccaagtcctgttctttctaagccctttgcatggtgtggtcctccttccccagcctccttctgtggttctcctgcagaggggagtgggagcttggagtctcatccagtcagcgatgaggccggtttcctccgtttgaggctgtcttgaatcttttgcctgacggagtcaaggctcctggagaattctcctgggagggagtatttgccttttaaacgggcagaaggtggccgtatccgtgaaggaggaaacaccggagtttatgtaacgtggccattacaacacagggacaaatgtcacgtctgggcgccccccgtcccaaaactcccagctcctcaaagggaccctaagccaggcctcctcctctccatctcctcctccaaagtggtcacaagttcaagagtaacaacgctttgcacttctgcagcgctttccaggtttcaaaaataaataaaacctaacagtctctgagcgttgactgggggacaggcacaggctgggggct

SEQ ID NO: 367827 - DNA, 1301 bp, Homo sapiens
ggggggtgcgtggggcgtgggggtgttgccacgagaggagagggaggcccagcagggcccggggtcccctaaccaggctgaggttcagcccgggtggtcccggctcccctgtccgccacgctgggcgtcttccgttcgctgcccgctactctgtgtccgggggcttcttttcctcacaggctgtttctgggacaacggccacctgtaccgggaggaccagacctcccccgcgccgggcctccgctgcctcaactggctggacgcgcagagcgggctggcctcggcccccgtgtcgggggccggcaatcacagttactgccgaaacccggacgaggacccgcgcgggccctggtgctacgtcagtggcgaggccggcgtccctgagaaacggccttgcgaggacctgcgctgtccaggtacctgcccgggaccccgggaatccccgctcctggcgctgacaggaagcggctgagacactcgtggcgcacgtgcggccgcgcgatgccggccggccccgctccgcctccgcgccgtccgattggccagggctgtctccaggccgcggggctcaaagcctattggccgccgccgccactcgtatgagctcatccgccgcgagcgcttgtaaacaactgcgcggggcgaggctggggtgaggctaggtctctccgccgcgcgtcctgaggagtggcttttggcccctcagcgtttattgaccgtttgcggagcgtctgcagtgtgctagacccacactgctcacaaccccagctccccaacctcccctgacacacaccgcgggaagaagtcgtttgaggcatctgagcttcagagaagttaagcgatttaccaaaggcaatggcaggggacagatttgaattcacgtttcttagattccagagcgcaggctttttgctcccaaagcagcaagagagttttctaggtttaaatgggataatcaaaataaagcatttattttttattttttattttttgagacggagtctcgttctgtcacccaggctggagtgcagtggcgcaatttcggctcactgcaacttccgccttccgcgttacagtgattctcctgcctcagccgcttgagtagctgggataacaggcgtgcaccaccacgcccagctaatttttgtatttttagtagagacggggtttcaccatgttggccgggctgctctctaactcctgacctcaggtgatccgaccgtctggcctcccaaagtgctgggattacaggcgtgagccaccgctcccggcacaaagtaaaacattttacctaaggactg

SEQ ID NO: 367828 - DNA, 2453 bp, Homo sapiens
ttagattttgcatgacctaggaggcttaggacccagggggcgcctttcagctgaaaaacagctcgcgctgcagcaagctagctgggaagctcccagttctaaagagaggctgtttaccagaacagcataacaagggcaggtctgactgcaaggctgggactgggaggcagagccgccgccaagggggcctcggttaaacactggtcgttcaatcacctgcaagacgaaggaggcaaggatgctgttggcctgggtacaagcattcctcgtcagcaacatgctcctagcagaagcctatggatctggaggctgtttctgggacaacggccacctgtaccgggaggaccagacctcccccgcgccgggcctccgctgcctcaactggctggacgcgcagagcgggctggcctcggcccccgtgtcgggggccggcaatcacagttactgccgaaacccggacgaggacccgcgcgggccctggtgctacgtcagtggcgaggccggcgtccctgagaaacggccttgcgaggacctgcgctgtccagagaccacctcccaggccctgccagccttcacgacagaaatccaggaagcgtctgaagggccaggtgcagatgaggtgcaggtgttcgctcctgccaacgccctgcccgctcggagtgaggcggcagctgtgcagccagtgattgggatcagccagcgggtgcggatgaactccaaggagaaaaaggacctgggaactctggggggaaggatttgaaagaacagcatgatcagaaagtatgtgagagggagatgcagcgaatcactctgcccttgtctgccttcaccaaccccacctgtgagattgtggatgagaagactgtcgtggtccacaccagccagactccagttgaccctcaggagggcagcaccccccttatgggccaggccgggactcctggggcctgagcccccccagtgggcaggagcccatgcagacactggtgcaggacagcccaccctcctacagctaggaggaactaccactttgtgttctggttaaaaccctaccactcccccgcttttttggcgaatcctagtaagagtgacagaagcaggtggccctgtgggctgagggtaaggctgggtagggtcctaacagtgctccttgtccatcccttggagcagattttgtctgtggatggagacagtggcagctcccacagtgatgctgctgctaagggcttccaaacattgcctgcacccctggaactgaaccagggatagacggggagctcccccaggctcctctgtgctttactaagatggcctcagtctccactgtgggcttgagtggcatacactgttattcatggttaaggtaaagcaggtcaagggatggcattgaaaaaatatatttagtttttaaaatatttgggatggaactccctactgacctctgagaactggaaacgagtttgtacagaagtcagaactttgggttgggaatgagatctaggttgtggctgctggtatgcttcagcttgctggcaatgatgtgccttgacaaccgtgggccaggcctgggcccagggactcttcctgtttcataaggaaaggaagaattgcactgagcattccacttaggaagaggatagagaaggatctgctccgcctttggccacaggagcagaggcagacctgggatgccccagtttctcttcagggatggatagtgacctgtcttcattttgcacaggtaagagagtagttagctaacctatgggaattatactgtggggccttgtgagctgcttctaagaggctaacctggaaactaagctcagaggcaaggtaataaagcacttcagggcttgctccccaagtgggcctgatttagcaggtggtcctgcgggcgtccaggtcagcaccttcctgtagggcactggggctagggtcacagcccctaactcataaagcaatcaaagaaccattagaaagggctcattaagccttttggacacaggaccccagagaggaaaaagtgacttgcccaaggtcgtaagcaagctactggcatggcaagagcccagcttcctgacggagcgcaacatttctccactgcactgtgctagcagctcagcagggcctctaacctgtgatgtcacactcaagaggccttggcagctcctagccatagagcttcctttccagaacccttccactgcccaatgtggagacaggggttagtggggctttctatggagccatctgctttggggacctagacctcaggtggtctcttggtgttagtgatgctggagaagagaatattactggtttctacttttctataaaggcatttctctatatacatgttttatatacctcattctgacacctgcatatagtgtgggaaattgctctgcatttgacttaattaaaaaaaaaaaagactccaaaatgccaag

SEQ ID NO: 367829 - DNA, 2112 bp, Homo sapiens
cgccagcacacccgaacttacagccagtacgagctgcggttatatcggccgaggcctgcagagaagttgcaaccgagaggggccttgggaaatagcaaggatttggacagataaagacgtgggagagaccacctcccaggccctgccagccttcacgacagaaatccaggaagcgtctgaagggccaggtgcagatgaggtgcaggtgttcgctcctgccaacgccctgcccgctcggagtgaggcggcagctgtgcagccagtgattgggatcagccagcgggtgcggatgaactccaaggagaaaaaggacctgggaactctgggctacgtgctgggcattaccatgatggtgatcatcattgccatcggagctggcatcatcttgggctactcctacaagagggggaaggatttgaaagaacagcatgatcagaaagtatgtgagagggagatgcagcgaatcactctgcccttgtctgccttcaccaaccccacctgtgagattgtggatgagaagactgtcgtggtccacaccagccagactccagttgaccctcaggagggcagcaccccccttatgggccaggccgggactcctggggcctgagcccccccagtgggcaggagcccatgcagacactggtgcaggacagcccaccctcctacagctaggaggaactaccactttgtgttctggttaaaaccctaccactcccccgcttttttggcgaatcctagtaagagtgacagaagcaggtggccctgtgggctgagggtaaggctgggtagggtcctaacagtgctccttgtccatcccttggagcagattttgtctgtggatggagacagtggcagctcccacagtgatgctgctgctaagggcttccaaacattgcctgcacccctggaactgaaccagggatagacggggagctcccccaggctcctctgtgctttactaagatggcctcagtctccactgtgggcttgagtggcatacactgttattcatggttaaggtaaagcaggtcaagggatggcattgaaaaaatatatttagtttttaaaatatttgggatggaactccctactgacctctgagaactggaaacgagtttgtacagaagtcagaactttgggttgggaatgagatctaggttgtggctgctggtatgcttcagcttgctggcaatgatgtgccttgacaaccgtgggccaggcctgggcccagggactcttcctgtttcataaggaaaggaagaattgcactgagcattccacttaggaagaggatagagaaggatctgctccgcctttggccacaggagcagaggcagacctgggatgccccagtttctcttcagggatggatagtgacctgtcttcattttgcacaggtaagagagtagttagctaacctatgggaattatactgtggggccttgtgagctgcttctaagaggctaacctggaaactaagctcagaggcaaggtaataaagcacttcagggcttgctccccaagtgggcctgatttagcaggtggtcctgcgggcgtccaggtcagcaccttcctgtagggcactggggctagggtcacagcccctaactcataaagcaatcaaagaaccattagaaagggctcattaagccttttggacacaggaccccagagaggaaaaagtgacttgcccaaggtcgtaagcaagctactggcatggcaagagcccagcttcctgacggagcgcaacatttctccactgcactgtgctagcagctcagcagggcctctaacctgtgatgtcacactcaagaggccttggcagctcctagccatagagcttcctttccagaacccttccactgcccaatgtggagacaggggttagtggggctttctatggagccatctgctttggggacctagacctcaggtggtctcttggtgttagtgatgctggagaagagaatattactggtttctacttttctataaaggcatttctctatatacatgttttatatacctcattctgacacctgcatatagtgtgggaaattgctctgcatttgacttaattaaaaaaaaaaaagactccaaaatgccaag

SEQ ID NO: 367830 - DNA, 1758 bp, Homo sapiens
agctatgcaggaggcatagcctgaagtgtttgtttgtttttttcctgccagggggaaggatttgaaagaacagcatgatcagaaagtatgtgagagggagatgcagcgaatcactctgcccttgtctgccttcaccaaccccacctgtgagattgtggatgagaagactgtcgtggtccacaccagccagactccagttgaccctcaggagggcagcaccccccttatgggccaggccgggactcctggggcctgagcccccccagtgggcaggagcccatgcagacactggtgcaggacagcccaccctcctacagctaggaggaactaccactttgtgttctggttaaaaccctaccactcccccgcttttttggcgaatcctagtaagagtgacagaagcaggtggccctgtgggctgagggtaaggctgggtagggtcctaacagtgctccttgtccatcccttggagcagattttgtctgtggatggagacagtggcagctcccacagtgatgctgctgctaagggcttccaaacattgcctgcacccctggaactgaaccagggatagacggggagctcccccaggctcctctgtgctttactaagatggcctcagtctccactgtgggcttgagtggcatacactgttattcatggttaaggtaaagcaggtcaagggatggcattgaaaaaatatatttagtttttaaaatatttgggatggaactccctactgacctctgagaactggaaacgagtttgtacagaagtcagaactttgggttgggaatgagatctaggttgtggctgctggtatgcttcagcttgctggcaatgatgtgccttgacaaccgtgggccaggcctgggcccagggactcttcctgtttcataaggaaaggaagaattgcactgagcattccacttaggaagaggatagagaaggatctgctccgcctttggccacaggagcagaggcagacctgggatgccccagtttctcttcagggatggatagtgacctgtcttcattttgcacaggtaagagagtagttagctaacctatgggaattatactgtggggccttgtgagctgcttctaagaggctaacctggaaactaagctcagaggcaaggtaataaagcacttcagggcttgctccccaagtgggcctgatttagcaggtggtcctgcgggcgtccaggtcagcaccttcctgtagggcactggggctagggtcacagcccctaactcataaagcaatcaaagaaccattagaaagggctcattaagccttttggacacaggaccccagagaggaaaaagtgacttgcccaaggtcgtaagcaagctactggcatggcaagagcccagcttcctgacggagcgcaacatttctccactgcactgtgctagcagctcagcagggcctctaacctgtgatgtcacactcaagaggccttggcagctcctagccatagagcttcctttccagaacccttccactgcccaatgtggagacaggggttagtggggctttctatggagccatctgctttggggacctagacctcaggtggtctcttggtgttagtgatgctggagaagagaatattactggtttctacttttctataaaggcatttctctatatacatgttttatatacctcattctgacacctgcatatagtgtgggaaattgctctgcatttgacttaattaaaaaaaaaaaagactccaaaatgccaag

SEQ ID NO: 367831 - DNA, 2520 bp, Homo sapiens
ttagattttgcatgacctaggaggcttaggacccagggggcgcctttcagctgaaaaacagctcgcgctgcagcaagctagctgggaagctcccagttctaaagagaggctgtttaccagaacagcataacaagggcaggtctgactgcaaggctgggactgggaggcagagccgccgccaagggggcctcggttaaacactggtcgttcaatcacctgcaagacgaaggaggcaaggatgctgttggcctgggtacaagcattcctcgtcagcaacatgctcctagcagaagcctatggatctggaggctgtttctgggacaacggccacctgtaccgggaggaccagacctcccccgcgccgggcctccgctgcctcaactggctggacgcgcagagcgggctggcctcggcccccgtgtcgggggccggcaatcacagttactgccgaaacccggacgaggacccgcgcgggccctggtgctacgtcagtggcgaggccggcgtccctgagaaacggccttgcgaggacctgcgctgtccagagaccacctcccaggccctgccagccttcacgacagaaatccaggaagcgtctgaagggccaggtgcagatgaggtgcaggtgttcgctcctgccaacgccctgcccgctcggagtgaggcggcagctgtgcagccagtgattgggatcagccagcgggtgcggatgaactccaaggagaaaaaggacctgggaactctgggctacgtgctgggcattaccatgatggtgatcatcattgccatcggagctggcatcatcttgggctactcctacaagagggggaaggatttgaaagaacagcatgatcagaaagtatgtgagagggagatgcagcgaatcactctgcccttgtctgccttcaccaaccccacctgtgagattgtggatgagaagactgtcgtggtccacaccagccagactccagttgaccctcaggagggcagcaccccccttatgggccaggccgggactcctggggcctgagcccccccagtgggcaggagcccatgcagacactggtgcaggacagcccaccctcctacagctaggaggaactaccactttgtgttctggttaaaaccctaccactcccccgcttttttggcgaatcctagtaagagtgacagaagcaggtggccctgtgggctgagggtaaggctgggtagggtcctaacagtgctccttgtccatcccttggagcagattttgtctgtggatggagacagtggcagctcccacagtgatgctgctgctaagggcttccaaacattgcctgcacccctggaactgaaccagggatagacggggagctcccccaggctcctctgtgctttactaagatggcctcagtctccactgtgggcttgagtggcatacactgttattcatggttaaggtaaagcaggtcaagggatggcattgaaaaaatatatttagtttttaaaatatttgggatggaactccctactgacctctgagaactggaaacgagtttgtacagaagtcagaactttgggttgggaatgagatctaggttgtggctgctggtatgcttcagcttgctggcaatgatgtgccttgacaaccgtgggccaggcctgggcccagggactcttcctgtttcataaggaaaggaagaattgcactgagcattccacttaggaagaggatagagaaggatctgctccgcctttggccacaggagcagaggcagacctgggatgccccagtttctcttcagggatggatagtgacctgtcttcattttgcacaggtaagagagtagttagctaacctatgggaattatactgtggggccttgtgagctgcttctaagaggctaacctggaaactaagctcagaggcaaggtaataaagcacttcagggcttgctccccaagtgggcctgatttagcaggtggtcctgcgggcgtccaggtcagcaccttcctgtagggcactggggctagggtcacagcccctaactcataaagcaatcaaagaaccattagaaagggctcattaagccttttggacacaggaccccagagaggaaaaagtgacttgcccaaggtcgtaagcaagctactggcatggcaagagcccagcttcctgacggagcgcaacatttctccactgcactgtgctagcagctcagcagggcctctaacctgtgatgtcacactcaagaggccttggcagctcctagccatagagcttcctttccagaacccttccactgcccaatgtggagacaggggttagtggggctttctatggagccatctgctttggggacctagacctcaggtggtctcttggtgttagtgatgctggagaagagaatattactggtttctacttttctataaaggcatttctctatatacatgttttatatacctcattctgacacctatcccccattctcctcctatccctcaaccccgacatcattaccgggttttcgtctt

SEQ ID NO: 367832 - DNA, 1269 bp, Homo sapiens
atcagtttacacaaagtggtagttcctcctagctgtaggagggtgggctgtcctgcaccagtgtctgcatgggctcctgcccactggggggagctcccccaggctcctctgtgctttactaagatggcctcagtctccactgtgggcttgagtggcatacactgttattcatggttaaggtaaagcaggtcaagggatggcattgaaaaaatatatttagtttttaaaatatttgggatggaactccctactgacctctgagaactggaaacgagtttgtacagaagtcagaactttgggttgggaatgagatctaggttgtggctgctggtatgcttcagcttgctggcaatgatgtgccttgacaaccgtgggccaggcctgggcccagggactcttcctgtttcataaggaaaggaagaattgcactgagcattccacttaggaagaggatagagaaggatctgctccgcctttggccacaggagcagaggcagacctgggatgccccagtttctcttcagggatggatagtgacctgtcttcattttgcacaggtaagagagtagttagctaacctatgggaattatactgtggggccttgtgagctgcttctaagaggctaacctggaaactaagctcagaggcaaggtaataaagcacttcagggcttgctccccaagtgggcctgatttagcaggtggtcctgcgggcgtccaggtcagcaccttcctgtagggcactggggctagggtcacagcccctaactcataaagcaatcaaagaaccattagaaagggctcattaagccttttggacacaggaccccagagaggaaaaagtgacttgcccaaggtcgtaagcaagctactggcatggcaagagcccagcttcctgacggagcgcaacatttctccactgcactgtgctagcagctcagcagggcctctaacctgtgatgtcacactcaagaggccttggcagctcctagccatagagcttcctttccagaacccttccactgcccaatgtggagacaggggttagtggggctttctatggagccatctgctttggggacctagacctcaggtggtctcttggtgttagtgatgctggagaagagaatattactggtttctacttttctataaaggcatttctctatatacatgttttatatacctcattctgacacctgcatatagtgtgggaaattgctctgcatttgacttaattaaaaaaaaaaaagactccaaaatgccaag

SEQ ID NO: 367833 - DNA, 2189 bp, Homo sapiens
ttagattttgcatgacctaggaggcttaggacccagggggcgcctttcagctgaaaaacagctcgcgctgcagcaagctagctgggaagctcccagttctaaagagaggctgtttaccagaacagcataacaagggcaggtctgactgcaaggctgggactgggaggcagagccgccgccaagggggcctcggttaaacactggtcgttcaatcacctgcaagacgaaggaggcaaggatgctgttggcctgggtacaagcattcctcgtcagcaacatgctcctagcagaagcctatggatctggaggctgtttctgggacaacggccacctgtaccgggaggaccagacctcccccgcgccgggcctccgctgcctcaactggctggacgcgcagagcgggctggcctcggcccccgtgtcgggggccggcaatcacagttactgccgaaacccggacgaggacccgcgcgggccctggtgctacgtcagtggcgaggccggcgtccctgagaaacggccttgcgaggacctgcgctgtccagagaccacctcccaggccctgccagccttcacgacagaaatccaggaagcgtctgaagggccaggtgcagatgaggtgcaggtgttcgctcctgccaacgccctgcccgctcggagtgaggcggcagctgtgcagccagtgattgggatcagccagcgggtgcggatgaactccaaggagaaaaaggacctgggaactctgggctacgtgctgggcattaccatgatggtgatcatcattgccatcggagctggcatcatcttgggctactcctacaagagggggaaggatttgaaagaacagcatgatcagaaagtatgtgagagggagatgcagcgaatcactctgcccttgtctgccttcaccaaccccacctgtgagattgtggatgagaagactgtcgtggtccacaccagccagactccagttgaccctcaggagggcagcaccccccttatgggccaggccgggactcctggggcctgagcccccccagtgggcaggagcccatgcagacactggtgcaggacagcccaccctcctacagctaggaggaactaccactttgtgttctggttaaaaccctaccactcccccgcttttttggcgaatcctagtaagagtgacagaagcaggtggccctgtgggctgagggtaaggctgggtagggtcctaacagtgctccttgtccatcccttggagcagattttgtctgtggatggagacagtggcagctcccacagtgatgctgctgctaagggcttccaaacattgcctgcacccctggaactgaaccagggatagacggggagctcccccaggctcctctgtgctttactaagatggcctcagtctccactgtgggcttgagtggcatacactgttattcatggttaaggtaaagcaggtcaagggatggcattgaaaaaatatatttagtttttaaaatatttgggatggaactccctactgacctctgagaactggaaacgagtttgtacagaagtcagaactttgggttgggaatgagatctaggttgtggctgctggtatgcttcagcttgctggcaatgatgtgccttgacaaccgtgggccaggcctgggcccagggactcttcctgtttcataaggaaaggaagaattgcactgagcattccacttaggaagaggatagagaaggatctgctccgcctttggccacaggagcagaggcagacctgggatgccccagtttctcttcagggatggatagtgacctgtcttcattttgcacaggtaagagagtagttagctaacctatgggaattatactgtggggccttgtgagctgcttctaagaggctaacctggaaactaagctcagaggcaaggtaataaagcacttcagggcttgctccccaagtgggcctgatttagcaggtggtcctgcgggcgtccaggtcagccctctgtgggcctggctgggtccggcctatctaagcatcaggaccttgaagggtctttacctttgccaggaccgggggaatgctgcgggctgcctttggtggagcctccggggctttccgcggtcccggctcggggcccgagggccaactcccccccgggggggtgccgccccgtttggaatcttttttcagggcgacg

SEQ ID NO: 367834 - DNA, 1776 bp, Homo sapiens
ttagattttgcatgacctaggaggcttaggacccagggggcgcctttcagctgaaaaacagctcgcgctgcagcaagctagctgggaagctcccagttctaaagagaggctgtttaccagaacagcataacaagggcaggtctgactgcaaggctgggactgggaggcagagccgccgccaagggggcctcggttaaacactggtcgttcaatcacctgcaagacgaaggaggcaaggatgctgttggcctgggtacaagcattcctcgtcagcaacatgctcctagcagaagcctatggatctggaggctgtttctgggacaacggccacctgtaccgggaggaccagacctcccccgcgccgggcctccgctgcctcaactggctggacgcgcagagcgggctggcctcggcccccgtgtcgggggccggcaatcacagttactgccgaaacccggacgaggacccgcgcgggccctggtgctacgtcagtggcgaggccggcgtccctgagaaacggccttgcgaggacctgcgctgtccagagaccacctcccaggccctgccagccttcacgacagaaatccaggaagcgtctgaagggccaggtgcagatgaggtgcaggtgttcgctcctgccaacgccctgcccgctcggagtgaggcggcagctgtgcagccagtgattgggatcagccagcgggtgcggatgaactccaaggagaaaaaggacctgggaactctgggctacgtgctgggcattaccatgatggtgatcatcattgccatcggagctggcatcatcttgggctactcctacaagagggggaaggatttgaaagaacagcatgatcagaaagtatgtgagagggagatgcagcgaatcactctgcccttgtctgccttcaccaaccccacctgtgagattgtggatgagaagactgtcgtggtccacaccagccagactccagttgaccctcaggagggcagcaccccccttatgggccaggccgggactcctggggcctgagcccccccagtgggcaggagcccatgcagacactggtgcaggacagcccaccctcctacagctaggaggaactaccactttgtgttctggttaaaaccctaccactcccccgcttttttggcgaatcctagtaagagtgacagaagcaggtggccctgtgggctgagggtaaggctgggtagggtcctaacagtgctccttgtccatcccttggagcagattttgtctgtggatggagacagtggcagctcccacagtgatgctgctgctaagggcttccaaacattgcctgcacccctggaactgaaccagggatagacggggagctcccccaggctcctctgtgctttactaagatggcctcagtctccactgtgggcttgagtggcatacactgttattcatggttaaggtaaagcagggcctctaacctgtgatgtcacactcaagaggccttggcagctcctagccatagagcttcctttccagaacccttccactgcccaatgtggagacaggggttagtggggctttctatggagccatctgctttggggacctagacctcaggtggtctcttggtgttagtgatgctggagaagagaatattactggtttctacttttctataaaggcatttctctatatacatgttttatatacctcattctgacacctgcatatagtgtgggaaattgctctgcatttgacttaattaaaaaaaaaaaagactccaaaatgccaag

SEQ ID NO: 367835 - DNA, 941 bp, Homo sapiens
cgtctgcagtgtgctagacccacactgctcacaaccccagctccccaacctcccctgacacacaccgcgggaagaagtcgtttgaggcatctgagcttcagagaagttaagcgatttaccaaaggcaatggcaggggacagatttgaattcacgtttcttagattccagagcgcaggctttttgctcccaaagcagcaagagagttttctaggtttaaatgggataatcaaaataaagcatttattttttattttttattttttgagacggagtctcgttctgtcacccaggctggagtgcagtggcgcaatttcggctcactgcaacttccgccttccgcgttacagtgattctcctgcctcagccgcttgagtagctgggataacaggcgtgcaccaccacgcccagctaatttttgtatttttagtagagacggggtttcaccatgttggccgggctgctctctaactcctgacctcaggtgatccgaccgtctggcctcccaaagtgctgggattacaggcgtgagccaccgctcccggcacaaagtaaaacattttacctaaggactggcacagagcgtacgcttagatgtgagctgctcaaaggaagcatgggttgtttcctgaagtagaagtggggggaatcccctgcagaagaacgcaaccgagaggggccttgggaaatagcaaggatttggacagataaagacgtgggaggtaggagagaagcccttccctacggccttcctctctcatttgccttgtccctgagatggttcagccctctcaggcctgatcttacctctggggcagaatttgactttgggttgtgtgtggggggaaattcttaggtgacccaccttcatctaccctaacactcaggccaggttcagctgtggaattcactcagggcagtccctgatgagagctgtttccca

SEQ ID NO: 367836 - DNA, 2532 bp, Homo sapiens
ttagattttgcatgacctaggaggcttaggacccagggggcgcctttcagctgaaaaacagctcgcgctgcagcaagctagctgggaagctcccagttctaaagagaggctgtttaccagaacagcataacaagggcaggtctgactgcaaggctgggactgggaggcagagccgccgccaagggggcctcggttaaacactggtcgttcaatcacctgcaagacgaaggaggcaaggatgctgttggcctgggtacaagcattcctcgtcagcaacatgctcctagcagaagcctatggatctggaggctgtttctgggacaacggccacctgtaccgggaggaccagacctcccccgcgccgggcctccgctgcctcaactggctggacgcgcagagcgggctggcctcggcccccgtgtcgggggccggcaatcacagttactgccgaaacccggacgaggacccgcgcgggccctggtgctacgtcagtggcgaggccggcgtccctgagaaacggccttgcgaggacctgcgctgtccagagaccacctcccaggccctgccagccttcacgacagaaatccaggaagcgtctgaagggccaggtgcagatgaggtgcaggtgttcgctcctgccaacgccctgcccgctcggagtgaggcggcagctgtgcagccagtgattgggatcagccagcgggtgcggatgaactccaaggagaaaaaggacctgggaactctgggctacgtgctgggcattaccatgatggtgatcatcattgccatcggagctggcatcatcttgggctactcctacaagagggggaaggatttgaaagaacagcatgatcagaaagtatgtgagagggagatgcagcgaatcactctgcccttgtctgccttcaccaaccccacctgtgagattgtggatgagaagactgtcgtggtccacaccagccagactccagttgaccctcaggagggcagcaccccccttatgggccaggccgggactcctggggcctgagcccccccagtgggcaggagcccatgcagacactggtgcaggacagcccaccctcctacagctaggaggaactaccactttgtgttctggttaaaaccctaccactcccccgcttttttggcgaatcctagtaagagtgacagaagcaggtggccctgtgggctgagggtaaggctgggtagggtcctaacagtgctccttgtccatcccttggagcagattttgtctgtggatggagacagtggcagctcccacagtgatgctgctgctaagggcttccaaacattgcctgcacccctggaactgaaccagggatagacggggagctcccccaggctcctctgtgctttactaagatggcctcagtctccactgtgggcttgagtggcatacactgttattcatggttaaggtaaagcaggtcaagggatggcattgaaaaaatatatttagtttttaaaatatttgggatggaactccctactgacctctgagaactggaaacgagtttgtacagaagtcagaactttgggttgggaatgagatctaggttgtggctgctggtatgcttcagcttgctggcaatgatgtgccttgacaaccgtgggccaggcctgggcccagggactcttcctgtttcataaggaaaggaagaattgcactgagcattccacttaggaagaggatagagaaggatctgctccgcctttggccacaggagcagaggcagacctgggatgccccagtttctcttcagggatggatagtgacctgtcttcattttgcacaggtaagagagtagttagctaacctatgggaattatactgtggggccttgtgagctgcttctaagaggctaacctggaaactaagctcagaggcaaggtaataaagcacttcagggcttgctccccaagtgggcctgatttagcaggtggtcctgcgggcgtccaggtcagcaccttcctgtagggcactggggctagggtcacagcccctaactcataaagcaatcaaagaaccattagaaagggctcattaagccttttggacacaggaccccagagaggaaaaagtgacttgcccaaggtcgtaagcaagctactggcatggcaagagcccagcttcctgacggagcgcaacatttctccactgcactgtgctagcagctcagcagggcctctaacctgtgatgtcacactcaagaggccttggcagctcctagccatagagcttcctttccagaacccttccactgcccaatgtggagacaggggttagtggggctttctatggagccatctgctttggggacctagacctcaggtggtctcttggtgttagtgatgctggagaagagaatattactggtttctacttttctataaaggcatttctctatatacatgttttatatacctcattctgacacctgcatatagtgtgggaaattgctctgcatttgacttaattaaaaaaaaaaaagactccaaaatgccaag

SEQ ID NO: 367837 - DNA, 2479 bp, Homo sapiens
ttagattttgcatgacctaggaggcttaggacccagggggcgcctttcagctgaaaaacagctcgcgctgcagcaagctagctgggaagctcccagttctaaagagaggctgtttaccagaacagcataacaagggcaggtctgactgcaaggctgggactgggaggcagagccgccgccaagggggcctcggttaaacactggtcgttcaatcacctgcaagacgaaggaggcaaggatgctgttggcctgggtacaagcattcctcgtcagcaacatgctcctagcagaagcctatggatctggaggctgtttctgggacaacggccacctgtaccgggaggaccagacctcccccgcgccgggcctccgctgcctcaactggctggacgcgcagagcgggctggcctcggcccccgtgtcgggggccggcaatcacagttactgccgaaacccggacgaggacccgcgcgggccctggtgctacgtcagtggcgaggccggcgtccctgagaaacggccttgcgaggacctgcgctgtccagagaccacctcccaggccctgccagccttcacgacagaaatccaggaagcgtctgaagggccaggtgcagatgaggtgcaggtgttcgctcctgccaacgccctgcccgctcggagtgaggcggcagctgtgcagccagtgattgggatcagccagcgggtgcggatgaactccaaggagaaaaaggacctgggaactctgggctacgtgctgggcattaccatgatggtgatcatcattgccatcggagctggcatcatcttgggctactcctacaagagggggaaggatttgaaagaacagcatgatcagaaagtatgtgagagggagatgcagcgaatcactctgcccttgtctgccttcaccaaccccacctgtgagattgtggatgagaagactgtcgtggtccacaccagccagactccagttgaccctcaggagggcagcaccccccttatgggccaggccgggactcctggggcctgagcccccccagtgggcaggagcccatgcagacactggtgcaggacagcccaccctcctacagctaggaggaactaccactttgtgttctggttaaaaccctaccactcccccgcttttttggcgaatcctagtaagagtgacagaagcaggtggccctgtgggctgagggtaaggctgggtagggtcctaacagtgctccttgtccatcccttggagcagattttgtctgtggatggagacagtggcagctcccacagtgatgctgctgctaagggcttccaaacattgcctgcacccctggaactgaaccagggatagacggggagctcccccaggctcctctgtgctttactaagatggcctcagtctccactgtgggcttgagtggcatacactgttattcatggttaaggtaaagcaggtcaagggatggcattgaaaaaatatatttagtttttaaaatatttgggatggaactccctactgacctctgagaactggaaacgagtttgtacagaagtcagaactttgggttgggaatgagatctaggttgtggctgctggtatgcttcagcttgctggcaatgatgtgccttgacaaccgtgggccaggcctgggcccagggactcttcctgtttcataaggaaaggaagaattgcactgagcattccacttaggaagaggatagagaaggatctgctccgcctttggccacaggagcagaggcagacctgggatgccccagtttctcttcagggatggatagtgacctgtcttcattttgcacaggtaagagagtagttagctaacctatgggaattatactgtggggccttgtgagctgcttctaagaggctaacctggaaactaagctcagcaggtggtcctgcgggcgtccaggtcagcaccttcctgtagggcactggggctagggtcacagcccctaactcataaagcaatcaaagaaccattagaaagggctcattaagccttttggacacaggaccccagagaggaaaaagtgacttgcccaaggtcgtaagcaagctactggcatggcaagagcccagcttcctgacggagcgcaacatttctccactgcactgtgctagcagctcagcagggcctctaacctgtgatgtcacactcaagaggccttggcagctcctagccatagagcttcctttccagaacccttccactgcccaatgtggagacaggggttagtggggctttctatggagccatctgctttggggacctagacctcaggtggtctcttggtgttagtgatgctggagaagagaatattactggtttctacttttctataaaggcatttctctatatacatgttttatatacctcattctgacacctgcatatagtgtgggaaattgctctgcatttgacttaattaaaaaaaaaaaagactccaaaatgccaag

SEQ ID NO: 367838 - DNA, 2498 bp, Homo sapiens
ggggggtgcgtggggcgtgggggtgttgccacgagaggagagggaggcccagcagggcccggggtcccctaaccaggctgaggttcagcccgggtggtcccggctcccctgtccgccacgctgggcgtcttccgttcgctgcccgctactctgtgtccgggggcttcttttcctcacaggctgtttctgggacaacggccacctgtaccgggaggaccagacctcccccgcgccgggcctccgctgcctcaactggctggacgcgcagagcgggctggcctcggcccccgtgtcgggtaagtgtcctccgggggacggcgccggggctggcgggcggcggccgcgttcccggtgccagccccggcacacatttccttctctcctctcttaggggccggcaatcacagttactgccgaaacccggacgaggacccgcgcgggccctggtgctacgtcagtggcgaggccggcgtccctgagaaacggccttgcgaggacctgcgctgtccagagaccacctcccaggccctgccagccttcacgacagaaatccaggaagcgtctgaagggccaggtgcagatgaggtgcaggtgttcgctcctgccaacgccctgcccgctcggagtgaggcggcagctgtgcagccagtgattgggatcagccagcgggtgcggatgaactccaaggagaaaaaggacctgggaactctgggctacgtgctgggcattaccatgatggtgatcatcattgccatcggagctggcatcatcttgggctactcctacaagagggggaaggatttgaaagaacagcatgatcagaaagtatgtgagagggagatgcagcgaatcactctgcccttgtctgccttcaccaaccccacctgtgagattgtggatgagaagactgtcgtggtccacaccagccagactccagttgaccctcaggagggcagcaccccccttatgggccaggccgggactcctggggcctgagcccccccagtgggcaggagcccatgcagacactggtgcaggacagcccaccctcctacagctaggaggaactaccactttgtgttctggttaaaaccctaccactcccccgcttttttggcgaatcctagtaagagtgacagaagcaggtggccctgtgggctgagggtaaggctgggtagggtcctaacagtgctccttgtccatcccttggagcagattttgtctgtggatggagacagtggcagctcccacagtgatgctgctgctaagggcttccaaacattgcctgcacccctggaactgaaccagggatagacggggagctcccccaggctcctctgtgctttactaagatggcctcagtctccactgtgggcttgagtggcatacactgttattcatggttaaggtaaagcaggtcaagggatggcattgaaaaaatatatttagtttttaaaatatttgggatggaactccctactgacctctgagaactggaaacgagtttgtacagaagtcagaactttgggttgggaatgagatctaggttgtggctgctggtatgcttcagcttgctggcaatgatgtgccttgacaaccgtgggccaggcctgggcccagggactcttcctgtttcataaggaaaggaagaattgcactgagcattccacttaggaagaggatagagaaggatctgctccgcctttggccacaggagcagaggcagacctgggatgccccagtttctcttcagggatggatagtgacctgtcttcattttgcacaggtaagagagtagttagctaacctatgggaattatactgtggggccttgtgagctgcttctaagaggctaacctggaaactaagctcagaggcaaggtaataaagcacttcagggcttgctccccaagtgggcctgatttagcaggtggtcctgcgggcgtccaggtcagcaccttcctgtagggcactggggctagggtcacagcccctaactcataaagcaatcaaagaaccattagaaagggctcattaagccttttggacacaggaccccagagaggaaaaagtgacttgcccaaggtcgtaagcaagctactggcatggcaagagcccagcttcctgacggagcgcaacatttctccactgcactgtgctagcagctcagcagggcctctaacctgtgatgtcacactcaagaggccttggcagctcctagccatagagcttcctttccagaacccttccactgcccaatgtggagacaggggttagtggggctttctatggagccatctgctttggggacctagacctcaggtggtctcttggtgttagtgatgctggagaagagaatattactggtttctacttttctataaaggcatttctctatatacatgttttatatacctcattctgacacctgcatatagtgtgggaaattgctctgcatttgacttaattaaaaaaaaaaaagactccaaaatgccaag

SEQ ID NO: 367839 - DNA, 2011 bp, Homo sapiens
ttagattttgcatgacctaggaggcttaggacccagggggcgcctttcagctgaaaaacagctcgcgctgcagcaagctagctgggaagctcccagttctaaagagaggctgtttaccagaacagcataacaagggcaggtctgactgcaaggctgggactgggaggcagagccgccgccaagggggcctcggttaaacactggtcgttcaatcacctgcaagacgaaggaggcaaggatgctgttggcctgggtacaagcattcctcgtcagcaacatgctcctagcagaagcctatggatctggaggctgtttctgggacaacggccacctgtaccgggaggaccagacctcccccgcgccgggcctccgctgcctcaactggctggacgcgcagagcgggctggcctcggcccccgtgtcgggggccggcaatcacagttactgccgaaacccggacgaggacccgcgcgggccctggtgctacgtcagtggcgaggccggcgtccctgagaaacggccttgcgaggacctgcgctgtccagagaccacctcccaggccctgccagccttcacgacagaaatccaggaagcgtctgaagggccaggtgcagatgaggtgcaggtgttcgctcctgccaacgccctgcccgctcggagtgaggcggcagctgtgcagccagtgattgggatcagccagcgggtgcggatgaactccaaggagaaaaaggacctgggaactctgggctacgtgctgggcattaccatgatggtgatcatcattgccatcggagctggcatcatcttgggctactcctacaagagggggaaggatttgaaagaacagcatgatcagaaagtatgtgagagggagatgcagcgaatcactctgcccttgtctgccttcaccaaccccacctgtgagattgtggatgagaagactgtcgtggtccacaccagccagactccagttgaccctcaggagggcagcaccccccttatgggccaggccgggactcctggggcctgagcccccccagtgggcaggagcccatgcagacactggtgcaggacagcccaccctcctacagctaggaggaactaccactttgtgttctggttaaaaccctaccactcccccgcttttttggcgaatcctagtaagagtgacagaagcaggtggccctgtgggctgagggtaaggctgggtagggtcctaacagtgctccttgtccatcccttggagcagattttgtctgtggatggagacagtggcagctcccacagtgatgctgctgctaagggcttccaaacattgcctgcacccctggaactgaaccagggatagacggggagctcccccaggctcctctgtgctttactaagatggcctcagtctccactgtgggcttgagtggcatacactgttattcatggttaaggtaaagcaggtcaagggatggcattgaaaaaatatatttagtttttaaaatatttgggatggaactccctactgacctctgagaactggaaacgagtttgtacagaagtcagaactttgggttgggaatgagatctaggttgtggctgctggtatgcttcagcttgctggcaatgatgtgccttgacaaccgtgggccaggcctgggcccagggactcttcctgtttcataaggaaaggaagaattgcactgagcattccacttaggaagaggatagagaaggatctgctccgcctttggccacaggagcagaggcagacctgggatgccccagtttctcttcagggatggatagtgacctgtcttcattttgcacaggtaagagagtagttagctaaaaaggctctaaagaaacacaaggaaagaatagggcacaggtggggatggatggttggttggatatgtcacttttcttatggtaaacagttaaatccatattctctctgcttaaaagaagaaattaatgttttgtagtcctaggttcagagccagcctaagaccagagccgg

SEQ ID NO: 367840 - DNA, 1430 bp, Homo sapiens
ttagattttgcatgacctaggaggcttaggacccagggggcgcctttcagctgaaaaacagctcgcgctgcagcaagctagctgggaagctcccagttctaaagagaggctgtttaccagaacagcataacaagggcaggtctgactgcaaggctgggactgggaggcagagccgccgccaagggggcctcggttaaacactggtcgttcaatcacctgcaagacgaaggaggcaaggatgctgttggcctgggtacaagcattcctcgtcagcaacatgctcctagcagaagcctatggatctggaggctgtttctgggacaacggccacctgtaccgggaggaccagacctcccccgcgccgggcctccgctgcctcaactggctggacgcgcagagcgggctggcctcggcccccgtgtcgggggccggcaatcacagttactgccgaaacccggacgaggacccgcgcgggccctggtgctacgtcagtggcgaggccggcgtccctgagaaacggccttgcgaggacctgcgctgtccaggtacctgcccgggaccccgggaatccccgctcctggcgctgacaggaagcggctgagacactcgtggcgcacgtgcggccgcgcgatgccggccggccccgctccgcctccgcgccgtccgattggccagggctgtctccaggccgcggggctcaaagcctattggccgccgccgccactcgtatgagctcatccgccgcgagcgcttgtaaacaactgcgcggggcgaggctggggtgaggctaggtctctccgccgcgcgtcctgaggagtggcttttggcccctcagcgtttattgaccgtttgcggagcgtctgcagtgtgctagacccacactgctcacaaccccagctccccaacctcccctgacacacaccgcgggaagaagtcgtttgaggcatctgagcttcagagaagttaagcgatttaccaaaggcaatggcaggggacagatttgaattcacgtttcttagattccagagcgcaggctttttgctcccaaagcagcaagagagttttctaggtttaaatgggataatcaaaataaagcatttattttttattttttattttttgagacggagtctcgttctgtcacccaggctggagtgcagtggcgcaatttcggctcactgcaacttccgccttccgcgttacagtgattctcctgcctcagccgcttgagtagctgggataacaggcgtgcaccaccacgcccagctaatttttgtatttttagtagagacggggtttcaccatgttggccgggctgctctctaactcctgacctcaggtgatccgaccgtctggcctcccaaagtgctgggattacaggcgtgagccaccgctcccggcacaaagtaaaacattttacctaaggactg

SEQ ID NO: 367841 - DNA, 3747 bp, Homo sapiens
cagagtaatgacatggttccttccatcctccaaaggtgaccaataatagtttgtaagtatcattatgaactaatgaattttcaacatatttgatatatttcaatccattgccatcattgttcttatcgatatttgagttggctcactttgccagtaagagtctattcaaattggcttctgagtccatttgacacaacacctttgatctttgacagtttccttggttttaggtgctagatgatttctcaggctcaccttagacatttcctgccacagacttagaatcagccatttctctaaggaccctgattccatttcatgagaaatgatagagaccacaatcaaaacaagtcatgaatttatactgatattttcaattcaaattaaagatgaggtttttgctaaatttttttgagtttatatttgtatgtcttatgctgaaaaatcttgtttcctaattagtaacataattattcatttgatgggtaaatattttagggccgattctttggttttatagccaagataccctgttgataaagtcttgtgggagcaattataagactggcttattttgaagctttttaaaaaagacatccttacctgttttaactgtagattatattaacttaaataggtacagcccacgcttgatggaaaaaattctccaaatggctgaaggtattgatattggggagatgccttcatatgatctggtgctgtccaaaccttccaaaggtcaaaaacgccacctctcaacatgtgatggtcaaaatcctcctaaaaagcaagccggttccaaattccatgcgagacctcgttttgagcctgtacattttgtagctagtagttcaaaagatgaaagacaggaagatccttatggccctcaaacaaaagaggtaaatgaacaaacacattttgccagcatgccaagagacatctaccaagattatactcaagactctttcagtatacaagatgggaattctcagtattgtgattcatcaggattcattctcacaaaagaccagcctgtaacagccaacatgtattttgacagtgggaaccctgccccaagcaccacatcacagcaggcaaactctcagtcaactcctgagccttcaccatcacagacatttcccgagtctgtggtagccgagaagcagtattttattgaaaaattaacggcgacaatctggaagaacctttctaatccagaaatgacttctggatctgataaaattaattatacatatatgttaactcgttgtattcaggcgtgtaagacaaatcctgagtatatatatgctcctttaaaggaaattcctcctgccgacatccccaaaaataaaaaacttctaactgatggctatgcttgtgaagttagatgccaaaatatctacttaactacaggttatgctggcagcaagaatgggtccagggatcgagctacagagctagctgtaaaactcttgcagaaacgtattgaagttagagttgtccggcggaaattcaagcatacatttggagaggacctcgtggtgtgtcagattggcatgtcctcctatgaatttcctccagctctgaagccaccagaagacctggtggtgctgggtaaagatgcttccgggcagccaatttttaatgcttctgccaaacactggaccaattttgtcattacagaaaatgcaaatgatgcaattggtatccttaacaattctgcctcattcaacaagatgtcaattgaatacaaatatgagatgatgccaaatcgcacatggcgttgtcgagtgtttttacaagatcactgcttagctgaaggttatggaaccaagaaaacaagtaaacatgcagctgccgacgaggctttgaaaattcttcaaaaaacacagcccacttatccatctgtcaaaagttcacaatgccatacaggctcttcacccagaggatctggaaagaagaaagatataaaggatcttgtagtttatgagaattcttcaaatcccgtgtgcacgctgaacgacacagctcagtttaaccgaatgacagttgagtatgtctatgaaaggatgacaggcctccgctggaaatgcaaagtgattctagagagtgaagtaattgcagaagcagttggggtgaagaaaactgtcaaatatgaagctgctggggaagctgtgaaaaccctcaaaaagacccagccaactgtcattaacaacttgaagaaaggagctgttgaagatgtgatttcaagaaatgaaattcagggccgctcagcagaggaggcttacaaacagcaaatcaaagaagataatattggaaatcagctgctgagaaagatgggttggactggtggtggtttaggtaaatctggtgagggcatacgggagcctatctcagtgaaagagcagcataagcgggaagggcttggtctggatgtagagagggtgaataaaattgccaagagagatattgaacagatcatcagaaactacgcccgctccgagagccacacagatttgactttctctagagagctgactaatgatgaacggaagcaaatacatcagattgcccagaagtatggtcttaagagtaagtctcatggggtgggccatgataggtacctagtggtaggtagaaaaagacggaaggaagacctactagatcagctcaaacaggaaggccaagtgggccattacgagcttgttatgcctcaagcaaattgagatcttactaatttattttgtaaatgcctaatgaggcagatttttgaattaaagaaatgctacatgttccggttgcagagtatattcataagatgtctcaccttgttcatttcacatagtggtttattagatattggaacctaaagaattctgtccacttgtattagcttaatccagcagatgatattgtgcagttactgtttgtgtctttgatattgctgtgtccctcagattttagtagtttgacaagcaagaacacatatccaaatggaattttaccctgagaaattatcattttaaagggcatagcacagcaatctgcaacaatatgtaaagttgatattgactacaataaaaatccagtcttaattccagatttactgaaaatgtcagatcattttgtattaatctattttcatctttgtgtgaagccagttatagaatgtttgacaataaattgtgctgtacacgtaaatgtccttaccaactaaatgatgtaaaactttcttaaagtaattttagtgttcatttatttataacttctaccatgtgatttccagactattggaagtgatttactgtatcttgtgatatatgggttttaacaaattctagtcttcacgctgagagagcactacttgagagagcagttgaaagtttcaaaaactttggttcaatctgaagaaaggaagcttgaactgtttgttcttggtgccttgcagagagactcacagcaactctccattatagctttcacacggtttggatgtgcagcacatccaaggcaaccacagctgtggtagagcttggtaaaagactgaagatacattggtgctttgatgaaaaggtcagttggctggtccctctctcaaaaagcttattaagcctgaaaagccaactttgtaacatatttaaaactgctattttcgcttatttctggaatgtaaaaaaaaaaaatgtataaaaagaattagtgtatgcttcctgaataaaaaggagccaaagttgatcagaaaggtgg

SEQ ID NO: 367842 - DNA, 471 bp, Homo sapiens
taactgaacataagccacatcattatatctcaggatttaattccaagaacaacacccttgtacataaccagggcattaaaaacacaaagtaggcccaatggtagttggtgttaaaggctcaagaattgcaggctgttgtgtgtgcacacaggtgcatctgtggatactatgtatgctacattgtacatactatgtatgtacaccatgttacattgtagctaagtcagtttagttaatacaagaattgcccattacattatcaaatagcttaactgaaaagtaatgtttgcattatatctgatagcttccatatagaagaaagggaagggccaatgaagactcttggaagctagggaccaagtgcagtctttagatgggctttatgttacctctcatcttcaggtgggtaaaacttgtgttccaatacttgttgatgttaatgtagattttggcagagttcttgttttctgt

SEQ ID NO: 367843 - DNA, 3374 bp, Homo sapiens
ccgagccagtgctggagcagtggcgctatagccacgaaagtgactggcagtgggctctgcggcgcagcttcatctgtcggcacctgcacagctatcccggggctgccctcgaccagctcctcgcgctctccgccgcctggaccaaccacgtcttcctgggctgcagcttccatatagaagaaagggaagggccaatgaagactcttggaagctagggaccaagtgcagtctttagatgggctttatgttacctctcatcttcaggtacagcccacgcttgatggaaaaaattctccaaatggctgaaggtattgatattggggagatgccttcatatgatctggtgctgtccaaaccttccaaaggtcaaaaacgccacctctcaacatgtgatggtcaaaatcctcctaaaaagcaagccggttccaaattccatgcgagacctcgttttgagcctgtacattttgtagctagtagttcaaaagatgaaagacaggaagatccttatggccctcaaacaaaagaggtaaatgaacaaacacattttgccagcatgccaagagacatctaccaagattatactcaagactctttcagtatacaagatgggaattctcagtattgtgattcatcaggattcattctcacaaaagaccagcctgtaacagccaacatgtattttgacagtgggaaccctgccccaagcaccacatcacagcaggcaaactctcagtcaactcctgagccttcaccatcacagacatttcccgagtctgtggtagccgagaagcagtattttattgaaaaattaacggcgacaatctggaagaacctttctaatccagaaatgacttctggatctgataaaattaattatacatatatgttaactcgttgtattcaggcgtgtaagacaaatcctgagtatatatatgctcctttaaaggaaattcctcctgccgacatccccaaaaataaaaaacttctaactgatggctatgcttgtgaagttagatgccaaaatatctacttaactacaggttatgctggcagcaagaatgggtccagggatcgagctacagagctagctgtaaaactcttgcagaaacgtattgaagttagagttgtccggcggaaattcaagcatacatttggagaggacctcgtggtgtgtcagattggcatgtcctcctatgaatttcctccagctctgaagccaccagaagacctggtggtgctgggtaaagatgcttccgggcagccaatttttaatgcttctgccaaacactggaccaattttgtcattacagaaaatgcaaatgatgcaattggtatccttaacaattctgcctcattcaacaagatgtcaattgaatacaaatatgagatgatgccaaatcgcacatggcgttgtcgagtgtttttacaagatcactgcttagctgaaggttatggaaccaagaaaacaagtaaacatgcagctgccgacgaggctttgaaaattcttcaaaaaacacagcccacttatccatctgtcaaaagttcacaatgccatacaggctcttcacccagaggatctggaaagaagaaagatataaaggatcttgtagtttatgagaattcttcaaatcccgtgtgcacgctgaacgacacagctcagtttaaccgaatgacagttgagtatgtctatgaaaggatgacaggcctccgctggaaatgcaaagtgattctagagagtgaagtaattgcagaagcagttggggtgaagaaaactgtcaaatatgaagctgctggggaagctgtgaaaaccctcaaaaagacccagccaactgtcattaacaacttgaagaaaggagctgttgaagatgtgatttcaagaaatgaaattcagggccgctcagcagaggaggcttacaaacagcaaatcaaagaagataatattggaaatcagctgctgagaaagatgggttggactggtggtggtttaggtaaatctggtgagggcatacgggagcctatctcagtgaaagagcagcataagcgggaagggcttggtctggatgtagagagggtgaataaaattgccaagagagatattgaacagatcatcagaaactacgcccgctccgagagccacacagatttgactttctctagagagctgactaatgatgaacggaagcaaatacatcagattgcccagaagtatggtcttaagagtaagtctcatggggtgggccatgataggtacctagtggtaggtagaaaaagacggaaggaagacctactagatcagctcaaacaggaaggccaagtgggccattacgagcttgttatgcctcaagcaaattgagatcttactaatttattttgtaaatgcctaatgaggcagatttttgaattaaagaaatgctacatgttccggttgcagagtatattcataagatgtctcaccttgttcatttcacatagtggtttattagatattggaacctaaagaattctgtccacttgtattagcttaatccagcagatgatattgtgcagttactgtttgtgtctttgatattgctgtgtccctcagattttagtagtttgacaagcaagaacacatatccaaatggaattttaccctgagaaattatcattttaaagggcatagcacagcaatctgcaacaatatgtaaagttgatattgactacaataaaaatccagtcttaattccagatttactgaaaatgtcagatcattttgtattaatctattttcatctttgtgtgaagccagttatagaatgtttgacaataaattgtgctgtacacgtaaatgtccttaccaactaaatgatgtaaaactttcttaaagtaattttagtgttcatttatttataacttctaccatgtgatttccagactattggaagtgatttactgtatcttgtgatatatgggttttaacaaattctagtcttcacgctgagagagcactacttgagagagcagttgaaagtttcaaaaactttggttcaatctgaagaaaggaagcttgaactgtttgttcttggtgccttgcagagagactcacagcaactctccattatagctttcacacggtttggatgtgcagcacatccaaggcaaccacagctgtggtagagcttggtaaaagactgaagatacattggtgctttgatgaaaaggtcagttggctggtccctctctcaaaaagcttattaagcctgaaaagccaactttgtaacatatttaaaactgctattttcgcttatttctggaatgtaaaaaaaaaaaatgtataaaaagaattagtgtatgcttcctgaataaaaaggagccaaagttgatcagaaaggtgg

SEQ ID NO: 367844 - DNA, 3276 bp, Homo sapiens
ccgagccagtgctggagcagtggcgctatagccacgaaagtgactggcagtgggctctgcggcgcagcttcatctgtcggcacctgcacagctatcccggggctgccctcgaccagctcctcgcgctctccgccgcctggaccaaccacgtcttcctgggctgcaggtacagcccacgcttgatggaaaaaattctccaaatggctgaaggtattgatattggggagatgccttcatatgatctggtgctgtccaaaccttccaaaggtcaaaaacgccacctctcaacatgtgatggtcaaaatcctcctaaaaagcaagccggttccaaattccatgcgagacctcgttttgagcctgtacattttgtagctagtagttcaaaagatgaaagacaggaagatccttatggccctcaaacaaaagaggtaaatgaacaaacacattttgccagcatgccaagagacatctaccaagattatactcaagactctttcagtatacaagatgggaattctcagtattgtgattcatcaggattcattctcacaaaagaccagcctgtaacagccaacatgtattttgacagtgggaaccctgccccaagcaccacatcacagcaggcaaactctcagtcaactcctgagccttcaccatcacagacatttcccgagtctgtggtagccgagaagcagtattttattgaaaaattaacggcgacaatctggaagaacctttctaatccagaaatgacttctggatctgataaaattaattatacatatatgttaactcgttgtattcaggcgtgtaagacaaatcctgagtatatatatgctcctttaaaggaaattcctcctgccgacatccccaaaaataaaaaacttctaactgatggctatgcttgtgaagttagatgccaaaatatctacttaactacaggttatgctggcagcaagaatgggtccagggatcgagctacagagctagctgtaaaactcttgcagaaacgtattgaagttagagttgtccggcggaaattcaagcatacatttggagaggacctcgtggtgtgtcagattggcatgtcctcctatgaatttcctccagctctgaagccaccagaagacctggtggtgctgggtaaagatgcttccgggcagccaatttttaatgcttctgccaaacactggaccaattttgtcattacagaaaatgcaaatgatgcaattggtatccttaacaattctgcctcattcaacaagatgtcaattgaatacaaatatgagatgatgccaaatcgcacatggcgttgtcgagtgtttttacaagatcactgcttagctgaaggttatggaaccaagaaaacaagtaaacatgcagctgccgacgaggctttgaaaattcttcaaaaaacacagcccacttatccatctgtcaaaagttcacaatgccatacaggctcttcacccagaggatctggaaagaagaaagatataaaggatcttgtagtttatgagaattcttcaaatcccgtgtgcacgctgaacgacacagctcagtttaaccgaatgacagttgagtatgtctatgaaaggatgacaggcctccgctggaaatgcaaagtgattctagagagtgaagtaattgcagaagcagttggggtgaagaaaactgtcaaatatgaagctgctggggaagctgtgaaaaccctcaaaaagacccagccaactgtcattaacaacttgaagaaaggagctgttgaagatgtgatttcaagaaatgaaattcagggccgctcagcagaggaggcttacaaacagcaaatcaaagaagataatattggaaatcagctgctgagaaagatgggttggactggtggtggtttaggtaaatctggtgagggcatacgggagcctatctcagtgaaagagcagcataagcgggaagggcttggtctggatgtagagagggtgaataaaattgccaagagagatattgaacagatcatcagaaactacgcccgctccgagagccacacagatttgactttctctagagagctgactaatgatgaacggaagcaaatacatcagattgcccagaagtatggtcttaagagtaagtctcatggggtgggccatgataggtacctagtggtaggtagaaaaagacggaaggaagacctactagatcagctcaaacaggaaggccaagtgggccattacgagcttgttatgcctcaagcaaattgagatcttactaatttattttgtaaatgcctaatgaggcagatttttgaattaaagaaatgctacatgttccggttgcagagtatattcataagatgtctcaccttgttcatttcacatagtggtttattagatattggaacctaaagaattctgtccacttgtattagcttaatccagcagatgatattgtgcagttactgtttgtgtctttgatattgctgtgtccctcagattttagtagtttgacaagcaagaacacatatccaaatggaattttaccctgagaaattatcattttaaagggcatagcacagcaatctgcaacaatatgtaaagttgatattgactacaataaaaatccagtcttaattccagatttactgaaaatgtcagatcattttgtattaatctattttcatctttgtgtgaagccagttatagaatgtttgacaataaattgtgctgtacacgtaaatgtccttaccaactaaatgatgtaaaactttcttaaagtaattttagtgttcatttatttataacttctaccatgtgatttccagactattggaagtgatttactgtatcttgtgatatatgggttttaacaaattctagtcttcacgctgagagagcactacttgagagagcagttgaaagtttcaaaaactttggttcaatctgaagaaaggaagcttgaactgtttgttcttggtgccttgcagagagactcacagcaactctccattatagctttcacacggtttggatgtgcagcacatccaaggcaaccacagctgtggtagagcttggtaaaagactgaagatacattggtgctttgatgaaaaggtcagttggctggtccctctctcaaaaagcttattaagcctgaaaagccaactttgtaacatatttaaaactgctattttcgcttatttctggaatgtaaaaaaaaaaaatgtataaaaagaattagtgtatgcttcctgaataaaaaggagccaaagttgatcagaaaggtgg

SEQ ID NO: 367845 - DNA, 699 bp, Homo sapiens
ccgagccagtgctggagcagtggcgctatagccacgaaagtgactggcagtgggctctgcggcgcagcttcatctgtcggcacctgcacagctatcccggggctgccctcgaccagctcctcgcgctctccgccgcctggaccaaccacgtcttcctgggctgcaggtacagcccacgcttgatggaaaaaattctccaaatggctgaaggtattgatattggggagatgccttcatatgatctggtgctgtccaaaccttccaaaggtcaaaaacgccacctctcaacatgtgatggtcaaaatcctcctaaaaagcaagccggttccaaattccatgcgagacctcgttttgagcctgtacattttgtagctagtagttcaaaagatgaaagacaggaagatccttatggccctcaaacaaaagaggtaaatgaacaaacacattttgccagcatgccaagagacatctaccaagattatactcaagactctttcagtatacaagatgggaattctcagtattgtgattcatctggtccctctctcaaaaagcttattaagcctgaaaagccaactttgtaacatatttaaaactgctattttcgcttatttctggaatgtaaaaaaaaaaaatgtataaaaagaattagtgtatgcttcctgaataaaaaggagccaaagttgatcagaaaggtgg

SEQ ID NO: 367846 - DNA, 3667 bp, Homo sapiens
actcgagcctagggaggcgaggttcccgcaccggataggaacattctgttgttttcctctgccatctagtggcaaaagaaagtaattttcctggttttttgaatggatagccataccttaaaaagcatccagattgcgcagtagtgctagcggcttcgcggttcagtcctcctaactgacagccgccactggtgctgagctgctaggaagcccctgtcggcgagcttgttggagcttgaacccactgtcacccctccgactcaccggcaaaaaaaaaaatggttgaagcagatcgcccaggaaagctcttcattggtgggcttaatacggaaacaaatgagaaagctcttgaaacagtatttggcaaatatggacgaatagtggaagtactcttgataaaagaccgtgaaaccaacaaatcaagaggatttgcttttgtcacctttgaaagcccagcagacgctaaggatgcagccagagacatgaatggaaagtcattagatggaaaagccatcaaggtggaacaagccaccaaaccatcatttgaaagaggtagacatggaccgcccccacctccaagaagtagaggtcctccaagaggttttggagctggaagaggaggaagtggaggaaccaggggacctccttcacgaggaggacacatggatgatggtggatattccatgaattttaacatgagttcttccaggggaccactcccagtaaaaagaggaccaccaccaagaagtgggggtccttctcctaagagatctgcaccttcaggactagttcgcagcagcagtggaatgggaggaagagctcctctatcacgtggaagagatagttatggaggtccacctcgaagggaaccgctcccctctcgtagagatgtttatttgtccccaagagatgatgggtattctactaaagacagctattcaagcagagattacccaagttctcgtgatacaagagattatgcaccaccaccacgagattatacttaccgtgattatggtcattccagttcacgtgatgactatccatcaagaggctatggcgatagagatggatatggtcgtgatcgtgactattcagatcatccaagtggaggttcctacagagattcatatgagagttatggtaactcacgtagtgctccacttacacgagggcccccgccatcttatggtggaagcagtcgctatgatgattatagcagctcacgtgatggatatggtggaagtcgagacagttactcaagcagccgaagtgatctctactcaagttgtgacagggttggcagacaagaaagagggcttcccccttctgtagaaagggggtacccttcttcacgtgattcctacagcagttcaagccgcggagcaccaagaggtgctggccctggaggaagccgatctgatagagggggaggcagaagcagatactagaaacaaacaaaactttggaccaaaatcccagttcaaagaaacaaaaaaaagagtggaaactattctatcataactacccaaggactactaaaaggaaaaattgtgttaccttttttaaattccctgttaagtcccttccgtaatttttatgttcttgtgaggaaaaaagtaaaacatgtttaattttatttgactttatgacattgcttttcaacaagcaaatgttaaatgtgttaagccttgtagtactagtgttgtaactttccaagtaaaggtgtccctaaagaccacttcctatctggtttttcccagtaaatgaggcaagcaattctaagatcttccacaaaacatctagccaactaaaatggagagatgaatcattctgcctatacaaacaagctagctattagagggtggttggagtatgctactcataagatttcagggtgttttctaactgaaatctcactgttctcagtatgcaaaacctgaaatcagatgcctatgtaaggaaagtgctattcacccagtaaacccaaaaaaagcaaatggataatgctggccattttgcctttctgacatttccttgggaatctgcaagaacctcccctttcccctcccacaataagaccatttaagtgtgtgctaaacaactacggaatactaaataaaaagtttggccaaaaccaaccatgaagctgcaaaggtgcttgctcttactctttcaaatttttgcaactctaatgtctcacttttaaaggaacagcttgattgcaaaggagaaaatagataagcaatgaatttatctccaacttcctaaaggcttatgacttctaaaaagtgaatctatcagcattccacatcagatttaaagcatcaaatgcctgtgaaacagcaaagatggttgaagattgtgctcattatgtttgtggagtgctgattgattcacagtagataacgctggcagtaagagaaatcaaatgctaagagttgttgaagcagaaggcggctgattgttggtaagtcagtgcagttgcataagcagtgctgtcagaattggtttggtgcaggcaatagattttgccttcaagggttcctgtggatctcaggaaggcatcagtgttgattaacactcataactagggagtgagtggtagttacttaagtaattgaccaaatggaaaaggggaagtaattaaggaaattggtaagtggaggtagtcaggaggttctcgtggtcctttacacagattttacagctttgggtttcattttgtttagctaaagtcatggggacaactcttcaatttagaacttaagatgaattataaaaatgatggatataagtggtagctctatctggtgaagtgtcttgtcagtaagtgaaacatttttttgtggtggcttatccacaaacagtttagttgtagaataaaacttatgagtgacatctggaaagtaacaaccatgctaagatggcaaacacactggaaacaattgggccacttggctttcttttgctgtattgttttataagcctgctttacctccccgtcttggaaacaagttttagtttattgctttggagactagagccaatagtgtaatgttctcaaaggaaacagacttgagttgttggattagaggaactaactcaacttctaattttttttgttgtaattatggcactgtcatgttttaacatttgcaactagggatagtaagtacaacatttttaactctcatttggcagactactactaatcacagaccacaagggtaatgaccaaatttatgtggttgttacacttccatagttgtcttagccgaatccttccatattcttatgattacttgggttaaagcttctgtgaggaccttttggctcttaagatatcctaaatatttaaaatatttagatatcctaaatataggatatagagtttgtaccaaatatgaatgaatattgttcaaagcaaggagtatgttaaaatgaccagacacctgtttgataaatagtttactgaactagcagacgtgtggaaaaagaatcagatcttgattcttctgggtttatactggttgtaaaacagaatgatattagaaaatgttttccttgtttaagtggtagttgaacatagaacttgggtattatagatcacttttcactttttggaatgttttgtattgaaacttaatacaactttaacatggca

SEQ ID NO: 367847 - DNA, 4527 bp, Homo sapiens
ggcacgaggagagagtcctctggtcctctcttgccatacacactacactgtgccttctacctcgcatcaaaacgctcaatagacgttgcgatgatgcgactgaagattatgcaacgcgttccatccggagcggccagcatgaccagctggccaggggctgactcctgccttttgttttgtattgacgagacccttgcgagttctaattctgatttgcacttgccctgaggtgcctccactgctcttatatgggagacactcttaatttaacagatgaaaatattctgatactctgatttgcttttgtcacctttgaaagcccagcagacgctaaggatgcagccagagacatgaatggaaagtcattagatggaaaagccatcaaggtggaacaagccaccaaaccatcatttgaaagaggtagacatggaccgcccccacctccaagaagtagaggtcctccaagaggttttggagctggaagaggaggaagtggaggaaccaggggacctccttcacgaggaggacacatggatgatggtggatattccatgaattttaacatgagttcttccaggggaccactcccagtaaaaagaggaccaccaccaagaagtgggggtccttctcctaagagatctgcaccttcaggactagttcgcagcagcagtggaatgggaggaagagctcctctatcacgtggaagagatagttatggaggtccacctcgaagggaaccgctcccctctcgtagagatgtttatttgtccccaagagatgatgggtattctactaaagacagctattcaagcagagattacccaagttctcgtgatacaagagattatgcaccaccaccacgagattatacttaccgtgattatggtcattccagttcacgtgatgactatccatcaagaggctatggcgatagagatggatatggtcgtgatcgtgactattcagatcatccaagtggaggttcctacagagattcatatgagagttatggtaactcacgtagtgctccacttacacgagggcccccgccatcttatggtggaagcagtcgctatgatgattatagcagctcacgtgatggatatggtggaagtcgagacagttactcaagcagccgaagtgatctctactcaagttgtgacagggttggcagacaagaaagagggcttcccccttctgtagaaagggggtacccttcttcacgtgattcctacagcagttcaagccgcggagcaccaagaggtgctggccctggaggaagccgatctgatagagggggaggcagaagcagatactagaaacaaacaaaactttggaccaaaatcccagttcaaagaaacaaaaaaaagagtggaaactattctatcataactacccaaggactactaaaaggaaaaattgtgttaccttttttaaattccctgttaagtcccttccgtaatttttatgttcttgtgaggaaaaaagtaaaacatgtttaattttatttgactttatgacattgcttttcaacaagcaaatgttaaatgtgttaagccttgtagtactagtgttgtaactttccaagtaaaggtgtccctaaagaccacttcctatctggtttttcccagtaaatgaggcaagcaattctaagatcttccacaaaacatctagccaactaaaatggagagatgaatcattctgcctatacaaacaagctagctattagagggtggttggagtatgctactcataagatttcagggtgttttctaactgaaatctcactgttctcagtatgcaaaacctgaaatcagatgcctatgtaaggaaagtgctattcacccagtaaacccaaaaaaagcaaatggataatgctggccattttgcctttctgacatttccttgggaatctgcaagaacctcccctttcccctcccacaataagaccatttaagtgtgtgctaaacaactacggaatactaaataaaaagtttggccaaaaccaaccatgaagctgcaaaggtgcttgctcttactctttcaaatttttgcaactctaatgtctcacttttaaaggaacagcttgattgcaaaggagaaaatagataagcaatgaatttatctccaacttcctaaaggcttatgacttctaaaaagtgaatctatcagcattccacatcagatttaaagcatcaaatgcctgtgaaacagcaaagatggttgaagattgtgctcattatgtttgtggagtgctgattgattcacagtagataacgctggcagtaagagaaatcaaatgctaagagttgttgaagcagaaggcggctgattgttggtaagtcagtgcagttgcataagcagtgctgtcagaattggtttggtgcaggcaatagattttgccttcaagggttcctgtggatctcaggaaggcatcagtgttgattaacactcataactagggagtgagtggtagttacttaagtaattgaccaaatggaaaaggggaagtaattaaggaaattggtaagtggaggtagtcaggaggttctcgtggtcctttacacagattttacagctttgggtttcattttgtttagctaaagtcatggggacaactcttcaatttagaacttaagatgaattataaaaatgatggatataagtggtagctctatctggtgaagtgtcttgtcagtaagtgaaacatttttttgtggtggcttatccacaaacagtttagttgtagaataaaacttatgagtgacatctggaaagtaacaaccatgctaagatggcaaacacactggaaacaattgggccacttggctttcttttgctgtattgttttataagcctgctttacctccccgtcttggaaacaagttttagtttattgctttggagactagagccaatagtgtaatgttctcaaaggaaacagacttgagttgttggattagaggaactaactcaacttctaattttttttgttgtaattatggcactgtcatgttttaacatttgcaactagggatagtaagtacaacatttttaactctcatttggcagactactactaatcacagaccacaagggtaatgaccaaatttatgtggttgttacacttccatagttgtcttagccgaatccttccatattcttatgattacttgggttaaagcttctgtgaggaccttttggctcttaagatatcctaaatatttaaaatatttagatatcctaaatataggatatagagtttgtaccaaatatgaatgaatattgttcaaagcaaggagtatgttaaaatgaccagacacctgtttgataaatagtttactgaactagcagacgtgtggaaaaagaatcagatcttgattcttctgggtttatactggttgtaaaacagaatgatattagaaaatgttttccttgtttaagtggtagttgaacatagaacttgggtattatagatcacttttcactttttggaatgttttgtattgaaacttaatacaactttaacatggcaaaaaaaaaaaaaatccaaaatctatgagataattttgttaaagttggcttgcttgggcgggtgcttggtccagagggagaaaagaaggcatgatttcagaatactctggcagctttttaaattcagctttatcaagttacagtaaactgtatctgtttagaattacaactcaatggttattttgacagatgtatatgccatgaagccactgtcaccatcaacatgcagaacacttccatcgcccccaaaagattcctcaagttcctttgcagtccatccctcacgctgctgatttgtctttgtcaccatatattagtttgctttgtggtggtgtttagtattttatataaatgggattgtgtagcatgtacttttttgtttatggtttctttcacacacaatgactttgaaattcaccaggttgcagtgtatcagtagcttattccttttattgctgagtagtgtcccattatgtgaatatgccattatttgtttttctactcacctgttgatggaccttgggattgtttccagtttggggctactgtgaataaaactgttaggaacatttgtgtacaagccactgtgtagacataggttttcctttctcttgggtaaatacctaccagtaaaatggttgggttgcatggcagatttatgtttaataaagtaactgccaaactgtttgttttccaaaggggctatacccttttatattcccaccagggttgtatagagttccaactgccaacactcagttttcagccattctgatgggaatctagtggtatctcattgtggttttattttcatttccccgggtgactaatgctggtaagcatcttttaaggtactttttggccagttgtatattttctgtgaagtggctgtcaaatcttttgcccacttttaattggattgtttgtcttattgagttgtaaaagttctttatatatactgtattaaagtcctttgtaagacaaaaaaaaaaa

SEQ ID NO: 367848 - DNA, 1253 bp, Homo sapiens
actcgagcctagggaggcgaggttcccgcaccggatagcatgtttttggcccagaggagcctctgctctcttagcggtagagcaaaattcctgaagacaatttcttcttccaaaatcctcggattctctacttctgctgaacattctgttgttttcctctgccatctagtggcaaaagaaagtaattttcctggttttttgaatggatagccataccttaaaaagcatccagattgcgcagtagtgctagcggcttcgcggttcagtcctcctaactgacagccgccactggtgctgagctgctaggaagcccctgtcggcgagcttgttggagcttgaacccactgtcacccctccgactcaccggcaaaaaaaaaaatggttgaagcagatcgcccaggaaagctcttcattggtgggcttaatacggaaacaaatgagaaagctcttgaaacagtatttggcaaatatggacgaatagtggaagtactcttgataaaagaccgtgaaaccaacaaatcaagaggatttgcttttgtcacctttgaaagcccagcagacgctaaggatgcagccagagacatgaatggaaagtccactttcacaggaaactttttggggcgggaaaagccatcaaggtggcaacaagccaccaaaccatcatttgaaagtgcgctttacgtaacccggcttggggggatccccgctccctcacatcgctgttttcggccgaagtaagggcgcatcacaaaaaacctgcggtgggggggggcggcgcgaagtcaagctttttttaacgccacgcgtcccctcccatagcacgtggcttcccttcttccaaagcggcccaaaaaaccggggggcgtggggaacaccccagggggcgggcgtcgccccctcttttgggggcggcaacacaatggcaccggtgccaccgccgccacatcgtcgcgccacggtgggaacccccaacgggcgggggggcggctgggaaaatcccccccccggattttttccccgcccaccccctttcccaaccgggggggcagggaacgacccacactttggtgcgcccacttcttggtcaaaacccccgggacggtggcctttgcgggctgtgacgcgtcccccaacacttctttacacaaccagttttttttacgtacgtacagctcagatcagagcagaatctacaaaacagacaccacagatgcaagcacacatctactcaaaatacgacgatcactcctaca

SEQ ID NO: 367849 - DNA, 4759 bp, Homo sapiens
actcgagcctagggaggcgaggttcccgcaccggatagcatgtttttggcccagaggagcctctgctctcttagcggtagagcaaaattcctgaagacaatttcttcttccaaaatcctcggattctctacttctgctgaacattctgttgttttcctctgccatctagtggcaaaagaaagtaattttcctggttttttgaatggatagccataccttaaaaagcatccagattgcgcagtagtgctagcggcttcgcggttcagtcctcctaactgacagccgccactggtgctgagctgctaggaagcccctgtcggcgagcttgttggagcttgaacccactgtcacccctccgactcaccggcaaaaaaaaaaatggttgaagcagatcgcccaggaaagctcttcattggtgggcttaatacggaaacaaatgagaaagctcttgaaacagtatttggcaaatatggacgaatagtggaagtactcttgataaaagaccgtgaaaccaacaaatcaagaggatttgcttttgtcacctttgaaagcccagcagacgctaaggatgcagccagagacatgaatggaaagtcattagatggaaaagccatcaaggtggaacaagccaccaaaccatcatttgaaagaggtagacatggaccgcccccacctccaagaagtagaggtcctccaagaggttttggagctggaagaggaggaagtggaggaaccaggggacctccttcacgaggaggacacatggatgatggtggatattccatgaattttaacatgagttcttccaggggaccactcccagtaaaaagaggaccaccaccaagaagtgggggtccttctcctaagagatctgcaccttcaggactagttcgcagcagcagtggaatgggaggaagagctcctctatcacgtggaagagatagttatggaggtccacctcgaagggaaccgctcccctctcgtagagatgtttatttgtccccaagagatgatgggtattctactaaagacagctattcaagcagagattacccaagttctcgtgatacaagagattatgcaccaccaccacgagattatacttaccgtgattatggtcattccagttcacgtgatgactatccatcaagaggctatggcgatagagatggatatggtcgtgatcgtgactattcagatcatccaagtggaggttcctacagagattcatatgagagttatggtaactcacgtagtgctccacttacacgagggcccccgccatcttatggtggaagcagtcgctatgatgattatagcagctcacgtgatggatatggtggaagtcgagacagttactcaagcagccgaagtgatctctactcaagttgtgacagggttggcagacaagaaagagggcttcccccttctgtagaaagggggtacccttcttcacgtgattcctacagcagttcaagccgcggagcaccaagaggtgctggccctggaggaagccgatctgatagagggggaggcagaagcagatactagaaacaaacaaaactttggaccaaaatcccagttcaaagaaacaaaaaaaagagtggaaactattctatcataactacccaaggactactaaaaggaaaaattgtgttaccttttttaaattccctgttaagtcccttccgtaatttttatgttcttgtgaggaaaaaagtaaaacatgtttaattttatttgactttatgacattgcttttcaacaagcaaatgttaaatgtgttaagccttgtagtactagtgttgtaactttccaagtaaaggtgtccctaaagaccacttcctatctggtttttcccagtaaatgaggcaagcaattctaagatcttccacaaaacatctagccaactaaaatggagagatgaatcattctgcctatacaaacaagctagctattagagggtggttggagtatgctactcataagatttcagggtgttttctaactgaaatctcactgttctcagtatgcaaaacctgaaatcagatgcctatgtaaggaaagtgctattcacccagtaaacccaaaaaaagcaaatggataatgctggccattttgcctttctgacatttccttgggaatctgcaagaacctcccctttcccctcccacaataagaccatttaagtgtgtgctaaacaactacggaatactaaataaaaagtttggccaaaaccaaccatgaagctgcaaaggtgcttgctcttactctttcaaatttttgcaactctaatgtctcacttttaaaggaacagcttgattgcaaaggagaaaatagataagcaatgaatttatctccaacttcctaaaggcttatgacttctaaaaagtgaatctatcagcattccacatcagatttaaagcatcaaatgcctgtgaaacagcaaagatggttgaagattgtgctcattatgtttgtggagtgctgattgattcacagtagataacgctggcagtaagagaaatcaaatgctaagagttgttgaagcagaaggcggctgattgttggtaagtcagtgcagttgcataagcagtgctgtcagaattggtttggtgcaggcaatagattttgccttcaagggttcctgtggatctcaggaaggcatcagtgttgattaacactcataactagggagtgagtggtagttacttaagtaattgaccaaatggaaaaggggaagtaattaaggaaattggtaagtggaggtagtcaggaggttctcgtggtcctttacacagattttacagctttgggtttcattttgtttagctaaagtcatggggacaactcttcaatttagaacttaagatgaattataaaaatgatggatataagtggtagctctatctggtgaagtgtcttgtcagtaagtgaaacatttttttgtggtggcttatccacaaacagtttagttgtagaataaaacttatgagtgacatctggaaagtaacaaccatgctaagatggcaaacacactggaaacaattgggccacttggctttcttttgctgtattgttttataagcctgctttacctccccgtcttggaaacaagttttagtttattgctttggagactagagccaatagtgtaatgttctcaaaggaaacagacttgagttgttggattagaggaactaactcaacttctaattttttttgttgtaattatggcactgtcatgttttaacatttgcaactagggatagtaagtacaacatttttaactctcatttggcagactactactaatcacagaccacaagggtaatgaccaaatttatgtggttgttacacttccatagttgtcttagccgaatccttccatattcttatgattacttgggttaaagcttctgtgaggaccttttggctcttaagatatcctaaatatttaaaatatttagatatcctaaatataggatatagagtttgtaccaaatatgaatgaatattgttcaaagcaaggagtatgttaaaatgaccagacacctgtttgataaatagtttactgaactagcagacgtgtggaaaaagaatcagatcttgattcttctgggtttatactggttgtaaaacagaatgatattagaaaatgttttccttgtttaagtggtagttgaacatagaacttgggtattatagatcacttttcactttttggaatgttttgtattgaaacttaatacaactttaacatggcaaaaaaaaaaaaaatccaaaatctatgagataattttgttaaagttggcttgcttgggcgggtgcttggtccagagggagaaaagaaggcatgatttcagaatactctggcagctttttaaattcagctttatcaagttacagtaaactgtatctgtttagaattacaactcaatggttattttgacagatgtatatgccatgaagccactgtcaccatcaacatgcagaacacttccatcgcccccaaaagattcctcaagttcctttgcagtccatccctcacgctgctgatttgtctttgtcaccatatattagtttgctttgtggtggtgtttagtattttatataaatgggattgtgtagcatgtacttttttgtttatggtttctttcacacacaatgactttgaaattcaccaggttgcagtgtatcagtagcttattccttttattgctgagtagtgtcccattatgtgaatatgccattatttgtttttctactcacctgttgatggaccttgggattgtttccagtttggggctactgtgaataaaactgttaggaacatttgtgtacaagccactgtgtagacataggttttcctttctcttgggtaaatacctaccagtaaaatggttgggttgcatggcagatttatgtttaataaagtaactgccaaactgtttgttttccaaaggggctatacccttttatattcccaccagggttgtatagagttccaactgccaacactcagttttcagccattctgatgggaatctagtggtatctcattgtggttttattttcatttccccgggtgactaatgctggtaagcatcttttaaggtactttttggccagttgtatattttctgtgaagtggctgtcaaatcttttgcccacttttaattggattgtttgtcttattgagttgtaaaagttctttatatatactgtattaaagtcctttgtaagacaaaaaaaaaaa

SEQ ID NO: 367850 - DNA, 1256 bp, Homo sapiens
aagaaacaagctgggcagctctgggagagaggagtgtcagacagctgttgtcaacaggcacctggccagagtgaaaaggaggggcagattccatccaagtcccagcggcgccagctgacactctctgccaatgcccaggtgctgagcgacagtgtcccaccggtccctgtgcccagaatggcctgcaccaagaccctgcaacagtcccagcccatctccgcaggagccaccacaaccaccaccgctgtggcccctgctgggggtcattctggctccacagaatgtgacctggagtgtctggtgtgccgggagccctacagctgtccccggttgcccaagctgctggcctgccagcatgccttctgcgccatctgcctgaagctcctgctgtgcgtgcaggacaacacctggtccatcacctgcccgctgtgccgcaaggtcaccgccgtccccgggggcctcatctgcagcctgcgcgaccatgaggcggtggtggggcagctggcccagccatgcacagaggtatcgctctgtcctcaggggctggtggatcctgctgacttggcagcaggacaccccagcttggtgggagaggatggacaggatgaagtaagtgcaaaccacgtggcagcccggcgcctggccgcgcacctactcctgctggccttgctcattatcctcatcgggcccttcatctacccgggtgtcttacgatgggtgctcaccttcatcatcgccctggccctgctgatgtccaccctcttctgctgtctccccagcacccggggcagctgctggccctcctccaggactctcttctgcagagagcagaaacacagccacatctcttccattgcctgagtgccctctgatgaggctatccctgcagccctttctgcccttgggcccccggacttccacaatgaacagggtaaggggttacggactaagactggctcctttgggaaatcacatgccagcgggacttgcaagccacaaccgagatggccagcctgggtcaagaattacacgcttggatgacaggcttgcacttgcccttgggatagcatagctaaaactgttggtggctaggggagcagacacaaactacttgaacatgacaagatgggggaagctcctgttcctcttattccaatgttcttggtttttctttatataacttgatgaaagtattgcagtattgatgccattgtagaatagaactggaattccattctttttgcaatttaaaaaaa

SEQ ID NO: 367851 - DNA, 813 bp, Homo sapiens
attattctttcaggttgtctttatggtttttttttaaaaattgcaacagaataaacggttttgcagttattttgtgtgaacttttaaatgctatagaaagtaatttacctaaaacactcaaactttaatcactataaataaaaaaaagtaacgaaaatattttctttaaaggctttatttgcattcttgtaaattttattatttcaagtcaatgtgttaagaattactgcgcatatagttatttcttttataaatttgttttccgtgattccttcaaaagctttcttattgttggcctttattttctgcagagaagactacagttttacagcttatgctaccatttcgtatttgaaaataggacctaaagctaatcttctgaacaatgaggcacatgctattactatgcaagtgacaaagtccacgcagaactctttcagggtaaatggctattaattttcagttttatatattttaaaaagtatattaaagcctatgggatgcttttctgtcatattcccctaggtccagttgaacatgagaaaagtcagttttctgattagatttctgggtatggaagagagaaaatatagttttctgtaaagatgtaagtgaaagaatttagactggccttttaacataaactaggggtttccagtttcttggaatgggaggactccgtttgaatatctaattttgttatgcactctgctcttatttggttgtgattactaatagttgagaagtctgtttctgctgttccagtggttagaaaccactgttttaaaccaaatactatcaagtctgcaaaag

SEQ ID NO: 367852 - DNA, 3807 bp, Homo sapiens
tataagattattagtataaaattttagataggtaggagtagcggaaagatctgctcgaggcctgggtgctttggtgtcggagatccgagagtcggagatcggagagtcggacacaggacagtcggacaccggacagtcaaacaccggagagttagactgggcttctcggtggggagaggctctgggataactactgttacagctttgaagggtcaagggtgtgcgctttttgtttcatccttccctttcctgctgcagggcgaggccggtctgtagcggatcacttcctttcgcccacacattggcggaggagaaaccggaaagttaatcactgccctgctctgagaactcgggcctttaggggcacgttcgcctgctgaccggtcttctgatctccccattcttttccatgcaggaggattggccaccaaagcctgtttattagcagctgccatttgttgaaagaaatttggattattttagaaacaaatttggaaagaaaaagaatggcgtccgtttcagctctaactgaggaactggattctataaccagtgagctacatgcagtagaaattcaaattcaagaacttacggaaaggcaacaagagcttattcagaaaaaaaaagtcctgacaaagaaaataaagcagtgtttagaggattctgatgccggggcaagcaatgaatatgattcttcacctgccgcttggaataaagaagattttccatggtctggtaaagttaaagatattctgcaaaatgtctttaaactggaaaagttcagaccacttcagcttgaaactattaacgtaacaatggctggaaaggaggtatttcttgttatgcctacaggaggtggaaagagcttatgttaccagttaccagcattatgttcagatggttttacactcgtcatttgcccattgatctctcttatggaagaccaattaatggttttaaaacaattaggaatttcagcaaccatgttaaatgcttctagttctaaggagcatgttaaatgggttcatgctgaaatggtaaataaaaactccgagttaaagctgatttatgtgactccagagaaaattgcaaaaagcaaaatgtttatgtcaagactagagaaagcctatgaagcaaggagatttactcgaattgctgtggatgaagttcactgctgtagtcagtggggacatgatttcagacctgattataaggcacttggtatcttaaagcggcagttccctaacgcatcactaattgggctgactgcaactgcaacaaatcacgttttgacggatgctcagaaaattttgtgcattgaaaagtgttttacttttacagcttcttttaataggccaaatctatattatgaggttcggcagaagccctcaaacactgaagattttattgaggatattgtaaagctcattaatgggagatacaaagggcaatcaggaatcatatattgtttttctcagaaagactctgaacaagttacggttagtttgcagaatctgggaattcatgcaggtgcttaccatgccaatttggagccagaagataagaccacagttcatagaaaatggtcagccaatgaaattcaggtagtagtggcaactgttgcatttggtatgggaattgataagccagatgtgaggtttgttatccatcattcaatgagtaaatccatggaaaattattaccaagagagtggacgtgcaggtcgagatgacatgaaagcagactgtattttgtactacggctttggagatatattcagaataagttcaatggtggtgatggaaaatgtgggacagcagaagctttatgagatggtatcatactgtcaaaacataagcaaatgtcgtcgtgtgttgatggctcaacattttgatgaagtatggaactcagaagcatgtaacaaaatgtgcgataactgctgtaaagacagtgcatttgaaagaaagaacataacagagtactgcagagatctaatcaagatcctgaagcaggcagaggaactgaatgaaaaactcactccattgaaactgattgattcttggatgggaaagggtgcagcaaaactgagagtagcaggtgttgtggctcccacacttcctcgtgaagatctggagaagattattgcacactttctaatacagcagtatcttaaagaagactacagttttacagcttatgctaccatttcgtatttgaaaataggacctaaagctaatcttctgaacaatgaggcacatgctattactatgcaagtgacaaagtccacgcagaactctttcagggctgaatcgtctcaaacttgtcattctgaacaaggtgataaaaagatggaggaaaaaaattcaggcaacttccagaagaaggctgcaaacatgcttcagcaatctggttctaagaatacaggagctaagaaaagaaaaatcgatgatgcctgatatgaatgttactaaattttctaattaaagatggtttatgcatgtatatgccattatttttgtagttagacaatagtttttaaaagaatttcatagatattttatatgtatggatctatattttcagagcttatctctgaagatctaaacttttgagaatgtttgaaaattagagatcatgaattatataattttccagtataaaacaagggaaaaatttttatgtaaaaccctttaaatgtaaaatatttgagaataagttcatacaatcgtcttaagttttttatgcctttatatacttagctatattttttcttttgacataactatctttttgaaagcaatattatactgacagaggctcactgagtgatactttaagttaaatatgtagatcaaggatgtccaatcttttggcttccctgagccacattggaagaagaattgtcttgggccgcacataaaatatgctaacactgatgatagctgatgagcttaaaaaaaaaattgcaagaaaaatctcatgttttaagaaagtttacaaaaaatgtaaaatatttgagaataagttcatgtaattgtcttaagttttttatgcctttatatacttagctatattttttcttttgacataaccatctttttgaaagcaatattatactgacagaggttcactgagtgatactttaagttaaatatgtagatcagggatgtccaatcttttggcttccctgagccacattggaagaagaattgtcttgggccgcacataaaatatgctaacactgacgatagctgatgagcttaaaaaaaaaaaaattgcaagaaaaatctcatgttttaagaaagtttacagatttgtgttgggctgcattcaaagctgttctgggctgcattagacccgtgggctagagttggacaagcttgtagatgatttcaggttataaaaccagaagtacaattcaacaaaaaaggagtaagtcatcaatataaatattagcaaacgagatattgctacatctctatttaaagtaaaatacaaccgattttaaagttcctgaaaccatagccatattttgacatttcacaaagaatggttctagtctactagagtacatttggctaagtagataacttacctaaatttgctccaaagctaaatcacaagtaaacatatttatgtttaaaacacagaaataaataacttaagatttttatctaagcggtcagtgttgtattggaaagatatatctataaataaactttgaactgatttcaaacttagaatttatgtttttatatttttccactaatatcattatcacttctgtaattttcagtgtggtcatca

SEQ ID NO: 367853 - DNA, 3543 bp, Homo sapiens
tataagattattagtataaaattttagataggtaggagtagcggaaagatctgctcgaggcctgggtgctttggtgtcggagatccgagagtcggagatcggagagtcggacacaggacagtcggacaccggacagtcaaacaccggagagttagactgggcttctcggtggggagaggctctgggataactactgttacagctttgaagggtcaagggaggattggccaccaaagcctgtttattagcagctgccatttgttgaaagaaatttggattattttagaaacaaatttggaaagaaaaagaatggcgtccgtttcagctctaactgaggaactggattctataaccagtgagctacatgcagtagaaattcaaattcaagaacttacggaaaggcaacaagagcttattcagaaaaaaaaagtcctgacaaagaaaataaagcagtgtttagaggattctgatgccggggcaagcaatgaatatgattcttcacctgccgcttggaataaagaagattttccatggtctggtaaagttaaagatattctgcaaaatgtctttaaactggaaaagttcagaccacttcagcttgaaactattaacgtaacaatggctggaaaggaggtatttcttgttatgcctacaggaggtggaaagagcttatgttaccagttaccagcattatgttcagatggttttacactcgtcatttgcccattgatctctcttatggaagaccaattaatggttttaaaacaattaggaatttcagcaaccatgttaaatgcttctagttctaaggagcatgttaaatgggttcatgctgaaatggtaaataaaaactccgagttaaagctgatttatgtgactccagagaaaattgcaaaaagcaaaatgtttatgtcaagactagagaaagcctatgaagcaaggagatttactcgaattgctgtggatgaagttcactgctgtagtcagtggggacatgatttcagacctgattataaggcacttggtatcttaaagcggcagttccctaacgcatcactaattgggctgactgcaactgcaacaaatcacgttttgacggatgctcagaaaattttgtgcattgaaaagtgttttacttttacagcttcttttaataggccaaatctatattatgaggttcggcagaagccctcaaacactgaagattttattgaggatattgtaaagctcattaatgggagatacaaagggcaatcaggaatcatatattgtttttctcagaaagactctgaacaagttacggttagtttgcagaatctgggaattcatgcaggtgcttaccatgccaatttggagccagaagataagaccacagttcatagaaaatggtcagccaatgaaattcaggtagtagtggcaactgttgcatttggtatgggaattgataagccagatgtgaggtttgttatccatcattcaatgagtaaatccatggaaaattattaccaagagagtggacgtgcaggtcgagatgacatgaaagcagactgtattttgtactacggctttggagatatattcagaataagttcaatggtggtgatggaaaatgtgggacagcagaagctttatgagatggtatcatactgtcaaaacataagcaaatgtcgtcgtgtgttgatggctcaacattttgatgaagtatggaactcagaagcatgtaacaaaatgtgcgataactgctgtaaagacagtgcatttgaaagaaagaacataacagagtactgcagagatctaatcaagatcctgaagcaggcagaggaactgaatgaaaaactcactccattgaaactgattgattcttggatgggaaagggtgcagcaaaactgagagtagcaggtgttgtggctcccacacttcctcgtgaagatctggagaagattattgcacactttctaatacagcagtatcttaaagaagactacagttttacagcttatgctaccatttcgtatttgaaaataggacctaaagctaatcttctgaacaatgaggcacatgctattactatgcaagtgacaaagtccacgcagaactctttcagggctgaatcgtctcaaacttgtcattctgaacaaggtgataaaaagatggaggaaaaaaattcaggcaacttccagaagaaggctgcaaacatgcttcagcaatctggttctaagaatacaggagctaagaaaagaaaaatcgatgatgcctgatatgaatgttactaaattttctaattaaagatggtttatgcatgtatatgccattatttttgtagttagacaatagtttttaaaagaatttcatagatattttatatgtatggatctatattttcagagcttatctctgaagatctaaacttttgagaatgtttgaaaattagagatcatgaattatataattttccagtataaaacaagggaaaaatttttatgtaaaaccctttaaatgtaaaatatttgagaataagttcatacaatcgtcttaagttttttatgcctttatatacttagctatattttttcttttgacataactatctttttgaaagcaatattatactgacagaggctcactgagtgatactttaagttaaatatgtagatcaaggatgtccaatcttttggcttccctgagccacattggaagaagaattgtcttgggccgcacataaaatatgctaacactgatgatagctgatgagcttaaaaaaaaaattgcaagaaaaatctcatgttttaagaaagtttacaaaaaatgtaaaatatttgagaataagttcatgtaattgtcttaagttttttatgcctttatatacttagctatattttttcttttgacataaccatctttttgaaagcaatattatactgacagaggttcactgagtgatactttaagttaaatatgtagatcagggatgtccaatcttttggcttccctgagccacattggaagaagaattgtcttgggccgcacataaaatatgctaacactgacgatagctgatgagcttaaaaaaaaaaaaattgcaagaaaaatctcatgttttaagaaagtttacagatttgtgttgggctgcattcaaagctgttctgggctgcattagacccgtgggctagagttggacaagcttgtagatgatttcaggttataaaaccagaagtacaattcaacaaaaaaggagtaagtcatcaatataaatattagcaaacgagatattgctacatctctatttaaagtaaaatacaaccgattttaaagttcctgaaaccatagccatattttgacatttcacaaagaatggttctagtctactagagtacatttggctaagtagataacttacctaaatttgctccaaagctaaatcacaagtaaacatatttatgtttaaaacacagaaataaataacttaagatttttatctaagcggtcagtgttgtattggaaagatatatctataaataaactttgaactgatttcaaactta

SEQ ID NO: 367854 - DNA, 3832 bp, Homo sapiens
  misc_feature (35)..(35): n is a, c, g, or t
aagatggataagcaaaagcatttattggtcaatgngatatgttacggttgaggcatacccaggataagaactaagcaatactaaatcagttattacccgatatttactcttggctcaccatgtacatcaaacatttataaatctcaatgtgcttctggaatttgaataaggattttggagcacctcaaggccaatctgtgattaatgagaactgttgagttacttggcttggtgtcacagttgcccactggttgaaaaggctggctttagtatctctactatagccagggattcccactttatcatggctgtctctctctgaggcacttcttgccatttaattgtaggattttaatggggaagattttactcccgagtagcggaaagatctgctcgaggcctgggtgctttggtgtcggagatccgagagtcggagatcggagagtcggacacaggacagtcggacaccggacagtcaaacaccggagagttagactgggcttctcggaggattggccaccaaagcctgtttattagcagctgccatttgttgaaagaaatttggattattttagaaacaaatttggaaagaaaaagaatggcgtccgtttcagctctaactgaggaactggattctataaccagtgagctacatgcagtagaaattcaaattcaagaacttacggaaaggcaacaagagcttattcagaaaaaaaaagtcctgacaaagaaaataaagcagtgtttagaggattctgatgccggggcaagcaatgaatatgattcttcacctgccgcttggaataaagaagattttccatggtctggtaaagttaaagatattctgcaaaatgtctttaaactggaaaagttcagaccacttcagcttgaaactattaacgtaacaatggctggaaaggaggtatttcttgttatgcctacaggaggtggaaagagcttatgttaccagttaccagcattatgttcagatggttttacactcgtcatttgcccattgatctctcttatggaagaccaattaatggttttaaaacaattaggaatttcagcaaccatgttaaatgcttctagttctaaggagcatgttaaatgggttcatgctgaaatggtaaataaaaactccgagttaaagctgatttatgtgactccagagaaaattgcaaaaagcaaaatgtttatgtcaagactagagaaagcctatgaagcaaggagatttactcgaattgctgtggatgaagttcactgctgtagtcagtggggacatgatttcagacctgattataaggcacttggtatcttaaagcggcagttccctaacgcatcactaattgggctgactgcaactgcaacaaatcacgttttgacggatgctcagaaaattttgtgcattgaaaagtgttttacttttacagcttcttttaataggccaaatctatattatgaggttcggcagaagccctcaaacactgaagattttattgaggatattgtaaagctcattaatgggagatacaaagggcaatcaggaatcatatattgtttttctcagaaagactctgaacaagttacggttagtttgcagaatctgggaattcatgcaggtgcttaccatgccaatttggagccagaagataagaccacagttcatagaaaatggtcagccaatgaaattcaggtagtagtggcaactgttgcatttggtatgggaattgataagccagatgtgaggtttgttatccatcattcaatgagtaaatccatggaaaattattaccaagagagtggacgtgcaggtcgagatgacatgaaagcagactgtattttgtactacggctttggagatatattcagaataagttcaatggtggtgatggaaaatgtgggacagcagaagctttatgagatggtatcatactgtcaaaacataagcaaatgtcgtcgtgtgttgatggctcaacattttgatgaagtatggaactcagaagcatgtaacaaaatgtgcgataactgctgtaaagacagtgcatttgaaagaaagaacataacagagtactgcagagatctaatcaagatcctgaagcaggcagaggaactgaatgaaaaactcactccattgaaactgattgattcttggatgggaaagggtgcagcaaaactgagagtagcaggtgttgtggctcccacacttcctcgtgaagatctggagaagattattgcacactttctaatacagcagtatcttaaagaagactacagttttacagcttatgctaccatttcgtatttgaaaataggacctaaagctaatcttctgaacaatgaggcacatgctattactatgcaagtgacaaagtccacgcagaactctttcagggctgaatcgtctcaaacttgtcattctgaacaaggtgataaaaagatggaggaaaaaaattcaggcaacttccagaagaaggctgcaaacatgcttcagcaatctggttctaagaatacaggagctaagaaaagaaaaatcgatgatgcctgatatgaatgttactaaattttctaattaaagatggtttatgcatgtatatgccattatttttgtagttagacaatagtttttaaaagaatttcatagatattttatatgtatggatctatattttcagagcttatctctgaagatctaaacttttgagaatgtttgaaaattagagatcatgaattatataattttccagtataaaacaagggaaaaatttttatgtaaaaccctttaaatgtaaaatatttgagaataagttcatacaatcgtcttaagttttttatgcctttatatacttagctatattttttcttttgacataactatctttttgaaagcaatattatactgacagaggctcactgagtgatactttaagttaaatatgtagatcaaggatgtccaatcttttggcttccctgagccacattggaagaagaattgtcttgggccgcacataaaatatgctaacactgatgatagctgatgagcttaaaaaaaaaattgcaagaaaaatctcatgttttaagaaagtttacaaaaaatgtaaaatatttgagaataagttcatgtaattgtcttaagttttttatgcctttatatacttagctatattttttcttttgacataaccatctttttgaaagcaatattatactgacagaggttcactgagtgatactttaagttaaatatgtagatcagggatgtccaatcttttggcttccctgagccacattggaagaagaattgtcttgggccgcacataaaatatgctaacactgacgatagctgatgagcttaaaaaaaaaaaaattgcaagaaaaatctcatgttttaagaaagtttacagatttgtgttgggctgcattcaaagctgttctgggctgcattagacccgtgggctagagttggacaagcttgtagatgatttcaggttataaaaccagaagtacaattcaacaaaaaaggagtaagtcatcaatataaatattagcaaacgagatattgctacatctctatttaaagtaaaatacaaccgattttaaagttcctgaaaccatagccatattttgacatttcacaaagaatggttctagtctactagagtacatttggctaagtagataacttacctaaatttgctccaaagctaaatcacaagtaaacatatttatgtttaaaacacagaaataaataacttaagatttttatctaagcggtcagtgttgtattggaaagatatatctataaataaactttgaactgatttcaaactta

SEQ ID NO: 367855 - DNA, 1878 bp, Homo sapiens
attattctttcaggttgtctttatggtttttttttaaaaattgcaacagaataaacggttttgcagttattttgtgtgaacttttaaatgctatagaaagtaatttacctaaaacactcaaactttaatcactataaataaaaaaaagtaacgaaaatattttctttaaaggctttatttgcattcttgtaaattttattatttcaagtcaatgtgttaagaattactgcgcatatagttatttcttttataaatttgttttccgtgattccttcaaaagctttcttattgttggcctttattttctgcagagaagactacagttttacagcttatgctaccatttcgtatttgaaaataggacctaaagctaatcttctgaacaatgaggcacatgctattactatgcaagtgacaaagtccacgcagaactctttcagggctgaatcgtctcaaacttgtcattctgaacaaggtgataaaaagatggaggaaaaaaattcaggcaacttccagaagaaggctgcaaacatgcttcagcaatctggttctaagaatacaggagctaagaaaagaaaaatcgatgatgcctgatatgaatgttactaaattttctaattaaagatggtttatgcatgtatatgccattatttttgtagttagacaatagtttttaaaagaatttcatagatattttatatgtatggatctatattttcagagcttatctctgaagatctaaacttttgagaatgtttgaaaattagagatcatgaattatataattttccagtataaaacaagggaaaaatttttatgtaaaaccctttaaatgtaaaatatttgagaataagttcatacaatcgtcttaagttttttatgcctttatatacttagctatattttttcttttgacataactatctttttgaaagcaatattatactgacagaggctcactgagtgatactttaagttaaatatgtagatcaaggatgtccaatcttttggcttccctgagccacattggaagaagaattgtcttgggccgcacataaaatatgctaacactgatgatagctgatgagcttaaaaaaaaaattgcaagaaaaatctcatgttttaagaaagtttacaaaaaatgtaaaatatttgagaataagttcatgtaattgtcttaagttttttatgcctttatatacttagctatattttttcttttgacataaccatctttttgaaagcaatattatactgacagaggttcactgagtgatactttaagttaaatatgtagatcagggatgtccaatcttttggcttccctgagccacattggaagaagaattgtcttgggccgcacataaaatatgctaacactgacgatagctgatgagcttaaaaaaaaaaaaattgcaagaaaaatctcatgttttaagaaagtttacagatttgtgttgggctgcattcaaagctgttctgggctgcattagacccgtgggctagagttggacaagcttgtagatgatttcaggttataaaaccagaagtacaattcaacaaaaaaggagtaagtcatcaatataaatattagcaaacgagatattgctacatctctatttaaagtaaaatacaaccgattttaaagttcctgaaaccatagccatattttgacatttcacaaagaatggttctagtctactagagtacatttggctaagtagataacttacctaaatttgctccaaagctaaatcacaagtaaacatatttatgtttaaaacacagaaataaataacttaagatttttatctaagcggtcagtgttgtattggaaagatatatctataaataaactttgaactgatttcaaactta

SEQ ID NO: 367856 - DNA, 1909 bp, Homo sapiens
gggaaccctggtggacgatttccaaaaaaaaggggcataaaaaaatctatattattataacatgaaggcagaggagagtagactggatttgcaatgactctgaagtctacactaagtctactctgggtactctcctatcctgcgccaatggcagatctgtctatttgatcatagcactctctcctggtgatcctaggcatagccccactatcctcagagtagggcttcctgtccttgttgttgcttgagggtaatacttttttgcttccctagttctggggtgctttagagccacaagtaaagtaggatcctgtaagggaattactagggcaaatgaagcttacatcctcctatcctctgccccactccagattggacctggactttttcagcgatagggtatcactatgttgctctggctggcctccaactcctgggctcaaggggccctgatttttttttttttttgtaggctgaatcgtctcaaacttgtcattctgaacaaggtgataaaaagatggaggaaaaaaattcaggcaacttccagaagaaggctgcaaacatgcttcagcaatctggttctaagaatacaggagctaagaaaagaaaaatcgatgatgcctgatatgaatgttactaaattttctaattaaagatggtttatgcatgtatatgccattatttttgtagttagacaatagtttttaaaagaatttcatagatattttatatgtatggatctatattttcagagcttatctctgaagatctaaacttttgagaatgtttgaaaattagagatcatgaattatataattttccagtataaaacaagggaaaaatttttatgtaaaaccctttaaatgtaaaatatttgagaataagttcatacaatcgtcttaagttttttatgcctttatatacttagctatattttttcttttgacataactatctttttgaaagcaatattatactgacagaggctcactgagtgatactttaagttaaatatgtagatcaaggatgtccaatcttttggcttccctgagccacattggaagaagaattgtcttgggccgcacataaaatatgctaacactgatgatagctgatgagcttaaaaaaaaaattgcaagaaaaatctcatgttttaagaaagtttacaaaaaatgtaaaatatttgagaataagttcatgtaattgtcttaagttttttatgcctttatatacttagctatattttttcttttgacataaccatctttttgaaagcaatattatactgacagaggttcactgagtgatactttaagttaaatatgtagatcagggatgtccaatcttttggcttccctgagccacattggaagaagaattgtcttgggccgcacataaaatatgctaacactgacgatagctgatgagcttaaaaaaaaaaaaattgcaagaaaaatctcatgttttaagaaagtttacagatttgtgttgggctgcattcaaagctgttctgggctgcattagacccgtgggctagagttggacaagcttgtagatgatttcaggttataaaaccagaagtacaattcaacaaaaaaggagtaagtcatcaatataaatattagcaaacgagatattgctacatctctatttaaagtaaaatacaaccgattttaaagttcctgaaaccatagccatattttgacatttcacaaagaatggttctagtctactagagtacatttggctaagtagataacttacctaaatttgctccaaagctaaatcacaagtaaacatatttatgtttaaaacacagaaataaataacttaagatttttatctaagcggtcagtgttgtattggaaagatatatctataaataaactttgaactgatttcaaactta

SEQ ID NO: 367857 - DNA, 2465 bp, Homo sapiens
  misc_feature (2460)..(2460): n is a, c, g, or t
tataagattattagtataaaattttagataggtaggagtagcggaaagatctgctcgaggcctgggtgctttggtgtcggagatccgagagtcggagatcggagagtcggacacaggacagtcggacaccggacagtcaaacaccggagagttagactgggcttctcgggcgaggccggtctgtagcggatcacttcctttcgcccacacattggcggaggagaaaccggaaagttaatcactgccctgctctgagaactcgggcctttaggggcacgttcgcctgctgaccggtcttctgatctccccattcttttccatgcaggaggattggccaccaaagcctgtttattagcagctgccatttgttgaaagaaatttggattattttagaaacaaatttggaaagaaaaagaatggcgtccgtttcagctctaactgaggaactggattctataaccagtgagctacatgcagtagaaattcaaattcaagaacttacggaaaggcaacaagagcttattcagaaaaaaaaagtcctgacaaagaaaataaagcagtgtttagaggattctgatgccggggcaagcaatgaatatgattcttcacctgccgcttggaataaagaagattttccatggtctggtaaagttaaagatattctgcaaaatgtctttaaactggaaaagttcagaccacttcagcttgaaactattaacgtaacaatggctggaaaggaggtatttcttgttatgcctacaggaggtggaaagagcttatgttaccagttaccagcattatgttcagatggttttacactcgtcatttgcccattgatctctcttatggaagaccaattaatggttttaaaacaattaggaatttcagcaaccatgttaaatgcttctagttctaaggagcatgttaaatgggttcatgctgaaatggtaaataaaaactccgagttaaagctgatttatgtgactccagagaaaattgcaaaaagcaaaatgtttatgtcaagactagagaaagcctatgaagcaaggagatttactcgaattgctgtggatgaagttcactgctgtagtcagtggggacatgatttcagacctgattataaggcacttggtatcttaaagcggcagttccctaacgcatcactaattgggctgactgcaactgcaacaaatcacgttttgacggatgctcagaaaattttgtgcattgaaaagtgttttacttttacagcttcttttaataggccaaatctatattatgaggttcggcagaagccctcaaacactgaagattttattgaggatattgtaaagctcattaatgggagatacaaagggcaatcaggaatcatatattgtttttctcagaaagactctgaacaagttacggttagtttgcagaatctgggaattcatgcaggtgcttaccatgccaatttggagccagaagataagaccacagttcatagaaaatggtcagccaatgaaattcaggtagtagtggcaactgttgcatttggtatgggaattgataagccagatgtgaggtttgttatccatcattcaatgagtaaatccatggaaaattattaccaagagagtggacgtgcaggtcgagatgacatgaaagcagactgtattttgtactacggctttggagatatattcagaataagttcaatggtggtgatggaaaatgtgggacagcagaagctttatgagatggtatcatactgtcaaaacataagcaaatgtcgtcgtgtgttgatggctcaacattttgatgaagtatggaactcagaagcatgtaacaaaatgtgcgataactgctgtaaagacagtgcatttgaaagaaagaacataacagagtactgcagagatctaatcaagatcctgaagcaggcagaggaactgaatgaaaaactcactccattgaaactgattgattcttggatgggaaagggtgcagcaaaactgagagtagcaggtgttgtggctcccacacttcctcgtgaagatctggagaagattattgcacactttctaatacagcagtatcttaaagaagactacagttttacagcttatgctaccatttcgtatttgaaaataggacctaaagctaatcttctgaacaatgaggcacatgctattactatgcaagtgacaaagtccacgcagaactctttcagggctgaatcgtctcaaacttgtcattctgaacaaggtgataaaaagatggaggaaaaaaattcaggcaacttccagaagaaggctgcaaacatgcttcagcaatctggttctaagaatacaggagctaagaaaagaaaaatcgatgatgcctgatatgaatgttactaaattttctaattaaagatggtatctgattccatatttgagtagcatagtttaaagatctgttttttgatgacaattcgantactt

SEQ ID NO: 367858 - DNA, 530 bp, Homo sapiens
cttccggtttccccactacaaacaaaaaaaaaaaaaaaaaaaaaaaaaaaaaaaaaaaaaaaaaattgcaagaaaaatctcatgttttaagaaagtttacagatttgtgttgggctgcattcaaagctgttctgggctgcattagacccgtgggctagagttggacaagcttgtagatgatttcaggttataaaaccagaagtacaattcaacaaaaaaggagtaagtcatcaatataaatattagcaaacgagatattgctacatctctatttaaagtaaaatacaaccgattttaaagttcctgaaaccatagccatattttgacatttcacaaagaatggttctagtctactagagtacatttggctaagtagataacttacctaaatttgctccaaagctaaatcacaagtaaacatatttatgtttaaaacacagaaataaataacttaagatttttatctaagcggtcagtgttgtattggaaagatatatctataaataaactttgaactgatttcaaactta

SEQ ID NO: 367859 - DNA, 676 bp, Homo sapiens
tataagattattagtataaaattttagataggtaggagtagcggaaagatctgctcgaggcctgggtgctttggtgtcggagatccgagagtcggagatcggagagtcggacacaggacagtcggacaccggacagtcaaacaccggagagttagactgggcttctcggtggggagaggctctgggataactactgttacagctttgaagggtcaagggtgtgcgctttttgtttcatccttccctttcctgctgcagggcgaggccggtctgtagcggatcacttcctttcgcccacacattggcggaggagaaaccggaaagttaatcactgccctgctctgagaactcgggcctttaggggcacgttcgcctgctgaccggtcttctgatctccccattcttttccatgcaggaggattggccaccaaagcctgtttattagcagctgccatttgttgaaagaaatttggattattttagaaacaaatttggaaagaaaaagaatggcgtccgtttcaggttagtagcaatgattacattttcttcttccttctgttctatttctgtttgtatgatatttgaaaaagtttgttttaaaaattctgattatagaaatgatttttttcagcttttttattgaagtaaaatacacattacaaactttgccatgcta

SEQ ID NO: 367860 - DNA, 387 bp, Homo sapiens
ggtccagttgaacatgagaaaagtcagttttctgattagatttctgggtatggaagagagaaaatatagttttctgtaaagatgtaagtgaaagaatttagactggccttttaacataaactaggggtttccagtttcttggaatgggaggactccgtttgaatatctaattttgttatgcactctgctcttatttggttgtgattactaatagttgagaagtctgtttctgctgttccagtggttagaaaccactgttttaaaccaaatactatcaagtctgcaaaagcatgtcaagtcaagtgccattgtgtctaaggacatttgaggtctttagaacttctctcacaacgtagccccttttattcaaaatagagctcatatttg

SEQ ID NO: 367861 - DNA, 3740 bp, Homo sapiens
tataagattattagtataaaattttagataggtaggagtagcggaaagatctgctcgaggcctgggtgctttggtgtcggagatccgagagtcggagatcggagagtcggacacaggacagtcggacaccggacagtcaaacaccggagagttagactgggcttctcggtggggagaggctctgggataactactgttacagctttgaagggtcaagggtgtgcgctttttgtttcatccttccctttcctgctgcagggcgaggccggtctgtagcggatcacttcctttcgcccacacattggcggaggagaaaccggaaagttaatcactgccctgctctgagaactcgggcctttaggggcacgttcgcctgctgaccggtcttctgatctccccattcttttccatgcaggaggattggccaccaaagcctgtttattagcagctgccatttgttgaaagaaatttggattattttagaaacaaatttggaaagaaaaagaatggcgtccgtttcagctctaactgaggaactggattctataaccagtgagctacatgcagtagaaattcaaattcaagaacttacggaaaggcaacaagagcttattcagaaaaaaaaagtcctgacaaagaaaataaagcagtgtttagaggattctgatgccggggcaagcaatgaatatgattcttcacctgccgcttggaataaagaagattttccatggtctggtaaagttaaagatattctgcaaaatgtctttaaactggaaaagttcagaccacttcagcttgaaactattaacgtaacaatggctggaaaggaggtatttcttgttatgcctacaggaggtggaaagagcttatgttaccagttaccagcattatgttcagatggttttacactcgtcatttgcccattgatctctcttatggaagaccaattaatggttttaaaacaattaggaatttcagcaaccatgttaaatgcttctagttctaaggagcatgttaaatgggttcatgctgaaatggtaaataaaaactccgagttaaagctgatttatgtgactccagagaaaattgcaaaaagcaaaatgtttatgtcaagactagagaaagcctatgaagcaaggagatttactcgaattgctgtggatgaagttcactgctgtagtcagtggggacatgatttcagacctgattataaggcacttggtatcttaaagcggcagttccctaacgcatcactaattgggctgactgcaactgcaacaaatcacgttttgacggatgctcagaaaattttgtgcattgaaaagtgttttacttttacagcttcttttaataggccaaatctatattatgaggttcggcagaagccctcaaacactgaagattttattgaggatattgtaaagctcattaatgggagatacaaagggcaatcaggaatcatatattgtttttctcagaaagactctgaacaagttacggttagtttgcagaatctgggaattcatgcaggtgcttaccatgccaatttggagccagaagataagaccacagttcatagaaaatggtcagccaatgaaattcaggtagtagtggcaactgttgcatttggtatgggaattgataagccagatgtgaggtttgttatccatcattcaatgagtaaatccatggaaaattattaccaagagagtggacgtgcaggtcgagatgacatgaaagcagactgtattttgtactacggctttggagatatattcagaataagttcaatggtggtgatggaaaatgtgggacagcagaagctttatgagatggtatcatactgtcaaaacataagcaaatgtcgtcgtgtgttgatggctcaacattttgatgaagtatggaactcagaagcatgtaacaaaatgtgcgataactgctgtaaagacagtgcatttgaaagaaagaacataacagagtactgcagagatctaatcaagatcctgaagcaggcagaggaactgaatgaaaaactcactccattgaaactgattgattcttggatgggaaagggtgcagcaaaactgagagtagcaggtgttgtggctcccacacttcctcgtgaagatctggagaagattattgcacactttctaatacagcagtatcttaaagaagactacagttttacagcttatgctaccatttcgtatttgaaaataggacctaaagctaatcttctgaacaatgaggcacatgctattactatgcaagtgacaaagtccacgcagaactctttcagggctgaatcgtctcaaacttgtcattctgaacaaggtgataaaaagatggaggaaaaaaattcaggcaacttccagaagaaggctgcaaacatgcttcagcaatctggttctaagaatacaggagctaagaaaagaaaaatcgatgatgcctgatatgaatgttactaaattttctaattaaagatggtttatgcatgtatatgccattatttttgtagttagacaatagtttttaaaagaatttcatagatattttatatgtatggatctatattttcagagcttatctctgaagatctaaacttttgagaatgtttgaaaattagagatcatgaattatataattttccagtataaaacaagggaaaaatttttatgtaaaaccctttaaatgtaaaatatttgagaataagttcatacaatcgtcttaagttttttatgcctttatatacttagctatattttttcttttgacataactatctttttgaaagcaatattatactgacagaggctcactgagtgatactttaagttaaatatgtagatcaaggatgtccaatcttttggcttccctgagccacattggaagaagaattgtcttgggccgcacataaaatatgctaacactgatgatagctgatgagcttaaaaaaaaaattgcaagaaaaatctcatgttttaagaaagtttacaaaaaatgtaaaatatttgagaataagttcatgtaattgtcttaagttttttatgcctttatatacttagctatattttttcttttgacataaccatctttttgaaagcaatattatactgacagaggttcactgagtgatactttaagttaaatatgtagatcagggatgtccaatcttttggcttccctgagccacattggaagaagaattgtcttgggccgcacataaaatatgctaacactgacgatagctgatgagcttaaaaaaaaaaaaattgcaagaaaaatctcatgttttaagaaagtttacagatttgtgttgggctgcattcaaagctgttctgggctgcattagacccgtgggctagagttggacaagcttgtagatgatttcaggttataaaaccagaagtacaattcaacaaaaaaggagtaagtcatcaatataaatattagcaaacgagatattgctacatctctatttaaagtaaaatacaaccgattttaaagttcctgaaaccatagccatattttgacatttcacaaagaatggttctagtctactagagtacatttggctaagtagataacttacctaaatttgctccaaagctaaatcacaagtaaacatatttatgtttaaaacacagaaataaataacttaagatttttatctaagcggtcagtgttgtattggaaagatatatctataaataaactttgaactgatttcaaactta

SEQ ID NO: 367862 - DNA, 3938 bp, Homo sapiens
tataagattattagtataaaattttagataggtaggagtagcggaaagatctgctcgaggcctgggtgctttggtgtcggagatccgagagtcggagatcggagagtcggacacaggacagtcggacaccggacagtcaaacaccggagagttagactgggcttctcggtggggagaggctctgggataactactgttacagctttgaagggtcaagggtgtgcgctttttgtttcatccttccctttcctgctgcagggcgaggccggtctgtagcggatcacttcctttcgcccacacattggcggaggagaaaccggaaagttaatcactgccctgctctgagaactcgggcctttaggggcacgttcgcctgctgaccggtcttctgatctccccattcttttccatgcaggaggattggccaccaaagcctgtttattagcagctgccatttgttgaaagaaatttggattattttagaaacaaatttggaaagaaaaagaatggcgtccgtttcagctctaactgaggaactggattctataaccagtgagctacatgcagtagaaattcaaattcaagaacttacggaaaggcaacaagagcttattcagaaaaaaaaagtcctgacaaagaaaataaagcagtgtttagaggattctgatgccggggcaagcaatgaatatgattcttcacctgccgcttggaataaagaagattttccatggtctggtaaagttaaagatattctgcaaaatgtctttaaactggaaaagttcagaccacttcagcttgaaactattaacgtaacaatggctggaaaggaggtatttcttgttatgcctacaggaggtggaaagagcttatgttaccagttaccagcattatgttcagatggttttacactcgtcatttgcccattgatctctcttatggaagaccaattaatggttttaaaacaattaggaatttcagcaaccatgttaaatgcttctagttctaaggagcatgttaaatgggttcatgctgaaatggtaaataaaaactccgagttaaagctgatttatgtgactccagagaaaattgcaaaaagcaaaatgtttatgtcaagactagagaaagcctatgaagcaaggagatttactcgaattgctgtggatgaagttcactgctgtagtcagtggggacatgatttcagacctgattataaggcacttggtatcttaaagcggcagttccctaacgcatcactaattgggctgactgcaactgcaacaaatcacgttttgacggatgctcagaaaattttgtgcattgaaaagtgttttacttttacagcttcttttaataggccaaatctatattatgaggttcggcagaagccctcaaacactgaagattttattgaggatattgtaaagctcattaatgggagatacaaagggcaatcaggaatcatatattgtttttctcagaaagactctgaacaagttacggttagtttgcagaatctgggaattcatgcaggtgcttaccatgccaatttggagccagaagataagaccacagttcatagaaaatggtcagccaatgaaattcaggtagtagtggcaactgttgcatttggtatgggaattgataagccagatgtgaggtttgttatccatcattcaatgagtaaatccatggaaaattattaccaagagagtggacgtgcaggtcgagatgacatgaaagcagactgtattttgtactacggctttggagatatattcagaataagttcaatggtggtgatggaaaatgtgggacagcagaagctttatgagatggtatcatactgtcaaaacataagcaaatgtcgtcgtgtgttgatggctcaacattttgatgaagtatggaactcagaagcatgtaacaaaatgtgcgataactgctgtaaagacagtgcatttgaaagaaagaacataacagagtactgcagagatctaatcaagatcctgaagcaggcagaggaactgaatgaaaaactcactccattgaaactgattgattcttggatgggaaagggtgcagcaaaactgagagtagcaggtgttgtggctcccacacttcctcgtgaagatctggagaagattattgcacactttctaatacagcagtatcttaaagaagactacagttttacagcttatgctaccatttcgtatttgaaaataggacctaaagctaatcttctgaacaatgaggcacatgctattactatgcaagtgacaaagtccacgcagaactctttcagggctgaatcgtctcaaacttgtcattctgaacaaggtgataaaaagatggaggaaaaaaattcaggcaacttccagaagaaggctgcaaacatgcttcagcaatctggttctaagaatacaggagctaagaaaagaaaaatcgatgatgcctgatatgaatgttactaaattttctaattaaagatggtttatgcatgtatatgccattatttttgtagttagacaatagtttttaaaagaatttcatagatattttatatgtatggatctatattttcagagcttatctctgaagatctaaacttttgagaatgtttgaaaattagagatcatgaattatataattttccagtataaaacaagggaaaaatttttatgtaaaaccctttaaatgtaaaatatttgagaataagttcatacaatcgtcttaagttttttatgcctttatatacttagctatattttttcttttgacataactatctttttgaaagcaatattatactgacagaggctcactgagtgatactttaagttaaatatgtagatcaaggatgtccaatcttttggcttccctgagccacattggaagaagaattgtcttgggccgcacataaaatatgctaacactgatgatagctgatgagcttaaaaaaaaaattgcaagaaaaatctcatgttttaagaaagtttacaaaaaatgtaaaatatttgagaataagttcatgtaattgtcttaagttttttatgcctttatatacttagctatattttttcttttgacataaccatctttttgaaagcaatattatactgacagaggttcactgagtgatactttaagttaaatatgtagatcagggatgtccaatcttttggcttccctgagccacattggaagaagaattgtcttgggccgcacataaaatatgctaacactgacgatagctgatgagcttaaaaaaaaaaaaattgcaagaaaaatctcatgttttaagaaagtttacagatttgtgttgggctgcattcaaagctgttctgggctgcattagacccgtgggctagagttggacaagcttgtagatgatttcaggttataaaaccagaagtacaattcaacaaaaaaggagtaagtcatcaatataaatattagcaaacgagatattgctacatctctatttaaagtaaaatacaaccgattttaaagttcctgaaaccatagccatattttgacatttcacaaagaatggttctagtctactagagtacatttggctaagtagataacttacctaaatttgctccaaagctaaatcacaagtaaacatatttatgtttaaaacacagaaataaataacttaagatttttatctaagcggtcagtgttgtgtaaactgattaatcagtttacacaaatccacatactgtacattcataggtgaggttaagcctgtcacccatttctttatttctataattacacaagcataataaatcacatctgattttaaaggtcacttaaaatgagtcataatttacagtacagtacgtttcagttcaagtgcaaaaaatacctatttgctgaattctatttctttcagttatttcattttgacgctgtgttgcatagtgaag

SEQ ID NO: 367863 - DNA, 3650 bp, Homo sapiens
tataagattattagtataaaattttagataggtaggagtagcggaaagatctgctcgaggcctgggtgctttggtgtcggagatccgagagtcggagatcggagagtcggacacaggacagtcggacaccggacagtcaaacaccggagagttagactgggcttctcgggcgaggccggtctgtagcggatcacttcctttcgcccacacattggcggaggagaaaccggaaagttaatcactgccctgctctgagaactcgggcctttaggggcacgttcgcctgctgaccggtcttctgatctccccattcttttccatgcaggaggattggccaccaaagcctgtttattagcagctgccatttgttgaaagaaatttggattattttagaaacaaatttggaaagaaaaagaatggcgtccgtttcagctctaactgaggaactggattctataaccagtgagctacatgcagtagaaattcaaattcaagaacttacggaaaggcaacaagagcttattcagaaaaaaaaagtcctgacaaagaaaataaagcagtgtttagaggattctgatgccggggcaagcaatgaatatgattcttcacctgccgcttggaataaagaagattttccatggtctggtaaagttaaagatattctgcaaaatgtctttaaactggaaaagttcagaccacttcagcttgaaactattaacgtaacaatggctggaaaggaggtatttcttgttatgcctacaggaggtggaaagagcttatgttaccagttaccagcattatgttcagatggttttacactcgtcatttgcccattgatctctcttatggaagaccaattaatggttttaaaacaattaggaatttcagcaaccatgttaaatgcttctagttctaaggagcatgttaaatgggttcatgctgaaatggtaaataaaaactccgagttaaagctgatttatgtgactccagagaaaattgcaaaaagcaaaatgtttatgtcaagactagagaaagcctatgaagcaaggagatttactcgaattgctgtggatgaagttcactgctgtagtcagtggggacatgatttcagacctgattataaggcacttggtatcttaaagcggcagttccctaacgcatcactaattgggctgactgcaactgcaacaaatcacgttttgacggatgctcagaaaattttgtgcattgaaaagtgttttacttttacagcttcttttaataggccaaatctatattatgaggttcggcagaagccctcaaacactgaagattttattgaggatattgtaaagctcattaatgggagatacaaagggcaatcaggaatcatatattgtttttctcagaaagactctgaacaagttacggttagtttgcagaatctgggaattcatgcaggtgcttaccatgccaatttggagccagaagataagaccacagttcatagaaaatggtcagccaatgaaattcaggtagtagtggcaactgttgcatttggtatgggaattgataagccagatgtgaggtttgttatccatcattcaatgagtaaatccatggaaaattattaccaagagagtggacgtgcaggtcgagatgacatgaaagcagactgtattttgtactacggctttggagatatattcagaataagttcaatggtggtgatggaaaatgtgggacagcagaagctttatgagatggtatcatactgtcaaaacataagcaaatgtcgtcgtgtgttgatggctcaacattttgatgaagtatggaactcagaagcatgtaacaaaatgtgcgataactgctgtaaagacagtgcatttgaaagaaagaacataacagagtactgcagagatctaatcaagatcctgaagcaggcagaggaactgaatgaaaaactcactccattgaaactgattgattcttggatgggaaagggtgcagcaaaactgagagtagcaggtgttgtggctcccacacttcctcgtgaagatctggagaagattattgcacactttctaatacagcagtatcttaaagaagactacagttttacagcttatgctaccatttcgtatttgaaaataggacctaaagctaatcttctgaacaatgaggcacatgctattactatgcaagtgacaaagtccacgcagaactctttcagggctgaatcgtctcaaacttgtcattctgaacaaggtgataaaaagatggaggaaaaaaattcaggcaacttccagaagaaggctgcaaacatgcttcagcaatctggttctaagaatacaggagctaagaaaagaaaaatcgatgatgcctgatatgaatgttactaaattttctaattaaagatggtttatgcatgtatatgccattatttttgtagttagacaatagtttttaaaagaatttcatagatattttatatgtatggatctatattttcagagcttatctctgaagatctaaacttttgagaatgtttgaaaattagagatcatgaattatataattttccagtataaaacaagggaaaaatttttatgtaaaaccctttaaatgtaaaatatttgagaataagttcatacaatcgtcttaagttttttatgcctttatatacttagctatattttttcttttgacataactatctttttgaaagcaatattatactgacagaggctcactgagtgatactttaagttaaatatgtagatcaaggatgtccaatcttttggcttccctgagccacattggaagaagaattgtcttgggccgcacataaaatatgctaacactgatgatagctgatgagcttaaaaaaaaaattgcaagaaaaatctcatgttttaagaaagtttacaaaaaatgtaaaatatttgagaataagttcatgtaattgtcttaagttttttatgcctttatatacttagctatattttttcttttgacataaccatctttttgaaagcaatattatactgacagaggttcactgagtgatactttaagttaaatatgtagatcagggatgtccaatcttttggcttccctgagccacattggaagaagaattgtcttgggccgcacataaaatatgctaacactgacgatagctgatgagcttaaaaaaaaaaaaattgcaagaaaaatctcatgttttaagaaagtttacagatttgtgttgggctgcattcaaagctgttctgggctgcattagacccgtgggctagagttggacaagcttgtagatgatttcaggttataaaaccagaagtacaattcaacaaaaaaggagtaagtcatcaatataaatattagcaaacgagatattgctacatctctatttaaagtaaaatacaaccgattttaaagttcctgaaaccatagccatattttgacatttcacaaagaatggttctagtctactagagtacatttggctaagtagataacttacctaaatttgctccaaagctaaatcacaagtaaacatatttatgtttaaaacacagaaataaataacttaagatttttatctaagcggtcagtgttgtattggaaagatatatctataaataaactttgaactgatttcaaactta

SEQ ID NO: 367864 - DNA, 2585 bp, Homo sapiens
tataagattattagtataaaattttagataggtaggagtagcggaaagatctgctcgaggcctgggtgctttggtgtcggagatccgagagtcggagatcggagagtcggacacaggacagtcggacaccggacagtcaaacaccggagagttagactgggcttctcgggcgaggccggtctgtagcggatcacttcctttcgcccacacattggcggaggagaaaccggaaagttaatcactgccctgctctgagaactcgggcctttaggggcacgttcgcctgctgaccggtcttctgatctccccattcttttccatgcaggaggattggccaccaaagcctgtttattagcagctgccatttgttgaaagaaatttggattattttagaaacaaatttggaaagaaaaagaatggcgtccgtttcagctctaactgaggaactggattctataaccagtgagctacatgcagtagaaattcaaattcaagaacttacggaaaggcaacaagagcttattcagaaaaaaaaagtcctgacaaagaaaataaagcagtgtttagaggattctgatgccggggcaagcaatgaatatgattcttcacctgccgcttggaataaagaagattttccatggtctggtaaagttaaagatattctgcaaaatgtctttaaactggaaaagttcagaccacttcagcttgaaactattaacgtaacaatggctggaaaggaggtatttcttgttatgcctacaggaggtggaaagagcttatgttaccagttaccagcattatgttcagatggttttacactcgtcatttgcccattgatctctcttatggaagaccaattaatggttttaaaacaattaggaatttcagcaaccatgttaaatgcttctagttctaaggagcatgttaaatgggttcatgctgaaatggtaaataaaaactccgagttaaagctgatttatgtgactccagagaaaattgcaaaaagcaaaatgtttatgtcaagactagagaaagcctatgaagcaaggagatttactcgaattgctgtggatgaagttcactgctgtagtcagtggggacatgatttcagacctgattataaggcacttggtatcttaaagcggcagttccctaacgcatcactaattgggctgactgcaactgcaacaaatcacgttttgacggatgctcagaaaattttgtgcattgaaaagtgttttacttttacagcttcttttaataggccaaatctatattatgaggttcggcagaagccctcaaacactgaagattttattgaggatattgtaaagctcattaatgggagatacaaagggcaatcaggaatcatatattgtttttctcagaaagactctgaacaagttacggttagtttgcagaatctgggaattcatgcaggtgcttaccatgccaatttggagccagaagataagaccacagttcatagaaaatggtcagccaatgaaattcaggtagtagtggcaactgttgcatttggtatgggaattgataagccagatgtgaggtttgttatccatcattcaatgagtaaatccatggaaaattattaccaagagagtggacgtgcaggtcgagatgacatgaaagcagactgtattttgtactacggctttggagatatattcagaataagttcaatggtggtgatggaaaatgtgggacagcagaagctttatgagatggtatcatactgtcaaaacataagcaaatgtcgtcgtgtgttgatggctcaacattttgatgaagtatggaactcagaagcatgtaacaaaatgtgcgataactgctgtaaagacagtgcatttgaaagaaagaacataacagagtactgcagagatctaatcaagatcctgaagcaggcagaggaactgaatgaaaaactcactccattgaaactgattgattcttggatgggaaagggtgcagcaaaactgagagtagcaggtgttgtggctcccacacttcctcgtgaagatctggagaagattattgcacactttctaatacagcagtatcttaaagaagactacagttttacagcttatgctaccatttcgtatttgaaaataggacctaaagctaatcttctgaacaatgaggcacatgctattactatgcaagtgacaaagtccacgcagaactctttcagggtaaatggctattaattttcagttttatatattttaaaaagtatattaaagcctatgggatgcttttctgtcatattcccctaggtccagttgaacatgagaaaagtcagttttctgattagatttctgggtatggaagagagaaaatatagttttctgtaaagatgtaagtgaaagaatttagactggccttttaacataaactaggggtttccagtttcttggaatgggaggactccgtttgaatatctaattttgttatgcactctgctcttatttggttgtgattactaatagttgagaagtctgtttctgctgttccagtggttagaaaccactgttttaaaccaaatactatcaagtctgcaaaag

SEQ ID NO: 367865 - DNA, 475 bp, Homo sapiens
cataggcgatactggtgcacatgaacaatatttgttgatggaaaatgtgttagacgagtctggattcagtttggtatggaccatgacttaatgaaatagttgtatcatgatctttgtagctaacctgatggtttttggcctaccgcagcccaatgcttgatttctgactgaaaactgaacaagccttgtggtattcacccatctgaagatattcttgtattgcaagcatattaaggcatggaatgattacacataatatacctctacgatctagagagacagactgacatagatacatacacatgtaatataattatatttttctttacgatttctactgcctaacctctaaaaatgttttatatattactctaacctgttgtcctccacattctattgtcctaattgtactgttttctgatttgtatttatgtcttgagacagtaactttttgaataaaaataaacctacagta

SEQ ID NO: 367866 - DNA, 5794 bp, Homo sapiens
ctgcttctcccccgccccatcatctccagcgcgtggtgggggaactgctggggaaggcgattggcatcgatctctccatcccttccgaggcccgacttcggaattgtcttagaagaaagaaggcaagccaccattttacccacgtaaatatatgaatatatttctgacattgaggtgttccagaagatgataaagaaatgatagcagctccagaaataccaactgattttaatctactacaggagtcagaaacacatttttcttctgacacagattttgaagatatcgaaggaaaaaaccaaaagcaaggcaaaggcaaaacttgtaaaaaaggcaaaaagggcccagcagaaaagggcaaaggtggaaatggaggaggaaaacctccttctggtccaaaccgaatgaatggtcatcaccaacagaatggagtggaaaacatgatgttgtttgaagttgttaaaatgggcaagagtgctatgcagtcggtggtagatgattggatagaatcatacaagcatgaccgagatatagcacttcttgaccttatcaacttttttattcagtgttcaggctgtaaaggagttgtcacagcagaaatgtttagacatatgcagaactctgagataattcgaaaaatgactgaagaattcgatgaggatagtggagattatccacttaccatggctggtcctcagtggaagaagttcaaatccagtttttgtgaattcattggcgtgttagtacggcaatgtcaatatagtatcatatatgatgagtatatgatggatacagtcatttcacttcttacaggattgtctgactcacaagtcagagcatttcgacatacaagcaccctggcagctatgaagttgatgacagctttggtgaatgtggcactaaatcttagcattaatatggataatacacaaagacaatatgaagcagaacggaataaaatgattggaaaacgagccaatgagaggctagaactcctgctacaaaagcggaaagagcttcaggaaaatcaagatgaaatagaaaatatgatgaatgcaatatttaaaggagtgtttgtacatagataccgtgatgcgatagctgaaattcgagctatttgcattgaagagattggcatttggatgaagatgtatagtgatgcctttcttaatgacagttatttaaaatatgttggttggactatgcatgataagcaaggtgaagtaagactcaaatgtcttactgctctacaagggctttattataacaaagagcttaattccaaactggaactttttaccagtcggttcaaggatagaattgtgtctatgacccttgacaaagaatatgatgttgcagtacaagcaataaaattactcactcttgttttacagagtagtgaagaagttctcactgcagaagattgtgaaaatgtctatcatctggtttattcagctcaccggccagtagcagtagcagctggagaatttctctacaaaaagctcttcagtcgtagagatccagaggaggatggaatgatgaaaagaagaggaagacaaggtccaaatgccaaccttgttaagacattggtttttttctttctagaaagtgagttacatgagcatgcagcataccttgtggatagcatgtgggactgtgctactgagctgctgaaagactgggaatgtatgaatagcttgttactggaagagccacttagtggagaggaagcactaacagataggcaagagagtgctctgattgaaataatgctttgtaccattagacaagcggctgaatgtcatcctcccgtgggaagagggacaggaaaaagggtgcttacagcaaaggagaagaagacacagttggatgataggacaaaaatcactgagctttttgccgtggcccttcctcagttattagcaaaatactctgtagatgcagaaaaggtgactaacttgttgcagttgcctcagtactttgatttggaaatatataccactggacgattagaaaagcatttggatgccttattgcgacagatccggaatattgtagagaagcacacagatacagatgttttggaagcatgttctaaaacttaccatgcactctgtaatgaagagttcacaatcttcaacagagtagatatttcaagaagtcaactgatagatgaattggcagataaatttaaccggcttcttgaagattttctgcaagagggtgaagaacctgatgaagatgatgcatatcaggtattgtcaacattgaagaggatcactgcttttcataatgcccatgacctttcaaagtgggatttatttgcttgtaattacaaactcttgaaaactggaatcgaaaatggagacatgcctgagcagattgttattcacgcactgcagtgtactcactatgtaatcctttggcaacttgctaagataactgaaagcagctctacaaaggaggacttgctgcgtttaaagaaacaaatgagagtattttgtcagatatgtcaacattacctgaccaacgtgaatactactgttaaggaacaggccttcactattctgtgtgatattttgatgatcttcagccatcagattatgtcaggagggcgtgacatgttagagccattagtgtatacccctgattcttcattgcagtctgagttgctcagctttattttggatcatgtcttcattgaacaggatgatgataataatagtgcagatggtcagcaagaggatgaagccagtaaaattgaagctctgcacaagagaagaaatttacttgcagcattttgtaagctaattgtatatactgtggtggagatgaatacagctgcagatatcttcaaacagtatatgaagtattataatgactatggagatatcatcaaagaaacaatgagtaaaacaaggcagatagacaaaattcagtgtgctaagacccttattctcagtctgcaacagctttttaatgaaatgatacaagaaaatggctataattttgatagatcatcctctacatttagtggcataaaagaacttgctcgacgttttgctttaacttttggacttgatcagttgaaaacaagagaagccattgccatgctacacaaagatggcatagaatttgcttttaaagagcctaatccgcaaggggagagccatccacctttaaatttggcatttcttgatattctgagtgaattttcttctaaactacttcgacaagacaaaagaacagtgtatgtttacttggaaaagttcatgacctttcagatgtcactccgaagagaggatgtgtggcttccactgatgtcttaccgaaattctttgctagctggtggtgatgatgacaccatgtcagtcattagtggaatcagcagccgggggtcaacagtacggagtaaaaaatcaaaaccatctacaggaaaacggaaagtggttgagggcatgcagctttcactcactgaagaaagtagtagtagtgacagtatgtggttaagcagagaacaaacactgcacacccctgttatgatgcagacaccacaactcacctccactattatgagagagcccaaaagattacggcctgaggatagcttcatgagtgtttatccaatgcagactgaacatcatcaaacacctcttgattataatcggcgtggcacaagcctaatggaagatgatgaagagccaattgtggaagatgttatgatgtcctcagaagggaggattgaggatcttaatgagggaatggattttgacaccatggatatagatttgccaccatcaaagaacagacgagagagaacagaactgaagcctgatttctttgatccagcttcaattatggatgaatcagttcttggagtgtcaatgttttaataccagtacacaattaaatctgtggtgaagtcattttctaagtggaagaggaaattttaaagtgtggtagatacagtgaaattctgtacagatttttctctaaggagaatatgacatgcttatgcttaccaagatcaagtgcattgaggggcagttttgtttgcctgaataaacgtaaaggacaagtaaacaatttgatgataagctacagtttttcttagaaagtaaatattttatttatgcgctgttagttggcttttgaatcgattatttcatgcttttttttaaaaaaaaaaaaaacaaaataacaatctgaagaggcatttggtacagatatgaattctcttacatttatttactggttgtactaaataatgatgacctctgctggatttctgtttacatccagaaaacaatgttaaggatgtatttattcccctaccctgaagaaagtgtaggatagaattgtttttagcattctaaatttaaatgcttaaaacgtcaatcaacaaaactttgttttaaatattgtaattgtggagaaaagtaaacttataagcagaacttttacaattttttcatctaaaagtattttaagatatttttaaaatccaagagcttctctatacttttcagaaatatccagatgcagtgaactgccagaaggtaaccagtctcaaacatgcttatcccattatcaaccctgaaagtttgcttgtcctttaagataaaaatgtaatgttgtgatattccttccagtaatgccactgtattttgtctccaaataaaagaagcttattgtagtatgtttgcagaaaaattctaaacaaaaattatacagcttattagagtgtgggaatagggatctaaattttaaataaaattatatatatatataaattggtgctgattttataattgcgcagtttgtttagttttttcttacttttaaattccaacttaaaattatgaggtttcagaaatatattgaaagtttaacaatgtttaaaaatagaaaagcatgagtgttcatgctttaaaatgatttttaaatttgtattttatattgttttatctatctgtctttgcaagcagtcttcaggttaaagatacttctaacaggttacagtacatttcctctgtatgtaaattagatgggataatagaattcataacccataatattctttgaaagctaagctttaaacttcattttatgtcctttcacaaataaattagtttaaaacagaaagtggctacttgccattttgacatcaactcattttgcgaggcttaggcagctagacatcgtttaaaacaaaatattaacttatattacatgtgtatctatctattgtcagtcgtctctcagttcttgaggtatattattttaatcattccatgccttaatatgcttgcaatacaagaatatcttcagatgggtgaataccaaaaggctttcagtttttagtcagaaatcaagcattgggctgtggtagccaaaaaccataggttagctaaaaagatcatgatacaattattttattaagtcatggttaataacaaatgaatccagacttgtctaacagattttccatcaacaaatattgttatgtgcaaaagtattgcctatgttgttttacacaccactgcattaactagaactgctgagaggactgtatatatgattttaaacctaagttgattttttttctcactcttgaaaggagtacttctttgtgaaagcagttcttacagctttgttttcaaccagctaaaaatgttttatatattactctaacctgttgtcctccacattctattgtcctaattgtactgttttctgatttgtatttatgtcttgagacagtaactttttgaataaaaataaacctacagta

SEQ ID NO: 367867 - DNA, 5879 bp, Homo sapiens
gtggcccaaaatggagaacgcggagcagcgcaagatggaggctccgcttctctgtgtagcagtagatttaggttccttttctccggcaggctcctaagcctaggagagcccgaactggaggtggccaccgagtactaaattcacttgggaataaaagaaaaacataagaaaattataagagaaaggaattgtcttagaagaaagaaggcaagccaccattttacccacgtaaatatatgaatatatttctgacattgaggtgttccagaagatgataaagaaatgatagcagctccagaaataccaactgattttaatctactacaggagtcagaaacacatttttcttctgacacagattttgaagatatcgaaggaaaaaaccaaaagcaaggcaaaggcaaaacttgtaaaaaaggcaaaaagggcccagcagaaaagggcaaaggtggaaatggaggaggaaaacctccttctggtccaaaccgaatgaatggtcatcaccaacagaatggagtggaaaacatgatgttgtttgaagttgttaaaatgggcaagagtgctatgcagtcggtggtagatgattggatagaatcatacaagcatgaccgagatatagcacttcttgaccttatcaacttttttattcagtgttcaggctgtaaaggagttgtcacagcagaaatgtttagacatatgcagaactctgagataattcgaaaaatgactgaagaattcgatgaggatagtggagattatccacttaccatggctggtcctcagtggaagaagttcaaatccagtttttgtgaattcattggcgtgttagtacggcaatgtcaatatagtatcatatatgatgagtatatgatggatacagtcatttcacttcttacaggattgtctgactcacaagtcagagcatttcgacatacaagcaccctggcagctatgaagttgatgacagctttggtgaatgtggcactaaatcttagcattaatatggataatacacaaagacaatatgaagcagaacggaataaaatgattggaaaacgagccaatgagaggctagaactcctgctacaaaagcggaaagagcttcaggaaaatcaagatgaaatagaaaatatgatgaatgcaatatttaaaggagtgtttgtacatagataccgtgatgcgatagctgaaattcgagctatttgcattgaagagattggcatttggatgaagatgtatagtgatgcctttcttaatgacagttatttaaaatatgttggttggactatgcatgataagcaaggtgaagtaagactcaaatgtcttactgctctacaagggctttattataacaaagagcttaattccaaactggaactttttaccagtcggttcaaggatagaattgtgtctatgacccttgacaaagaatatgatgttgcagtacaagcaataaaattactcactcttgttttacagagtagtgaagaagttctcactgcagaagattgtgaaaatgtctatcatctggtttattcagctcaccggccagtagcagtagcagctggagaatttctctacaaaaagctcttcagtcgtagagatccagaggaggatggaatgatgaaaagaagaggaagacaaggtccaaatgccaaccttgttaagacattggtttttttctttctagaaagtgagttacatgagcatgcagcataccttgtggatagcatgtgggactgtgctactgagctgctgaaagactgggaatgtatgaatagcttgttactggaagagccacttagtggagaggaagcactaacagataggcaagagagtgctctgattgaaataatgctttgtaccattagacaagcggctgaatgtcatcctcccgtgggaagagggacaggaaaaagggtgcttacagcaaaggagaagaagacacagttggatgataggacaaaaatcactgagctttttgccgtggcccttcctcagttattagcaaaatactctgtagatgcagaaaaggtgactaacttgttgcagttgcctcagtactttgatttggaaatatataccactggacgattagaaaagcatttggatgccttattgcgacagatccggaatattgtagagaagcacacagatacagatgttttggaagcatgttctaaaacttaccatgcactctgtaatgaagagttcacaatcttcaacagagtagatatttcaagaagtcaactgatagatgaattggcagataaatttaaccggcttcttgaagattttctgcaagagggtgaagaacctgatgaagatgatgcatatcaggtattgtcaacattgaagaggatcactgcttttcataatgcccatgacctttcaaagtgggatttatttgcttgtaattacaaactcttgaaaactggaatcgaaaatggagacatgcctgagcagattgttattcacgcactgcagtgtactcactatgtaatcctttggcaacttgctaagataactgaaagcagctctacaaaggaggacttgctgcgtttaaagaaacaaatgagagtattttgtcagatatgtcaacattacctgaccaacgtgaatactactgttaaggaacaggccttcactattctgtgtgatattttgatgatcttcagccatcagattatgtcaggagggcgtgacatgttagagccattagtgtatacccctgattcttcattgcagtctgagttgctcagctttattttggatcatgtcttcattgaacaggatgatgataataatagtgcagatggtcagcaagaggatgaagccagtaaaattgaagctctgcacaagagaagaaatttacttgcagcattttgtaagctaattgtatatactgtggtggagatgaatacagctgcagatatcttcaaacagtatatgaagtattataatgactatggagatatcatcaaagaaacaatgagtaaaacaaggcagatagacaaaattcagtgtgctaagacccttattctcagtctgcaacagctttttaatgaaatgatacaagaaaatggctataattttgatagatcatcctctacatttagtggcataaaagaacttgctcgacgttttgctttaacttttggacttgatcagttgaaaacaagagaagccattgccatgctacacaaagatggcatagaatttgcttttaaagagcctaatccgcaaggggagagccatccacctttaaatttggcatttcttgatattctgagtgaattttcttctaaactacttcgacaagacaaaagaacagtgtatgtttacttggaaaagttcatgacctttcagatgtcactccgaagagaggatgtgtggcttccactgatgtcttaccgaaattctttgctagctggtggtgatgatgacaccatgtcagtcattagtggaatcagcagccgggggtcaacagtacggagtaaaaaatcaaaaccatctacaggaaaacggaaagtggttgagggcatgcagctttcactcactgaagaaagtagtagtagtgacagtatgtggttaagcagagaacaaacactgcacacccctgttatgatgcagacaccacaactcacctccactattatgagagagcccaaaagattacggcctgaggatagcttcatgagtgtttatccaatgcagactgaacatcatcaaacacctcttgattataatcggcgtggcacaagcctaatggaagatgatgaagagccaattgtggaagatgttatgatgtcctcagaagggaggattgaggatcttaatgagggaatggattttgacaccatggatatagatttgccaccatcaaagaacagacgagagagaacagaactgaagcctgatttctttgatccagcttcaattatggatgaatcagttcttggagtgtcaatgttttaataccagtacacaattaaatctgtggtgaagtcattttctaagtggaagaggaaattttaaagtgtggtagatacagtgaaattctgtacagatttttctctaaggagaatatgacatgcttatgcttaccaagatcaagtgcattgaggggcagttttgtttgcctgaataaacgtaaaggacaagtaaacaatttgatgataagctacagtttttcttagaaagtaaatattttatttatgcgctgttagttggcttttgaatcgattatttcatgcttttttttaaaaaaaaaaaaaacaaaataacaatctgaagaggcatttggtacagatatgaattctcttacatttatttactggttgtactaaataatgatgacctctgctggatttctgtttacatccagaaaacaatgttaaggatgtatttattcccctaccctgaagaaagtgtaggatagaattgtttttagcattctaaatttaaatgcttaaaacgtcaatcaacaaaactttgttttaaatattgtaattgtggagaaaagtaaacttataagcagaacttttacaattttttcatctaaaagtattttaagatatttttaaaatccaagagcttctctatacttttcagaaatatccagatgcagtgaactgccagaaggtaaccagtctcaaacatgcttatcccattatcaaccctgaaagtttgcttgtcctttaagataaaaatgtaatgttgtgatattccttccagtaatgccactgtattttgtctccaaataaaagaagcttattgtagtatgtttgcagaaaaattctaaacaaaaattatacagcttattagagtgtgggaatagggatctaaattttaaataaaattatatatatatataaattggtgctgattttataattgcgcagtttgtttagttttttcttacttttaaattccaacttaaaattatgaggtttcagaaatatattgaaagtttaacaatgtttaaaaatagaaaagcatgagtgttcatgctttaaaatgatttttaaatttgtattttatattgttttatctatctgtctttgcaagcagtcttcaggttaaagatacttctaacaggttacagtacatttcctctgtatgtaaattagatgggataatagaattcataacccataatattctttgaaagctaagctttaaacttcattttatgtcctttcacaaataaattagtttaaaacagaaagtggctacttgccattttgacatcaactcattttgcgaggcttaggcagctagacatcgtttaaaacaaaatattaacttatattacatgtgtatctatctattgtcagtcgtctctcagttcttgaggtatattattttaatcattccatgccttaatatgcttgcaatacaagaatatcttcagatgggtgaataccaaaaggctttcagtttttagtcagaaatcaagcattgggctgtggtagccaaaaaccataggttagctaaaaagatcatgatacaattattttattaagtcatggttaataacaaatgaatccagacttgtctaacagattttccatcaacaaatattgttatgtgcaaaagtattgcctatgttgttttacacaccactgcattaactagaactgctgagaggactgtatatatgattttaaacctaagttgattttttttctcactcttgaaaggagtacttctttgtgaaagcagttcttacagctttgttttcaaccagctaaaaatgttttatatattactctaacctgttgtcctccacattctattgtcctaattgtactgttttctgatttgtatttatgtcttgagacagtaactttttgaataaaaataaacctacagta

SEQ ID NO: 367868 - DNA, 5575 bp, Homo sapiens
tgtcttcctcttcttttcatcattccatcctcctctggatctctacgactgaagagctttttgtagagaaattctccagctgctactgctactggagaattacttgtaaaaaaggcaaaaagggcccagcagaaaagggcaaaggtggaaatggaggaggaaaacctccttctggtccaaaccgaatgaatggtcatcaccaacagaatggagtggaaaacatgatgttgtttgaagttgttaaaatgggcaagagtgctatgcagtcggtggtagatgattggatagaatcatacaagcatgaccgagatatagcacttcttgaccttatcaacttttttattcagtgttcaggctgtaaaggagttgtcacagcagaaatgtttagacatatgcagaactctgagataattcgaaaaatgactgaagaattcgatgaggatagtggagattatccacttaccatggctggtcctcagtggaagaagttcaaatccagtttttgtgaattcattggcgtgttagtacggcaatgtcaatatagtatcatatatgatgagtatatgatggatacagtcatttcacttcttacaggattgtctgactcacaagtcagagcatttcgacatacaagcaccctggcagctatgaagttgatgacagctttggtgaatgtggcactaaatcttagcattaatatggataatacacaaagacaatatgaagcagaacggaataaaatgattggaaaacgagccaatgagaggctagaactcctgctacaaaagcggaaagagcttcaggaaaatcaagatgaaatagaaaatatgatgaatgcaatatttaaaggagtgtttgtacatagataccgtgatgcgatagctgaaattcgagctatttgcattgaagagattggcatttggatgaagatgtatagtgatgcctttcttaatgacagttatttaaaatatgttggttggactatgcatgataagcaaggtgaagtaagactcaaatgtcttactgctctacaagggctttattataacaaagagcttaattccaaactggaactttttaccagtcggttcaaggatagaattgtgtctatgacccttgacaaagaatatgatgttgcagtacaagcaataaaattactcactcttgttttacagagtagtgaagaagttctcactgcagaagattgtgaaaatgtctatcatctggtttattcagctcaccggccagtagcagtagcagctggagaatttctctacaaaaagctcttcagtcgtagagatccagaggaggatggaatgatgaaaagaagaggaagacaaggtccaaatgccaaccttgttaagacattggtttttttctttctagaaagtgagttacatgagcatgcagcataccttgtggatagcatgtgggactgtgctactgagctgctgaaagactgggaatgtatgaatagcttgttactggaagagccacttagtggagaggaagcactaacagataggcaagagagtgctctgattgaaataatgctttgtaccattagacaagcggctgaatgtcatcctcccgtgggaagagggacaggaaaaagggtgcttacagcaaaggagaagaagacacagttggatgataggacaaaaatcactgagctttttgccgtggcccttcctcagttattagcaaaatactctgtagatgcagaaaaggtgactaacttgttgcagttgcctcagtactttgatttggaaatatataccactggacgattagaaaagcatttggatgccttattgcgacagatccggaatattgtagagaagcacacagatacagatgttttggaagcatgttctaaaacttaccatgcactctgtaatgaagagttcacaatcttcaacagagtagatatttcaagaagtcaactgatagatgaattggcagataaatttaaccggcttcttgaagattttctgcaagagggtgaagaacctgatgaagatgatgcatatcaggtattgtcaacattgaagaggatcactgcttttcataatgcccatgacctttcaaagtgggatttatttgcttgtaattacaaactcttgaaaactggaatcgaaaatggagacatgcctgagcagattgttattcacgcactgcagtgtactcactatgtaatcctttggcaacttgctaagataactgaaagcagctctacaaaggaggacttgctgcgtttaaagaaacaaatgagagtattttgtcagatatgtcaacattacctgaccaacgtgaatactactgttaaggaacaggccttcactattctgtgtgatattttgatgatcttcagccatcagattatgtcaggagggcgtgacatgttagagccattagtgtatacccctgattcttcattgcagtctgagttgctcagctttattttggatcatgtcttcattgaacaggatgatgataataatagtgcagatggtcagcaagaggatgaagccagtaaaattgaagctctgcacaagagaagaaatttacttgcagcattttgtaagctaattgtatatactgtggtggagatgaatacagctgcagatatcttcaaacagtatatgaagtattataatgactatggagatatcatcaaagaaacaatgagtaaaacaaggcagatagacaaaattcagtgtgctaagacccttattctcagtctgcaacagctttttaatgaaatgatacaagaaaatggctataattttgatagatcatcctctacatttagtggcataaaagaacttgctcgacgttttgctttaacttttggacttgatcagttgaaaacaagagaagccattgccatgctacacaaagatggcatagaatttgcttttaaagagcctaatccgcaaggggagagccatccacctttaaatttggcatttcttgatattctgagtgaattttcttctaaactacttcgacaagacaaaagaacagtgtatgtttacttggaaaagttcatgacctttcagatgtcactccgaagagaggatgtgtggcttccactgatgtcttaccgaaattctttgctagctggtggtgatgatgacaccatgtcagtcattagtggaatcagcagccgggggtcaacagtacggagtaaaaaatcaaaaccatctacaggaaaacggaaagtggttgagggcatgcagctttcactcactgaagaaagtagtagtagtgacagtatgtggttaagcagagaacaaacactgcacacccctgttatgatgcagacaccacaactcacctccactattatgagagagcccaaaagattacggcctgaggatagcttcatgagtgtttatccaatgcagactgaacatcatcaaacacctcttgattataatcggcgtggcacaagcctaatggaagatgatgaagagccaattgtggaagatgttatgatgtcctcagaagggaggattgaggatcttaatgagggaatggattttgacaccatggatatagatttgccaccatcaaagaacagacgagagagaacagaactgaagcctgatttctttgatccagcttcaattatggatgaatcagttcttggagtgtcaatgttttaataccagtacacaattaaatctgtggtgaagtcattttctaagtggaagaggaaattttaaagtgtggtagatacagtgaaattctgtacagatttttctctaaggagaatatgacatgcttatgcttaccaagatcaagtgcattgaggggcagttttgtttgcctgaataaacgtaaaggacaagtaaacaatttgatgataagctacagtttttcttagaaagtaaatattttatttatgcgctgttagttggcttttgaatcgattatttcatgcttttttttaaaaaaaaaaaaaacaaaataacaatctgaagaggcatttggtacagatatgaattctcttacatttatttactggttgtactaaataatgatgacctctgctggatttctgtttacatccagaaaacaatgttaaggatgtatttattcccctaccctgaagaaagtgtaggatagaattgtttttagcattctaaatttaaatgcttaaaacgtcaatcaacaaaactttgttttaaatattgtaattgtggagaaaagtaaacttataagcagaacttttacaattttttcatctaaaagtattttaagatatttttaaaatccaagagcttctctatacttttcagaaatatccagatgcagtgaactgccagaaggtaaccagtctcaaacatgcttatcccattatcaaccctgaaagtttgcttgtcctttaagataaaaatgtaatgttgtgatattccttccagtaatgccactgtattttgtctccaaataaaagaagcttattgtagtatgtttgcagaaaaattctaaacaaaaattatacagcttattagagtgtgggaatagggatctaaattttaaataaaattatatatatatataaattggtgctgattttataattgcgcagtttgtttagttttttcttacttttaaattccaacttaaaattatgaggtttcagaaatatattgaaagtttaacaatgtttaaaaatagaaaagcatgagtgttcatgctttaaaatgatttttaaatttgtattttatattgttttatctatctgtctttgcaagcagtcttcaggttaaagatacttctaacaggttacagtacatttcctctgtatgtaaattagatgggataatagaattcataacccataatattctttgaaagctaagctttaaacttcattttatgtcctttcacaaataaattagtttaaaacagaaagtggctacttgccattttgacatcaactcattttgcgaggcttaggcagctagacatcgtttaaaacaaaatattaacttatattacatgtgtatctatctattgtcagtcgtctctcagttcttgaggtatattattttaatcattccatgccttaatatgcttgcaatacaagaatatcttcagatgggtgaataccaaaaggctttcagtttttagtcagaaatcaagcattgggctgtggtagccaaaaaccataggttagctaaaaagatcatgatacaattattttattaagtcatggttaataacaaatgaatccagacttgtctaacagattttccatcaacaaatattgttatgtgcaaaagtattgcctatgttgttttacacaccactgcattaactagaactgctgagaggactgtatatatgattttaaacctaagttgattttttttctcactcttgaaaggagtacttctttgtgaaagcagttcttacagctttgttttcaaccagctaaaaatgttttatatattactctaacctgttgtcctccacattctattgtcctaattgtactgttttctgatttgtatttatgtcttgagacagtaactttttgaataaaaataaacctacagta

SEQ ID NO: 367869 - DNA, 5910 bp, Homo sapiens
aaccccgccggatccgaccgccactttcaaaaccccccaccgctctagaaccgcgggagcttccgtccctgagtagaattcgagggtgtaaagaagaggaaggggaaaaatatcttgtaccagcccaggggtgaagaagcccccggcctgagaaagaaggaggagtgggggaggcgaacagtctcgttgctgcctctgtgtacgctgaggggggaggaattgtcttagaagaaagaaggcaagccaccattttacccacgtaaatatatgaatatatttctgacattgaggtgttccagaagatgataaagaaatgatagcagctccagaaataccaactgattttaatctactacaggagtcagaaacacatttttcttctgacacagattttgaagatatcgaaggaaaaaaccaaaagcaaggcaaaggcaaaacttgtaaaaaaggcaaaaagggcccagcagaaaagggcaaaggtggaaatggaggaggaaaacctccttctggtccaaaccgaatgaatggtcatcaccaacagaatggagtggaaaacatgatgttgtttgaagttgttaaaatgggcaagagtgctatgcagtcggtggtagatgattggatagaatcatacaagcatgaccgagatatagcacttcttgaccttatcaacttttttattcagtgttcaggctgtaaaggagttgtcacagcagaaatgtttagacatatgcagaactctgagataattcgaaaaatgactgaagaattcgatgaggatagtggagattatccacttaccatggctggtcctcagtggaagaagttcaaatccagtttttgtgaattcattggcgtgttagtacggcaatgtcaatatagtatcatatatgatgagtatatgatggatacagtcatttcacttcttacaggattgtctgactcacaagtcagagcatttcgacatacaagcaccctggcagctatgaagttgatgacagctttggtgaatgtggcactaaatcttagcattaatatggataatacacaaagacaatatgaagcagaacggaataaaatgattggaaaacgagccaatgagaggctagaactcctgctacaaaagcggaaagagcttcaggaaaatcaagatgaaatagaaaatatgatgaatgcaatatttaaaggagtgtttgtacatagataccgtgatgcgatagctgaaattcgagctatttgcattgaagagattggcatttggatgaagatgtatagtgatgcctttcttaatgacagttatttaaaatatgttggttggactatgcatgataagcaaggtgaagtaagactcaaatgtcttactgctctacaagggctttattataacaaagagcttaattccaaactggaactttttaccagtcggttcaaggatagaattgtgtctatgacccttgacaaagaatatgatgttgcagtacaagcaataaaattactcactcttgttttacagagtagtgaagaagttctcactgcagaagattgtgaaaatgtctatcatctggtttattcagctcaccggccagtagcagtagcagctggagaatttctctacaaaaagctcttcagtcgtagagatccagaggaggatggaatgatgaaaagaagaggaagacaaggtccaaatgccaaccttgttaagacattggtttttttctttctagaaagtgagttacatgagcatgcagcataccttgtggatagcatgtgggactgtgctactgagctgctgaaagactgggaatgtatgaatagcttgttactggaagagccacttagtggagaggaagcactaacagataggcaagagagtgctctgattgaaataatgctttgtaccattagacaagcggctgaatgtcatcctcccgtgggaagagggacaggaaaaagggtgcttacagcaaaggagaagaagacacagttggatgataggacaaaaatcactgagctttttgccgtggcccttcctcagttattagcaaaatactctgtagatgcagaaaaggtgactaacttgttgcagttgcctcagtactttgatttggaaatatataccactggacgattagaaaagcatttggatgccttattgcgacagatccggaatattgtagagaagcacacagatacagatgttttggaagcatgttctaaaacttaccatgcactctgtaatgaagagttcacaatcttcaacagagtagatatttcaagaagtcaactgatagatgaattggcagataaatttaaccggcttcttgaagattttctgcaagagggtgaagaacctgatgaagatgatgcatatcaggtattgtcaacattgaagaggatcactgcttttcataatgcccatgacctttcaaagtgggatttatttgcttgtaattacaaactcttgaaaactggaatcgaaaatggagacatgcctgagcagattgttattcacgcactgcagtgtactcactatgtaatcctttggcaacttgctaagataactgaaagcagctctacaaaggaggacttgctgcgtttaaagaaacaaatgagagtattttgtcagatatgtcaacattacctgaccaacgtgaatactactgttaaggaacaggccttcactattctgtgtgatattttgatgatcttcagccatcagattatgtcaggagggcgtgacatgttagagccattagtgtatacccctgattcttcattgcagtctgagttgctcagctttattttggatcatgtcttcattgaacaggatgatgataataatagtgcagatggtcagcaagaggatgaagccagtaaaattgaagctctgcacaagagaagaaatttacttgcagcattttgtaagctaattgtatatactgtggtggagatgaatacagctgcagatatcttcaaacagtatatgaagtattataatgactatggagatatcatcaaagaaacaatgagtaaaacaaggcagatagacaaaattcagtgtgctaagacccttattctcagtctgcaacagctttttaatgaaatgatacaagaaaatggctataattttgatagatcatcctctacatttagtggcataaaagaacttgctcgacgttttgctttaacttttggacttgatcagttgaaaacaagagaagccattgccatgctacacaaagatggcatagaatttgcttttaaagagcctaatccgcaaggggagagccatccacctttaaatttggcatttcttgatattctgagtgaattttcttctaaactacttcgacaagacaaaagaacagtgtatgtttacttggaaaagttcatgacctttcagatgtcactccgaagagaggatgtgtggcttccactgatgtcttaccgaaattctttgctagctggtggtgatgatgacaccatgtcagtcattagtggaatcagcagccgggggtcaacagtacggagtaaaaaatcaaaaccatctacaggaaaacggaaagtggttgagggcatgcagctttcactcactgaagaaagtagtagtagtgacagtatgtggttaagcagagaacaaacactgcacacccctgttatgatgcagacaccacaactcacctccactattatgagagagcccaaaagattacggcctgaggatagcttcatgagtgtttatccaatgcagactgaacatcatcaaacacctcttgattataatcggcgtggcacaagcctaatggaagatgatgaagagccaattgtggaagatgttatgatgtcctcagaagggaggattgaggatcttaatgagggaatggattttgacaccatggatatagatttgccaccatcaaagaacagacgagagagaacagaactgaagcctgatttctttgatccagcttcaattatggatgaatcagttcttggagtgtcaatgttttaataccagtacacaattaaatctgtggtgaagtcattttctaagtggaagaggaaattttaaagtgtggtagatacagtgaaattctgtacagatttttctctaaggagaatatgacatgcttatgcttaccaagatcaagtgcattgaggggcagttttgtttgcctgaataaacgtaaaggacaagtaaacaatttgatgataagctacagtttttcttagaaagtaaatattttatttatgcgctgttagttggcttttgaatcgattatttcatgcttttttttaaaaaaaaaaaaaacaaaataacaatctgaagaggcatttggtacagatatgaattctcttacatttatttactggttgtactaaataatgatgacctctgctggatttctgtttacatccagaaaacaatgttaaggatgtatttattcccctaccctgaagaaagtgtaggatagaattgtttttagcattctaaatttaaatgcttaaaacgtcaatcaacaaaactttgttttaaatattgtaattgtggagaaaagtaaacttataagcagaacttttacaattttttcatctaaaagtattttaagatatttttaaaatccaagagcttctctatacttttcagaaatatccagatgcagtgaactgccagaaggtaaccagtctcaaacatgcttatcccattatcaaccctgaaagtttgcttgtcctttaagataaaaatgtaatgttgtgatattccttccagtaatgccactgtattttgtctccaaataaaagaagcttattgtagtatgtttgcagaaaaattctaaacaaaaattatacagcttattagagtgtgggaatagggatctaaattttaaataaaattatatatatatataaattggtgctgattttataattgcgcagtttgtttagttttttcttacttttaaattccaacttaaaattatgaggtttcagaaatatattgaaagtttaacaatgtttaaaaatagaaaagcatgagtgttcatgctttaaaatgatttttaaatttgtattttatattgttttatctatctgtctttgcaagcagtcttcaggttaaagatacttctaacaggttacagtacatttcctctgtatgtaaattagatgggataatagaattcataacccataatattctttgaaagctaagctttaaacttcattttatgtcctttcacaaataaattagtttaaaacagaaagtggctacttgccattttgacatcaactcattttgcgaggcttaggcagctagacatcgtttaaaacaaaatattaacttatattacatgtgtatctatctattgtcagtcgtctctcagttcttgaggtatattattttaatcattccatgccttaatatgcttgcaatacaagaatatcttcagatgggtgaataccaaaaggctttcagtttttagtcagaaatcaagcattgggctgtggtagccaaaaaccataggttagctaaaaagatcatgatacaattattttattaagtcatggttaataacaaatgaatccagacttgtctaacagattttccatcaacaaatattgttatgtgcaaaagtattgcctatgttgttttacacaccactgcattaactagaactgctgagaggactgtatatatgattttaaacctaagttgattttttttctcactcttgaaaggagtacttctttgtgaaagcagttcttacagctttgttttcaaccagctaaaaatgttttatatattactctaacctgttgtcctccacattctattgtcctaattgtactgttttctgatttgtatttatgtcttgagacagtaactttttgaataaaaataaacctacagta

SEQ ID NO: 367870 - DNA, 4523 bp, Homo sapiens
ctgcttctcccccgccccatcatctccagcgcgtggtgggggaactgctggggaaggcgattggcatcgatctctccatcccttccgaggcccgacttcggtcagttttcttcgggcaacaagagtagtgaagaagttctcactgcagaagattgtgaaaatgtctatcatctggtttattcagctcaccggccagtagcagtagcagctggagaatttctctacaaaaagctcttcagtcgtagagatccagaggaggatggaatgatgaaaagaagaggaagacaaggtccaaatgccaaccttgttaagacattggtttttttctttctagaaagtgagttacatgagcatgcagcataccttgtggatagcatgtgggactgtgctactgagctgctgaaagactgggaatgtatgaatagcttgttactggaagagccacttagtggagaggaagcactaacagataggcaagagagtgctctgattgaaataatgctttgtaccattagacaagcggctgaatgtcatcctcccgtgggaagagggacaggaaaaagggtgcttacagcaaaggagaagaagacacagttggatgataggacaaaaatcactgagctttttgccgtggcccttcctcagttattagcaaaatactctgtagatgcagaaaaggtgactaacttgttgcagttgcctcagtactttgatttggaaatatataccactggacgattagaaaagcatttggatgccttattgcgacagatccggaatattgtagagaagcacacagatacagatgttttggaagcatgttctaaaacttaccatgcactctgtaatgaagagttcacaatcttcaacagagtagatatttcaagaagtcaactgatagatgaattggcagataaatttaaccggcttcttgaagattttctgcaagagggtgaagaacctgatgaagatgatgcatatcaggtattgtcaacattgaagaggatcactgcttttcataatgcccatgacctttcaaagtgggatttatttgcttgtaattacaaactcttgaaaactggaatcgaaaatggagacatgcctgagcagattgttattcacgcactgcagtgtactcactatgtaatcctttggcaacttgctaagataactgaaagcagctctacaaaggaggacttgctgcgtttaaagaaacaaatgagagtattttgtcagatatgtcaacattacctgaccaacgtgaatactactgttaaggaacaggccttcactattctgtgtgatattttgatgatcttcagccatcagattatgtcaggagggcgtgacatgttagagccattagtgtatacccctgattcttcattgcagtctgagttgctcagctttattttggatcatgtcttcattgaacaggatgatgataataatagtgcagatggtcagcaagaggatgaagccagtaaaattgaagctctgcacaagagaagaaatttacttgcagcattttgtaagctaattgtatatactgtggtggagatgaatacagctgcagatatcttcaaacagtatatgaagtattataatgactatggagatatcatcaaagaaacaatgagtaaaacaaggcagatagacaaaattcagtgtgctaagacccttattctcagtctgcaacagctttttaatgaaatgatacaagaaaatggctataattttgatagatcatcctctacatttagtggcataaaagaacttgctcgacgttttgctttaacttttggacttgatcagttgaaaacaagagaagccattgccatgctacacaaagatggcatagaatttgcttttaaagagcctaatccgcaaggggagagccatccacctttaaatttggcatttcttgatattctgagtgaattttcttctaaactacttcgacaagacaaaagaacagtgtatgtttacttggaaaagttcatgacctttcagatgtcactccgaagagaggatgtgtggcttccactgatgtcttaccgaaattctttgctagctggtggtgatgatgacaccatgtcagtcattagtggaatcagcagccgggggtcaacagtacggagtaaaaaatcaaaaccatctacaggaaaacggaaagtggttgagggcatgcagctttcactcactgaagaaagtagtagtagtgacagtatgtggttaagcagagaacaaacactgcacacccctgttatgatgcagacaccacaactcacctccactattatgagagagcccaaaagattacggcctgaggatagcttcatgagtgtttatccaatgcagactgaacatcatcaaacacctcttgattataatcggcgtggcacaagcctaatggaagatgatgaagagccaattgtggaagatgttatgatgtcctcagaagggaggattgaggatcttaatgagggaatggattttgacaccatggatatagatttgccaccatcaaagaacagacgagagagaacagaactgaagcctgatttctttgatccagcttcaattatggatgaatcagttcttggagtgtcaatgttttaataccagtacacaattaaatctgtggtgaagtcattttctaagtggaagaggaaattttaaagtgtggtagatacagtgaaattctgtacagatttttctctaaggagaatatgacatgcttatgcttaccaagatcaagtgcattgaggggcagttttgtttgcctgaataaacgtaaaggacaagtaaacaatttgatgataagctacagtttttcttagaaagtaaatattttatttatgcgctgttagttggcttttgaatcgattatttcatgcttttttttaaaaaaaaaaaaaacaaaataacaatctgaagaggcatttggtacagatatgaattctcttacatttatttactggttgtactaaataatgatgacctctgctggatttctgtttacatccagaaaacaatgttaaggatgtatttattcccctaccctgaagaaagtgtaggatagaattgtttttagcattctaaatttaaatgcttaaaacgtcaatcaacaaaactttgttttaaatattgtaattgtggagaaaagtaaacttataagcagaacttttacaattttttcatctaaaagtattttaagatatttttaaaatccaagagcttctctatacttttcagaaatatccagatgcagtgaactgccagaaggtaaccagtctcaaacatgcttatcccattatcaaccctgaaagtttgcttgtcctttaagataaaaatgtaatgttgtgatattccttccagtaatgccactgtattttgtctccaaataaaagaagcttattgtagtatgtttgcagaaaaattctaaacaaaaattatacagcttattagagtgtgggaatagggatctaaattttaaataaaattatatatatatataaattggtgctgattttataattgcgcagtttgtttagttttttcttacttttaaattccaacttaaaattatgaggtttcagaaatatattgaaagtttaacaatgtttaaaaatagaaaagcatgagtgttcatgctttaaaatgatttttaaatttgtattttatattgttttatctatctgtctttgcaagcagtcttcaggttaaagatacttctaacaggttacagtacatttcctctgtatgtaaattagatgggataatagaattcataacccataatattctttgaaagctaagctttaaacttcattttatgtcctttcacaaataaattagtttaaaacagaaagtggctacttgccattttgacatcaactcattttgcgaggcttaggcagctagacatcgtttaaaacaaaatattaacttatattacatgtgtatctatctattgtcagtcgtctctcagttcttgaggtatattattttaatcattccatgccttaatatgcttgcaatacaagaatatcttcagatgggtgaataccaaaaggctttcagtttttagtcagaaatcaagcattgggctgtggtagccaaaaaccataggttagctaaaaagatcatgatacaattattttattaagtcatggttaataacaaatgaatccagacttgtctaacagattttccatcaacaaatattgttatgtgcaaaagtattgcctatgttgttttacacaccactgcattaactagaactgctgagaggactgtatatatgattttaaacctaagttgattttttttctcactcttgaaaggagtacttctttgtgaaagcagttcttacagctttgttttcaaccagctaaaaatgttttatatattactctaacctgttgtcctccacattctattgtcctaattgtactgttttctgatttgtatttatgtcttgagacagtaactttttgaataaaaataaacctacagta

SEQ ID NO: 367871 - DNA, 4483 bp, Homo sapiens
tcgatctctccatcccttccgaggcccgacttcggcacgaactgagctgatcctgccccaggaatagtcttagaagaaagaagagtagtgaagaagttctcactgcagaagattgtgaaaatgtctatcatctggtttattcagctcaccggccagtagcagtagcagctggagaatttctctacaaaaagctcttcagtcgtagagatccagaggaggatggaatgatgaaaagaagaggaagacaaggtccaaatgccaaccttgttaagacattggtttttttctttctagaaagtgagttacatgagcatgcagcataccttgtggatagcatgtgggactgtgctactgagctgctgaaagactgggaatgtatgaatagcttgttactggaagagccacttagtggagaggaagcactaacagataggcaagagagtgctctgattgaaataatgctttgtaccattagacaagcggctgaatgtcatcctcccgtgggaagagggacaggaaaaagggtgcttacagcaaaggagaagaagacacagttggatgataggacaaaaatcactgagctttttgccgtggcccttcctcagttattagcaaaatactctgtagatgcagaaaaggtgactaacttgttgcagttgcctcagtactttgatttggaaatatataccactggacgattagaaaagcatttggatgccttattgcgacagatccggaatattgtagagaagcacacagatacagatgttttggaagcatgttctaaaacttaccatgcactctgtaatgaagagttcacaatcttcaacagagtagatatttcaagaagtcaactgatagatgaattggcagataaatttaaccggcttcttgaagattttctgcaagagggtgaagaacctgatgaagatgatgcatatcaggtattgtcaacattgaagaggatcactgcttttcataatgcccatgacctttcaaagtgggatttatttgcttgtaattacaaactcttgaaaactggaatcgaaaatggagacatgcctgagcagattgttattcacgcactgcagtgtactcactatgtaatcctttggcaacttgctaagataactgaaagcagctctacaaaggaggacttgctgcgtttaaagaaacaaatgagagtattttgtcagatatgtcaacattacctgaccaacgtgaatactactgttaaggaacaggccttcactattctgtgtgatattttgatgatcttcagccatcagattatgtcaggagggcgtgacatgttagagccattagtgtatacccctgattcttcattgcagtctgagttgctcagctttattttggatcatgtcttcattgaacaggatgatgataataatagtgcagatggtcagcaagaggatgaagccagtaaaattgaagctctgcacaagagaagaaatttacttgcagcattttgtaagctaattgtatatactgtggtggagatgaatacagctgcagatatcttcaaacagtatatgaagtattataatgactatggagatatcatcaaagaaacaatgagtaaaacaaggcagatagacaaaattcagtgtgctaagacccttattctcagtctgcaacagctttttaatgaaatgatacaagaaaatggctataattttgatagatcatcctctacatttagtggcataaaagaacttgctcgacgttttgctttaacttttggacttgatcagttgaaaacaagagaagccattgccatgctacacaaagatggcatagaatttgcttttaaagagcctaatccgcaaggggagagccatccacctttaaatttggcatttcttgatattctgagtgaattttcttctaaactacttcgacaagacaaaagaacagtgtatgtttacttggaaaagttcatgacctttcagatgtcactccgaagagaggatgtgtggcttccactgatgtcttaccgaaattctttgctagctggtggtgatgatgacaccatgtcagtcattagtggaatcagcagccgggggtcaacagtacggagtaaaaaatcaaaaccatctacaggaaaacggaaagtggttgagggcatgcagctttcactcactgaagaaagtagtagtagtgacagtatgtggttaagcagagaacaaacactgcacacccctgttatgatgcagacaccacaactcacctccactattatgagagagcccaaaagattacggcctgaggatagcttcatgagtgtttatccaatgcagactgaacatcatcaaacacctcttgattataatcggcgtggcacaagcctaatggaagatgatgaagagccaattgtggaagatgttatgatgtcctcagaagggaggattgaggatcttaatgagggaatggattttgacaccatggatatagatttgccaccatcaaagaacagacgagagagaacagaactgaagcctgatttctttgatccagcttcaattatggatgaatcagttcttggagtgtcaatgttttaataccagtacacaattaaatctgtggtgaagtcattttctaagtggaagaggaaattttaaagtgtggtagatacagtgaaattctgtacagatttttctctaaggagaatatgacatgcttatgcttaccaagatcaagtgcattgaggggcagttttgtttgcctgaataaacgtaaaggacaagtaaacaatttgatgataagctacagtttttcttagaaagtaaatattttatttatgcgctgttagttggcttttgaatcgattatttcatgcttttttttaaaaaaaaaaaaaacaaaataacaatctgaagaggcatttggtacagatatgaattctcttacatttatttactggttgtactaaataatgatgacctctgctggatttctgtttacatccagaaaacaatgttaaggatgtatttattcccctaccctgaagaaagtgtaggatagaattgtttttagcattctaaatttaaatgcttaaaacgtcaatcaacaaaactttgttttaaatattgtaattgtggagaaaagtaaacttataagcagaacttttacaattttttcatctaaaagtattttaagatatttttaaaatccaagagcttctctatacttttcagaaatatccagatgcagtgaactgccagaaggtaaccagtctcaaacatgcttatcccattatcaaccctgaaagtttgcttgtcctttaagataaaaatgtaatgttgtgatattccttccagtaatgccactgtattttgtctccaaataaaagaagcttattgtagtatgtttgcagaaaaattctaaacaaaaattatacagcttattagagtgtgggaatagggatctaaattttaaataaaattatatatatatataaattggtgctgattttataattgcgcagtttgtttagttttttcttacttttaaattccaacttaaaattatgaggtttcagaaatatattgaaagtttaacaatgtttaaaaatagaaaagcatgagtgttcatgctttaaaatgatttttaaatttgtattttatattgttttatctatctgtctttgcaagcagtcttcaggttaaagatacttctaacaggttacagtacatttcctctgtatgtaaattagatgggataatagaattcataacccataatattctttgaaagctaagctttaaacttcattttatgtcctttcacaaataaattagtttaaaacagaaagtggctacttgccattttgacatcaactcattttgcgaggcttaggcagctagacatcgtttaaaacaaaatattaacttatattacatgtgtatctatctattgtcagtcgtctctcagttcttgaggtatattattttaatcattccatgccttaatatgcttgcaatacaagaatatcttcagatgggtgaataccaaaaggctttcagtttttagtcagaaatcaagcattgggctgtggtagccaaaaaccataggttagctaaaaagatcatgatacaattattttattaagtcatggttaataacaaatgaatccagacttgtctaacagattttccatcaacaaatattgttatgtgcaaaagtattgcctatgttgttttacacaccactgcattaactagaactgctgagaggactgtatatatgattttaaacctaagttgattttttttctcactcttgaaaggagtacttctttgtgaaagcagttcttacagctttgttttcaaccagctaaaaatgttttatatattactctaacctgttgtcctccacattctattgtcctaattgtactgttttctgatttgtatttatgtcttgagacagtaactttttgaataaaaataaacctacagta

SEQ ID NO: 367872 - DNA, 5740 bp, Homo sapiens
ctgcttctcccccgccccatcatctccagcgcgtggtgggggaactgctggggaaggcgattggcatcgatctctccatcccttccgaggcccgacttcggaattgtcttagaagaaagaaggcaagccaccattttacccacgtaaatatatgaatatatttctgacattgaggtgttccagaagatgataaagaaatgatagcagctccagaaataccaactgattttaatctactacaggagtcagaaacacatttttcttctgacacagattttgaagatatcgaaggaaaaaaccaaaagcaaggcaaaggcaaaacttgtaaaaaaggcaaaaagggcccagcagaaaagggcaaaggtggaaatggaggaggaaaacctccttctggtccaaaccgaatgaatggtcatcaccaacagaatggagtggaaaacatgatgttgtttgaagttgttaaaatgggcaagagtgctatgcagtcggtggtagatgattggatagaatcatacaagcatgaccgagatatagcacttcttgaccttatcaacttttttattcagtgttcaggctgtaaaggagttgtcacagcagaaatgtttagacatatgcagaactctgagataattcgaaaaatgactgaagaattcgatgaggatagtggagattatccacttaccatggctggtcctcagtggaagaagttcaaatccagtttttgtgaattcattggcgtgttagtacggcaatgtcaatatagtatcatatatgatgagtatatgatggatacagtcatttcacttcttacaggattgtctgactcacaagtcagagcatttcgacatacaagcaccctggcagctatgaagttgatgacagctttggtgaatgtggcactaaatcttagcattaatatggataatacacaaagacaatatgaagcagaacggaataaaatgattggaaaacgagccaatgagaggctagaactcctgctacaaaagcggaaagagcttcaggaaaatcaagatgaaatagaaaatatgatgaatgcaatatttaaaggagtgtttgtacatagataccgtgatgcgatagctgaaattcgagctatttgcattgaagagattggcatttggatgaagatgtatagtgatgcctttcttaatgacagttatttaaaatatgttggttggactatgcatgataagcaaggtgaagtaagactcaaatgtcttactgctctacaagggctttattataacaaagagcttaattccaaactggaactttttaccagtcggttcaaggatagaattgtgtctatgacccttgacaaagaatatgatgttgcagtacaagcaataaaattactcactcttgttttacagagtagtgaagaagttctcactgcagaagattgtgaaaatgtctatcatctggtttattcagctcaccggccagtagcagtagcagctggagaatttctctacaaaaagctcttcagtcgtagagatccagaggaggatggaatgatgaaaagaagaggaagacaaggtccaaatgccaaccttgttaagacattggtttttttctttctagaaagtgagttacatgagcatgcagcataccttgtggatagcatgtgggactgtgctactgagctgctgaaagactgggaatgtatgaatagcttgttactggaagagccacttagtggagaggaagcactaacagataggcaagagagtgctctgattgaaataatgctttgtaccattagacaagcggctgaatgtcatcctcccgtgggaagagggacaggaaaaagggtgcttacagcaaaggagaagaagacacagttggatgataggacaaaaatcactgagctttttgccgtggcccttcctcagttattagcaaaatactctgtagatgcagaaaaggtgactaacttgttgcagttgcctcagtactttgatttggaaatatataccactggacgattagaaaagcatttggatgccttattgcgacagatccggaatattgtagagaagcacacagatacagatgttttggaagcatgttctaaaacttaccatgcactctgtaatgaagagttcacaatcttcaacagagtagatatttcaagaagtcaactgatagatgaattggcagataaatttaaccggcttcttgaagattttctgcaagagggtgaagaacctgatgaagatgatgcatatcaggtattgtcaacattgaagaggatcactgcttttcataatgcccatgacctttcaaagtgggatttatttgcttgtaattacaaactcttgaaaactggaatcgaaaatggagacatgcctgagcagattgttattcacgcactgcagtgtactcactatgtaatcctttggcaacttgctaagataactgaaagcagctctacaaaggaggacttgctgcgtttaaagaaacaaatgagagtattttgtcagatatgtcaacattacctgaccaacgtgaatactactgttaaggaacaggccttcactattctgtgtgatattttgatgatcttcagccatcagattatgtcaggagggcgtgacatgttagagccattagtgtatacccctgattcttcattgcagtctgagttgctcagctttattttggatcatgtcttcattgaacaggatgatgataataatagtgcagatggtcagcaagaggatgaagccagtaaaattgaagctctgcacaagagaagaaatttacttgcagcattttgtaagctaattgtatatactgtggtggagatgaatacagctgcagatatcttcaaacagtatatgaagtattataatgactatggagatatcatcaaagaaacaatgagtaaaacaaggcagatagacaaaattcagtgtgctaagacccttattctcagtctgcaacagctttttaatgaaatgatacaagaaaatggctataattttgatagatcatcctctacatttagtggcataaaagaacttgctcgacgttttgctttaacttttggacttgatcagttgaaaacaagagaagccattgccatgctacacaaagatggcatagaatttgcttttaaagagcctaatccgcaaggggagagccatccacctttaaatttggcatttcttgatattctgagtgaattttcttctaaactacttcgacaagacaaaagaacagtgtatgtttacttggaaaagttcatgacctttcagatgtcactccgaagagaggatgtgtggcttccactgatgtcttaccgaaattctttgctagctggtggtgatgatgacaccatgtcagtcattagtggaatcagcagccgggggtcaacagtacggagtaaaaaatcaaaaccatctacaggaaaacggaaagtggttgagggcatgcagctttcactcactgaagaaagtagtagtagtgacagtatgtggttaagcagagaacaaacactgcacacccctgttatgatgcagacaccacaactcacctccactattatgagagagcccaatcatcaaacacctcttgattataatcggcgtggcacaagcctaatggaagatgatgaagagccaattgtggaagatgttatgatgtcctcagaagggaggattgaggatcttaatgagggaatggattttgacaccatggatatagatttgccaccatcaaagaacagacgagagagaacagaactgaagcctgatttctttgatccagcttcaattatggatgaatcagttcttggagtgtcaatgttttaataccagtacacaattaaatctgtggtgaagtcattttctaagtggaagaggaaattttaaagtgtggtagatacagtgaaattctgtacagatttttctctaaggagaatatgacatgcttatgcttaccaagatcaagtgcattgaggggcagttttgtttgcctgaataaacgtaaaggacaagtaaacaatttgatgataagctacagtttttcttagaaagtaaatattttatttatgcgctgttagttggcttttgaatcgattatttcatgcttttttttaaaaaaaaaaaaaacaaaataacaatctgaagaggcatttggtacagatatgaattctcttacatttatttactggttgtactaaataatgatgacctctgctggatttctgtttacatccagaaaacaatgttaaggatgtatttattcccctaccctgaagaaagtgtaggatagaattgtttttagcattctaaatttaaatgcttaaaacgtcaatcaacaaaactttgttttaaatattgtaattgtggagaaaagtaaacttataagcagaacttttacaattttttcatctaaaagtattttaagatatttttaaaatccaagagcttctctatacttttcagaaatatccagatgcagtgaactgccagaaggtaaccagtctcaaacatgcttatcccattatcaaccctgaaagtttgcttgtcctttaagataaaaatgtaatgttgtgatattccttccagtaatgccactgtattttgtctccaaataaaagaagcttattgtagtatgtttgcagaaaaattctaaacaaaaattatacagcttattagagtgtgggaatagggatctaaattttaaataaaattatatatatatataaattggtgctgattttataattgcgcagtttgtttagttttttcttacttttaaattccaacttaaaattatgaggtttcagaaatatattgaaagtttaacaatgtttaaaaatagaaaagcatgagtgttcatgctttaaaatgatttttaaatttgtattttatattgttttatctatctgtctttgcaagcagtcttcaggttaaagatacttctaacaggttacagtacatttcctctgtatgtaaattagatgggataatagaattcataacccataatattctttgaaagctaagctttaaacttcattttatgtcctttcacaaataaattagtttaaaacagaaagtggctacttgccattttgacatcaactcattttgcgaggcttaggcagctagacatcgtttaaaacaaaatattaacttatattacatgtgtatctatctattgtcagtcgtctctcagttcttgaggtatattattttaatcattccatgccttaatatgcttgcaatacaagaatatcttcagatgggtgaataccaaaaggctttcagtttttagtcagaaatcaagcattgggctgtggtagccaaaaaccataggttagctaaaaagatcatgatacaattattttattaagtcatggttaataacaaatgaatccagacttgtctaacagattttccatcaacaaatattgttatgtgcaaaagtattgcctatgttgttttacacaccactgcattaactagaactgctgagaggactgtatatatgattttaaacctaagttgattttttttctcactcttgaaaggagtacttctttgtgaaagcagttcttacagctttgttttcaaccagctaaaaatgttttatatattactctaacctgttgtcctccacattctattgtcctaattgtactgttttctgatttgtatttatgtcttgagacagtaactttttgaataaaaataaacctacagta

SEQ ID NO: 367873 - DNA, 5432 bp, Homo sapiens
tcaacatatgaaaaatcaatgtaatatttcatattaacagttggaagactcacaattcatagtttcagaatttacaacacaaacctacaggaataaagacaatgtagtattagaataaggtcagatatatagatcaatggacagaattgacagtccagaaatacacccatacgattacggtcacctgatttttgactaaggttccaaaacaattcactaggggaaagaatagtcttgtcaaaaaatggtgctcagacaagtggatagccataagcacagaatgagtttggacccctatctcaaatctcaaatacaaacattaactccgaattaatcaaatgcctaaatttaagagctaaaattttaaagctcttagaagaaaacataggtacacatctttgtgactttgaattaggtcacggtttccttgacatgacacttaaaagtacaagcaacaaaagaaaaaaatagataaaatgaacttcagcaaaattagaatgtttatgcttcagaaaacactgtgaagaaagtgatcagacaactcacagaatgggaaaaatatttgtgaatcatatctcttaataagggcccagcagaaaagggcaaaggtggaaatggaggaggaaaacctccttctggtccaaaccgaatgaatggtcatcaccaacagaatggagtggaaaacatgatgttgtttgaagttgttaaaatgggcaagagtgctatgcagtcggtggtagatgattggatagaatcatacaagcatgaccgagatatagcacttcttgaccttatcaacttttttattcagtgttcaggctgtaaaggagttgtcacagcagaaatgtttagacatatgcagaactctgagataattcgaaaaatgactgaagaattcgatgaggatagtggagattatccacttaccatggctggtcctcagtggaagaagttcaaatccagtttttgtgaattcattggcgtgttagtacggcaatgtcaatatagtatcatatatgatgagtatatgatggatacagtcatttcacttcttacaggattgtctgactcacaagtcagagcatttcgacatacaagcaccctggcagctatgaagttgatgacagctttggtgaatgtggcactaaatcttagcattaatatggataatacacaaagacaatatgaagcagaacggaataaaatgattggaaaacgagccaatgagaggctagaactcctgctacaaaagcggaaagagcttcaggaaaatcaagatgaaatagaaaatatgatgaatgcaatatttaaaggagtgtttgtacatagataccgtgatgcgatagctgaaattcgagctatttgcattgaagagattggcatttggatgaagatgtatagtgatgcctttcttaatgacagttatttaaaatatgttggttggactatgcatgataagcaaggtgaagtaagactcaaatgtcttactgctctacaagggctttattataacaaagagcttaattccaaactggaactttttaccagtcggttcaaggatagaattgtgtctatgacccttgacaaagaatatgatgttgcagtacaagcaataaaattactcactcttgttttacagagtagtgaagaagttctcactgcagaagattgtgaaaatgtctatcatctggtttattcagctcaccggccagtagcagtagcagctggagaatttctctacaaaaagctcttcagtcgtagagatccagaggaggatggaatgatgaaaagaagaggaagacaaggtccaaatgccaaccttgttaagacattggtttttttctttctagaaagtgagttacatgagcatgcagcataccttgtggatagcatgtgggactgtgctactgagctgctgaaagactgggaatgtatgaatagcttgttactggaagagccacttagtggagaggaagcactaacagataggcaagagagtgctctgattgaaataatgctttgtaccattagacaagcggctgaatgtcatcctcccgtgggaagagggacaggaaaaagggtgcttacagcaaaggagaagaagacacagttggatgataggacaaaaatcactgagctttttgccgtggcccttcctcagttattagcaaaatactctgtagatgcagaaaaggtgactaacttgttgcagttgcctcagtactttgatttggaaatatataccactggacgattagaaaagcatttggatgccttattgcgacagatccggaatattgtagagaagcacacagatacagatgttttggaagcatgttctaaaacttaccatgcactctgtaatgaagagttcacaatcttcaacagagtagatatttcaagaagtcaactgatagatgaattggcagataaatttaaccggcttcttgaagattttctgcaagagggtgaagaacctgatgaagatgatgcatatcaggtattgtcaacattgaagaggatcactgcttttcataatgcccatgacctttcaaagtgggatttatttgcttgtaattacaaactcttgaaaactggaatcgaaaatggagacatgcctgagcagattgttattcacgcactgcagtgtactcactatgtaatcctttggcaacttgctaagataactgaaagcagctctacaaaggaggacttgctgcgtttaaagaaacaaatgagagtattttgtcagatatgtcaacattacctgaccaacgtgaatactactgttaaggaacaggccttcactattctgtgtgatattttgatgatcttcagccatcagattatgtcaggagggcgtgacatgttagagccattagtgtatacccctgattcttcattgcagtctgagttgctcagctttattttggatcatgtcttcattgaacaggatgatgataataatagtgcagatggtcagcaagaggatgaagccagtaaaattgaagctctgcacaagagaagaaatttacttgcagcattttgtaagctaattgtatatactgtggtggagatgaatacagctgcagatatcttcaaacagtatatgaagtattataatgactatggagatatcatcaaagaaacaatgagtaaaacaaggcagatagacaaaattcagtgtgctaagacccttattctcagtctgcaacagctttttaatgaaatgatacaagaaaatggctataattttgatagatcatcctctacatttagtggcataaaagaacttgctcgacgttttgctttaacttttggacttgatcagttgaaaacaagagaagccattgccatgctacacaaagatggcatagaatttgcttttaaagagcctaatccgcaaggggagagccatccacctttaaatttggcatttcttgatattctgagtgaattttcttctaaactacttcgacaagacaaaagaacagtgtatgtttacttggaaaagttcatgacctttcagatgtcactccgaagagaggatgtgtggcttccactgatgtcttaccgaaattctttgctagctggtggtgatgatgacaccatgtcagtcattagtggaatcagcagccgggggtcaacagtacggagtaaaaaatcaaaaccatctacaggaaaacggaaagtggttgagggcatgcagctttcactcactgaagaaagtagtagtagtgacagtatgtggttaagcagagaacaaacactgcacacccctgttatgatgcagacaccacaactcacctccactattatgagagagcccaaaagattacggcctgaggatagcttcatgagtgtttatccaatgcagactgaacatcatcaaacacctcttgattataatcggcgtggcacaagcctaatggaagatgatgaagagccaattgtggaagatgttatgatgtcctcagaagggaggattgaggatcttaatgagggaatggattttgacaccatggatatagatttgccaccatcaaagaacagacgagagagaacagaactgaagcctgatttctttgatccagcttcaattatggatgaatcagttcttggagtgtcaatgttttaataccagtacacaattaaatctgtggtgaagtcattttctaagtggaagaggaaattttaaagtgtggtagatacagtgaaattctgtacagatttttctctaaggagaatatgacatgcttatgcttaccaagatcaagtgcattgaggggcagttttgtttgcctgaataaacgtaaaggacaagtaaacaatttgatgataagctacagtttttcttagaaagtaaatattttatttatgcgctgttagttggcttttgaatcgattatttcatgcttttttttaaaaaaaaaaaaaacaaaataacaatctgaagaggcatttggtacagatatgaattctcttacatttatttactggttgtactaaataatgatgacctctgctggatttctgtttacatccagaaaacaatgttaaggatgtatttattcccctaccctgaagaaagtgtaggatagaattgtttttagcattctaaatttaaatgcttaaaacgtcaatcaacaaaactttgttttaaatattgtaattgtggagaaaagtaaacttataagcagaacttttacaattttttcatctaaaagtattttaagatatttttaaaatccaagagcttctctatacttttcagaaatatccagatgcagtgaactgccagaaggtaaccagtctcaaacatgcttatcccattatcaaccctgaaagtttgcttgtcctttaagataaaaatgtaatgttgtgatattccttccagtaatgccactgtattttgtctccaaataaaagaagcttattgtagtatgtttgcagaaaaattctaaacaaaaattatacagcttattagagtgtgggaatagggatctaaattttaaataaaattatatatatatataaattggtgctgattttataattgcgcagtttgtttagttttttcttacttttaaattccaacttaaaattatgaggtttcagaaatatattgaaagtttaacaatgtttaaaaatagaaaagcatgagtgttcatgctttaaaatgatttttaaatttgtattttatattgttttatctatctgtctttgcaagcagtcttcaggttaaagatacttctaacaggttacagtacatttcctctgtatgtaaattagatgggataatagaattcataacccataatattctttgaaagctaagctttaaacttcattttatgtcctttaagcctcgcaaaatgagttgatgtcaaaatggcaagtagccactttctgttttcaactaatttatttgt

SEQ ID NO: 367874 - DNA, 2352 bp, Homo sapiens
atgatccatatattgcttaaacaataccagttatagtatcagagacaatggtaagattaatattctcaatacataccaattatcagtgccatggcactgctattacacaggcccagagcagacaaaatctggctcataatttgttggttggctaagactaagtcagcaacatatgcaggcgatccttggtgtagaaattgcacgttcaatttctgacaccactcggcgtggcacaagcctaatggaagatgatgaagagccaattgtggaagatgttatgatgtcctcagaagggaggattgaggatcttaatgagggaatggattttgacaccatggatatagatttgccaccatcaaagaacagacgagagagaacagaactgaagcctgatttctttgatccagcttcaattatggatgaatcagttcttggagtgtcaatgttttaataccagtacacaattaaatctgtggtgaagtcattttctaagtggaagaggaaattttaaagtgtggtagatacagtgaaattctgtacagatttttctctaaggagaatatgacatgcttatgcttaccaagatcaagtgcattgaggggcagttttgtttgcctgaataaacgtaaaggacaagtaaacaatttgatgataagctacagtttttcttagaaagtaaatattttatttatgcgctgttagttggcttttgaatcgattatttcatgcttttttttaaaaaaaaaaaaaacaaaataacaatctgaagaggcatttggtacagatatgaattctcttacatttatttactggttgtactaaataatgatgacctctgctggatttctgtttacatccagaaaacaatgttaaggatgtatttattcccctaccctgaagaaagtgtaggatagaattgtttttagcattctaaatttaaatgcttaaaacgtcaatcaacaaaactttgttttaaatattgtaattgtggagaaaagtaaacttataagcagaacttttacaattttttcatctaaaagtattttaagatatttttaaaatccaagagcttctctatacttttcagaaatatccagatgcagtgaactgccagaaggtaaccagtctcaaacatgcttatcccattatcaaccctgaaagtttgcttgtcctttaagataaaaatgtaatgttgtgatattccttccagtaatgccactgtattttgtctccaaataaaagaagcttattgtagtatgtttgcagaaaaattctaaacaaaaattatacagcttattagagtgtgggaatagggatctaaattttaaataaaattatatatatatataaattggtgctgattttataattgcgcagtttgtttagttttttcttacttttaaattccaacttaaaattatgaggtttcagaaatatattgaaagtttaacaatgtttaaaaatagaaaagcatgagtgttcatgctttaaaatgatttttaaatttgtattttatattgttttatctatctgtctttgcaagcagtcttcaggttaaagatacttctaacaggttacagtacatttcctctgtatgtaaattagatgggataatagaattcataacccataatattctttgaaagctaagctttaaacttcattttatgtcctttcacaaataaattagtttaaaacagaaagtggctacttgccattttgacatcaactcattttgcgaggcttaggcagctagacatcgtttaaaacaaaatattaacttatattacatgtgtatctatctattgtcagtcgtctctcagttcttgaggtatattattttaatcattccatgccttaatatgcttgcaatacaagaatatcttcagatgggtgaataccaaaaggctttcagtttttagtcagaaatcaagcattgggctgtggtagccaaaaaccataggttagctaaaaagatcatgatacaattattttattaagtcatggttaataacaaatgaatccagacttgtctaacagattttccatcaacaaatattgttatgtgcaaaagtattgcctatgttgttttacacaccactgcattaactagaactgctgagaggactgtatatatgattttaaacctaagttgattttttttctcactcttgaaaggagtacttctttgtgaaagcagttcttacagctttgttttcaaccagctaaaaatgttttatatattactctaacctgttgtcctccacattctattgtcctaattgtactgttttctgatttgtatttatgtcttgagacagtaactttttgaataaaaataaacctacagta

SEQ ID NO: 367875 - DNA, 2816 bp, Homo sapiens
gagatttaacttacaagtaagagctctttgtaatatttcagctcattacatctggctttgatatcagttcttaatagcttattatagtattctaaaatattacttaatgggcataagtgctagaattttaattgaacaacctaacttttagtatatatactaagagtcacatgccattcttgtttagtgaacaagggagagttgctccattcatcatctgcttttacttttagacaagtaattattagattttacctaacattcctttctcagttggagtatatagaaagcatcaatgtaagtcattttgcccagattttaccttacccttttgatttcttaaaatttgtagttctgttccattcactttggccagattttctaaagaaagcttcttgctttctacatacttgaattgttcttagattttttttggtctgcatactcaaatgcctttttgaaaaaccatatccacttcccagcacaaatagccaagtttgcaagactttcttaacccctttccaaggaacctgtgccagaaatatatgtgaagaagcacatcatttattcatttaacaaatacctatgttgagtgcctatgtttagggtattatctagacattagtggtacatataagcataattaatccaaggttcctactttaattatatgtgaggtaagtagcatcttgattagtcctgatgttatttcattatatatcatggtcaatttaattttagaattatacatctgaagagaggggaagttttcaaagtggttttattagcatgttatttaacataataaagtattaatgtaatatttatggatatatttaaagaaatgaatgacttttaacgagattttctcccctctctctctctcattaggttcttggagtgtcaatgttttaataccagtacacaattaaatctgtggtgaagtcattttctaagtggaagaggaaattttaaagtgtggtagatacagtgaaattctgtacagatttttctctaaggagaatatgacatgcttatgcttaccaagatcaagtgcattgaggggcagttttgtttgcctgaataaacgtaaaggacaagtaaacaatttgatgataagctacagtttttcttagaaagtaaatattttatttatgcgctgttagttggcttttgaatcgattatttcatgcttttttttaaaaaaaaaaaaaacaaaataacaatctgaagaggcatttggtacagatatgaattctcttacatttatttactggttgtactaaataatgatgacctctgctggatttctgtttacatccagaaaacaatgttaaggatgtatttattcccctaccctgaagaaagtgtaggatagaattgtttttagcattctaaatttaaatgcttaaaacgtcaatcaacaaaactttgttttaaatattgtaattgtggagaaaagtaaacttataagcagaacttttacaattttttcatctaaaagtattttaagatatttttaaaatccaagagcttctctatacttttcagaaatatccagatgcagtgaactgccagaaggtaaccagtctcaaacatgcttatcccattatcaaccctgaaagtttgcttgtcctttaagataaaaatgtaatgttgtgatattccttccagtaatgccactgtattttgtctccaaataaaagaagcttattgtagtatgtttgcagaaaaattctaaacaaaaattatacagcttattagagtgtgggaatagggatctaaattttaaataaaattatatatatatataaattggtgctgattttataattgcgcagtttgtttagttttttcttacttttaaattccaacttaaaattatgaggtttcagaaatatattgaaagtttaacaatgtttaaaaatagaaaagcatgagtgttcatgctttaaaatgatttttaaatttgtattttatattgttttatctatctgtctttgcaagcagtcttcaggttaaagatacttctaacaggttacagtacatttcctctgtatgtaaattagatgggataatagaattcataacccataatattctttgaaagctaagctttaaacttcattttatgtcctttcacaaataaattagtttaaaacagaaagtggctacttgccattttgacatcaactcattttgcgaggcttaggcagctagacatcgtttaaaacaaaatattaacttatattacatgtgtatctatctattgtcagtcgtctctcagttcttgaggtatattattttaatcattccatgccttaatatgcttgcaatacaagaatatcttcagatgggtgaataccaaaaggctttcagtttttagtcagaaatcaagcattgggctgtggtagccaaaaaccataggttagctaaaaagatcatgatacaattattttattaagtcatggttaataacaaatgaatccagacttgtctaacagattttccatcaacaaatattgttatgtgcaaaagtattgcctatgttgttttacacaccactgcattaactagaactgctgagaggactgtatatatgattttaaacctaagttgattttttttctcactcttgaaaggagtacttctttgtgaaagcagttcttacagctttgttttcaaccagctaaaaatgttttatatattactctaacctgttgtcctccacattctattgtcctaattgtactgttttctgatttgtatttatgtcttgagacagtaactttttgaataaaaataaacctacagta

SEQ ID NO: 367876 - DNA, 2992 bp, Homo sapiens
  misc_feature (2735)..(2735): n is a, c, g, or t
ctgcttctcccccgccccatcatctccagcgcgtggtgggggaactgctggggaaggcgattggcatcgatctctccatcccttccgaggcccgacttcggaattgtcttagaagaaagaaggcaagccaccattttacccacgtaaatatatgaatatatttctgacattgaggtgttccagaagatgataaagaaatgatagcagctccagaaataccaactgattttaatctactacaggagtcagaaacacatttttcttctgacacagattttgaagatatcgaaggaaaaaaccaaaagcaaggcaaaggcaaaacttgtaaaaaaggcaaaaagggcccagcagaaaagggcaaaggtggaaatggaggaggaaaacctccttctggtccaaaccgaatgaatggtcatcaccaacagaatggagtggaaaacatgatgttgtttgaagttgttaaaatgggcaagagtgctatgcagtcggtggtagatgattggatagaatcatacaagcatgaccgagatatagcacttcttgaccttatcaacttttttattcagtgttcaggctgtaaaggagttgtcacagcagaaatgtttagacatatgcagaactctgagataattcgaaaaatgactgaagaattcgatgaggatagtggagattatccacttaccatggctggtcctcagtggaagaagttcaaatccagtttttgtgaattcattggcgtgttagtacggcaatgtcaatatagtatcatatatgatgagtatatgatggatacagtcatttcacttcttacaggattgtctgactcacaagtcagagcatttcgacatacaagcaccctggcagctatgaagttgatgacagctttggtgaatgtggcactaaatcttagcattaatatggataatacacaaagacaatatgaagcagaacggaataaaatgattggaaaacgagccaatgagaggctagaactcctgctacaaaagcggaaagagcttcaggaaaatcaagatgaaatagaaaatatgatgaatgcaatatttaaaggagtgtttgtacatagataccgtgatgcgatagctgaaattcgagctatttgcattgaagagattggcatttggatgaagatgtatagtgatgcctttcttaatgacagttatttaaaatatgttggttggactatgcatgataagcaaggtgaagtaagactcaaatgtcttactgctctacaagggctttattataacaaagagcttaattccaaactggaactttttaccagtcggttcaaggatagaattgtgtctatgacccttgacaaagaatatgatgttgcagtacaagcaataaaattactcactcttgttttacagagtagtgaagaagttctcactgcagaagattgtgaaaatgtctatcatctggtttattcagctcaccggccagtagcagtagcagctggagaatttctctacaaaaagctcttcagtcgtagagatccagaggaggatggaatgatgaaaagaagaggaagacaaggtccaaatgccaaccttgttaagacattggtttttttctttctagaaagtgagttacatgagcatgcagcataccttgtggatagcatgtgggactgtgctactgagctgctgaaagactgggaatgtatgaatagcttgttactggaagagccacttagtggagaggaagcactaacagataggcaagagagtgctctgattgaaataatgctttgtaccattagacaagcggctgaatgtcatcctcccgtgggaagagggacaggaaaaagggtgcttacagcaaaggagaagaagacacagttggatgataggacaaaaatcactgagctttttgccgtggcccttcctcagttattagcaaaatactctgtagatgcagaaaaggtgactaacttgttgcagttgcctcagtactttgatttggaaatatataccactggacgattagaaaagcatttggatgccttattgcgacagatccggaatattgtagagaagcacacagatacagatgttttggaagcatgttctaaaacttaccatgcactctgtaatgaagagttcacaatcttcaacagagtagatatttcaagaagtcaactgatagatgaattggcagataaatttaaccggcttcttgaagattttctgcaagagggtgaagaacctgatgaagatgatgcatatcaggtattgtcaacattgaagaggatcactgcttttcataatgcccatgacctttcaaagtgggatttatttgcttgtaattacaaactcttgaaaactggaatcgaaaatggagacatgcctgagcagattgttattcacgcactgcagtgtactcactatgtaatcctttggcaacttgctaagataactgaaagcagctctacaaaggaggacttgctgcgtttaaagaaacaaatgagagtattttgtcagatatgtcaacattacctgaccaacgtgaatactactgttaaggaacaggccttcactattctgtgtgatattttgatgatcttcagccatcagattatgtcaggagggcgtgacatgttagagccattagtgtatacccctgattcttcattgcagtctgagttgctcagctttattttggatcatgtcttcattgaacaggatgatgataataatagtgcagatggnacgaagactggcgcatcttgctcccatcaggtggtgatcttgtactgctgggtgttgaggaaccagggctaatgatcttagaaagcagggacatagtatctacactgctggatgtgggcttgtccatcatctcatccggggtgggtgtcccactccgttcatcccgtacaggggttccatcaatgttgtcgattgaggtgctagtagggccacgctggaagtctgagggatggctctctgatgtgacgcaagatgcg

SEQ ID NO: 367877 - DNA, 2264 bp, Homo sapiens
ctgcttctcccccgccccatcatctccagcgcgtggtgggggaactgctggggaaggcgattggcatcgatctctccatcccttccgaggcccgacttcggaattgtcttagaagaaagaaggcaagccaccattttacccacgtaaatatatgaatatatttctgacattgaggtgttccagaagatgataaagaaatgatagcagctccagaaataccaactgattttaatctactacaggagtcagaaacacatttttcttctgacacagattttgaagatatcgaaggaaaaaaccaaaagcaaggcaaaggcaaaacttgtaaaaaaggcaaaaagggcccagcagaaaagggcaaaggtggaaatggaggaggaaaacctccttctggtccaaaccgaatgaatggtcatcaccaacagaatggagtggaaaacatgatgttgtttgaagttgttaaaatgggcaagagtgctatgcagtcggtggtagatgattggatagaatcatacaagcatgaccgagatatagcacttcttgaccttatcaacttttttattcagtgttcaggctgtaaaggagttgtcacagcagaaatgtttagacatatgcagaactctgagataattcgaaaaatgactgaagaattcgatgaggatagtggagattatccacttaccatggctggtcctcagtggaagaagttcaaatccagtttttgtgaattcattggcgtgttagtacggcaatgtcaatatagtatcatatatgatgagtatatgatggatacagtcatttcacttcttacaggattgtctgactcacaagtcagagcatttcgacatacaagcaccctggcagctatgaagttgatgacagctttggtgaatgtggcactaaatcttagcattaatatggataatacacaaagacaatatgaagcagaacggaataaaatgattggaaaacgagccaatgagaggctagaactcctgctacaaaagcggaaagagcttcaggaaaatcaagatgaaatagaaaatatgatgaatgcaatatttaaaggagtgtttgtacatagataccgtgatgcgatagctgaaattcgagctatttgcattgaagagattggcatttggatgaagatgtatagtgatgcctttcttaatgacagttatttaaaatatgttggttggactatgcatgataagcaaggtgaagtaagactcaaatgtcttactgctctacaagggctttattataacaaagagcttaattccaaactggaactttttaccagtcggttcaaggatagaattgtgtctatgacccttgacaaagaatatgatgttgcagtacaagcaataaaattactcactcttgttttacagagtagtgaagaagttctcactgcagaagattgtgaaaatgtctatcatctggtttattcagctcaccggccagtagcagtagcagctggagaatttctctacaaaaagctcttcagtcgtagagatccagaggaggatggaatgatgaaaagaagaggaagacaaggtccaaatgccaaccttgttaagacattggtttttttctttctagaaagtgagttacatgagcatgcagcataccttgtggatagcatgtgggactgtgctactgagctgctgaaagactgggaatgtatgaatagcttgttactggaagagccacttagtggagaggaagcactaacagataggcaagagagtgctctgattgaaataatgctttgtaccattagacaagcggctgaatgtcatcctcccgtgggaagagggacaggaaaaagggtgcttacagcaaaggagaagaagacacagttggatgataggacaaaaatcactgagctttttgccgtggcccttcctcagttattagcaaaatactctctatgggggatctcgcgagatcccccatacagagtagagtattacttgactaactataagggacagctatatctcccatcccctatttccaagcagtttctaaacaactgacattttacctccaggcaaaaaaacaagtcagcttttccctaaagaaagtgaaccactatctagggaaagctaagcggaggtgtggcacagagtaaacacatctcatccagcatttaaagggcccatacataacctagcagctagctcctctctcttttaccctaaaacaatctgccaagagacagatcctactctgtatggggatctcggggatcctca

SEQ ID NO: 367878 - DNA, 425 bp, Homo sapiens
acagttatttaaaatatgttggttggactatgcatgataaggtaagatgtgcccttcagactgcttctttctacacatcggcgtggctgtctgcacctctcattcatgagttatctcccagtatgtatacctggtgacacatttctggaagcctcccctttattcttttctatcttctctgtaaaaacttattttctatcacataaagtctgctagatatttttgaatcctggccactgatttaaccattaatggtgaatcatttttttgctgaaatattacagtcatgaaggtagtaggagtgaggcatttcttagggcacgaagaagaaccattacgctgttgttatctgagagctatatacttaaaaaaaaaattattcaattttgatcctctcttttgacaaacctgtatcttagccagat

SEQ ID NO: 367879 - DNA, 6039 bp, Homo sapiens
tcaacatatgaaaaatcaatgtaatatttcatattaacagttggaagactcacaattcatagtttcagaatttacaacacaaacctacaggaataaagacaatgtagtattagaataaggtcagatatatagatcaatggacagaattgacagtccagaaatacacccatacgattacggtcacctgatttttgactaaggttccaaaacaattcactaggggaaagaatagtcttgtcaaaaaatggtgctcagacaagtggatagccataagcacagaatgagtttggacccctatctcaaatctcaaatacaaacattaactccgaattaatcaaatgcctaaatttaagagctaaaattttaaagctcttagaagaaaacataggtacacatctttgtgactttgaattaggtcacggtttccttgacatgacacttaaaagtacaagcaacaaaagaaaaaaatagataaaatgaacttcagcaaaattagaatgtttatgcttcagaaaacactgtgaagaaagtgatcagacaactcacagaatgggaaaaatatttgtgaatcatatctcttaataagggcccagcagaaaagggcaaaggtggaaatggaggaggaaaacctccttctggtccaaaccgaatgaatggtcatcaccaacagaatggagtggaaaacatgatgttgtttgaagttgttaaaatgggcaagagtgctatgcagtcggtggtagatgattggatagaatcatacaagcatgaccgagatatagcacttcttgaccttatcaacttttttattcagtgttcaggctgtaaaggagttgtcacagcagaaatgtttagacatatgcagaactctgagataattcgaaaaatgactgaagaattcgatgaggatagtggagattatccacttaccatggctggtcctcagtggaagaagttcaaatccagtttttgtgaattcattggcgtgttagtacggcaatgtcaatatagtatcatatatgatgagtatatgatggatacagtcatttcacttcttacaggattgtctgactcacaagtcagagcatttcgacatacaagcaccctggcagctatgaagttgatgacagctttggtgaatgtggcactaaatcttagcattaatatggataatacacaaagacaatatgaagcagaacggaataaaatgattggaaaacgagccaatgagaggctagaactcctgctacaaaagcggaaagagcttcaggaaaatcaagatgaaatagaaaatatgatgaatgcaatatttaaaggagtgtttgtacatagataccgtgatgcgatagctgaaattcgagctatttgcattgaagagattggcatttggatgaagatgtatagtgatgcctttcttaatgacagttatttaaaatatgttggttggactatgcatgataagcaaggtgaagtaagactcaaatgtcttactgctctacaagggctttattataacaaagagcttaattccaaactggaactttttaccagtcggttcaaggatagaattgtgtctatgacccttgacaaagaatatgatgttgcagtacaagcaataaaattactcactcttgttttacagagtagtgaagaagttctcactgcagaagattgtgaaaatgtctatcatctggtttattcagctcaccggccagtagcagtagcagctggagaatttctctacaaaaagctcttcagtcgtagagatccagaggaggatggaatgatgaaaagaagaggaagacaaggtccaaatgccaaccttgttaagacattggtttttttctttctagaaagtgagttacatgagcatgcagcataccttgtggatagcatgtgggactgtgctactgagctgctgaaagactgggaatgtatgaatagcttgttactggaagagccacttagtggagaggaagcactaacagataggcaagagagtgctctgattgaaataatgctttgtaccattagacaagcggctgaatgtcatcctcccgtgggaagagggacaggaaaaagggtgcttacagcaaaggagaagaagacacagttggatgataggacaaaaatcactgagctttttgccgtggcccttcctcagttattagcaaaatactctgtagatgcagaaaaggtgactaacttgttgcagttgcctcagtactttgatttggaaatatataccactggacgattagaaaagcatttggatgccttattgcgacagatccggaatattgtagagaagcacacagatacagatgttttggaagcatgttctaaaacttaccatgcactctgtaatgaagagttcacaatcttcaacagagtagatatttcaagaagtcaactgatagatgaattggcagataaatttaaccggcttcttgaagattttctgcaagagggtgaagaacctgatgaagatgatgcatatcaggtattgtcaacattgaagaggatcactgcttttcataatgcccatgacctttcaaagtgggatttatttgcttgtaattacaaactcttgaaaactggaatcgaaaatggagacatgcctgagcagattgttattcacgcactgcagtgtactcactatgtaatcctttggcaacttgctaagataactgaaagcagctctacaaaggaggacttgctgcgtttaaagaaacaaatgagagtattttgtcagatatgtcaacattacctgaccaacgtgaatactactgttaaggaacaggccttcactattctgtgtgatattttgatgatcttcagccatcagattatgtcaggagggcgtgacatgttagagccattagtgtatacccctgattcttcattgcagtctgagttgctcagctttattttggatcatgtcttcattgaacaggatgatgataataatagtgcagatggtcagcaagaggatgaagccagtaaaattgaagctctgcacaagagaagaaatttacttgcagcattttgtaagctaattgtatatactgtggtggagatgaatacagctgcagatatcttcaaacagtatatgaagtattataatgactatggagatatcatcaaagaaacaatgagtaaaacaaggcagatagacaaaattcagtgtgctaagacccttattctcagtctgcaacagctttttaatgaaatgatacaagaaaatggctataattttgatagatcatcctctacatttagtggcataaaagaacttgctcgacgttttgctttaacttttggacttgatcagttgaaaacaagagaagccattgccatgctacacaaagatggcatagaatttgcttttaaagagcctaatccgcaaggggagagccatccacctttaaatttggcatttcttgatattctgagtgaattttcttctaaactacttcgacaagacaaaagaacagtgtatgtttacttggaaaagttcatgacctttcagatgtcactccgaagagaggatgtgtggcttccactgatgtcttaccgaaattctttgctagctggtggtgatgatgacaccatgtcagtcattagtggaatcagcagccgggggtcaacagtacggagtaaaaaatcaaaaccatctacaggaaaacggaaagtggttgagggcatgcagctttcactcactgaagaaagtagtagtagtgacagtatgtggttaagcagagaacaaacactgcacacccctgttatgatgcagacaccacaactcacctccactattatgagagagcccaaaagattacggcctgaggatagcttcatgagtgtttatccaatgcagactgaacatcatcaaacacctcttgattataatcggcgtggcacaagcctaatggaagatgatgaagagccaattgtggaagatgttatgatgtcctcagaagggaggattgaggatcttaatgagggaatggattttgacaccatggatatagatttgccaccatcaaagaacagacgagagagaacagaactgaagcctgatttctttgatccagcttcaattatggatgaatcagttcttggagtgtcaatgttttaataccagtacacaattaaatctgtggtgaagtcattttctaagtggaagaggaaattttaaagtgtggtagatacagtgaaattctgtacagatttttctctaaggagaatatgacatgcttatgcttaccaagatcaagtgcattgaggggcagttttgtttgcctgaataaacgtaaaggacaagtaaacaatttgatgataagctacagtttttcttagaaagtaaatattttatttatgcgctgttagttggcttttgaatcgattatttcatgcttttttttaaaaaaaaaaaaaacaaaataacaatctgaagaggcatttggtacagatatgaattctcttacatttatttactggttgtactaaataatgatgacctctgctggatttctgtttacatccagaaaacaatgttaaggatgtatttattcccctaccctgaagaaagtgtaggatagaattgtttttagcattctaaatttaaatgcttaaaacgtcaatcaacaaaactttgttttaaatattgtaattgtggagaaaagtaaacttataagcagaacttttacaattttttcatctaaaagtattttaagatatttttaaaatccaagagcttctctatacttttcagaaatatccagatgcagtgaactgccagaaggtaaccagtctcaaacatgcttatcccattatcaaccctgaaagtttgcttgtcctttaagataaaaatgtaatgttgtgatattccttccagtaatgccactgtattttgtctccaaataaaagaagcttattgtagtatgtttgcagaaaaattctaaacaaaaattatacagcttattagagtgtgggaatagggatctaaattttaaataaaattatatatatatataaattggtgctgattttataattgcgcagtttgtttagttttttcttacttttaaattccaacttaaaattatgaggtttcagaaatatattgaaagtttaacaatgtttaaaaatagaaaagcatgagtgttcatgctttaaaatgatttttaaatttgtattttatattgttttatctatctgtctttgcaagcagtcttcaggttaaagatacttctaacaggttacagtacatttcctctgtatgtaaattagatgggataatagaattcataacccataatattctttgaaagctaagctttaaacttcattttatgtcctttcacaaataaattagtttaaaacagaaagtggctacttgccattttgacatcaactcattttgcgaggcttaggcagctagacatcgtttaaaacaaaatattaacttatattacatgtgtatctatctattgtcagtcgtctctcagttcttgaggtatattattttaatcattccatgccttaatatgcttgcaatacaagaatatcttcagatgggtgaataccaaaaggctttcagtttttagtcagaaatcaagcattgggctgtggtagccaaaaaccataggttagctaaaaagatcatgatacaattattttattaagtcatggttaataacaaatgaatccagacttgtctaacagattttccatcaacaaatattgttatgtgcaaaagtattgcctatgttgttttacacaccactgcattaactagaactgctgagaggactgtatatatgattttaaacctaagttgattttttttctcactcttgaaaggagtacttctttgtgaaagcagttcttacagctttgttttcaaccagctaaaaatgttttatatattactctaacctgttgtcctccacattctattgtcctaattgtactgttttctgatttgtatttatgtcttgagacagtaactttttgaataaaaataaacctacagta

SEQ ID NO: 367880 - DNA, 6203 bp, Homo sapiens
tcaacatatgaaaaatcaatgtaatatttcatattaacagttggaagactcacaattcatagtttcagaatttacaacacaaacctacaggaataaagacaatgtagtattagaataaggtcagatatatagatcaatggacagaattgacagtccagaaatacacccatacgattacggtcacctgatttttgactaaggttccaaaacaattcactaggggaaagaatagtcttgtcaaaaaatggtgctcagacaagtggatagccataagcacagaatgagtttggacccctatctcaaatctcaaatacaaacattaactccgaattaatcaaatgcctaaatttaagagctaaaattttaaagctcttagaagaaaacataggtacacatctttgtgactttgaattaggtcacggtttccttgacatgacacttaaaagtacaagcaacaaaagaaaaaaatagataaaatgaacttcagcaaaattagaatgtttatgcttcagaaaacactgtgaagaaagtgatcagacaactcacagaatgggaaaaatatttgtgaatcatatctcttaataagggcccagcagaaaagggcaaaggtggaaatggaggaggaaaacctccttctggtccaaaccgaatgaatggtcatcaccaacagaatggagtggaaaacatgatgttgtttgaagttgttaaaatgggcaagagtgctatgcagtcggtggtagatgattggatagaatcatacaagcatgaccgagatatagcacttcttgaccttatcaacttttttattcagtgttcaggctgtaaaggagttgtcacagcagaaatgtttagacatatgcagaactctgagataattcgaaaaatgactgaagaattcgatgaggatagtggagattatccacttaccatggctggtcctcagtggaagaagttcaaatccagtttttgtgaattcattggcgtgttagtacggcaatgtcaatatagtatcatatatgatgagtatatgatggatacagtcatttcacttcttacaggattgtctgactcacaagtcagagcatttcgacatacaagcaccctggcagctatgaagttgatgacagctttggtgaatgtggcactaaatcttagcattaatatggataatacacaaagacaatatgaagcagaacggaataaaatgattggaaaacgagccaatgagaggctagaactcctgctacaaaagcggaaagagcttcaggaaaatcaagatgaaatagaaaatatgatgaatgcaatatttaaaggagtgtttgtacatagataccgtgatgcgatagctgaaattcgagctatttgcattgaagagattggcatttggatgaagatgtatagtgatgcctttcttaatgacagttatttaaaatatgttggttggactatgcatgataagcaaggtgaagtaagactcaaatgtcttactgctctacaagggctttattataacaaagagcttaattccaaactggaactttttaccagtcggttcaaggatagaattgtgtctatgacccttgacaaagaatatgatgttgcagtacaagcaataaaattactcactcttgttttacagagtagtgaagaagttctcactgcagaagattgtgaaaatgtctatcatctggtttattcagctcaccggccagtagcagtagcagctggagaatttctctacaaaaagctcttcagtcgtagagatccagaggaggatggaatgatgaaaagaagaggaagacaaggtccaaatgccaaccttgttaagacattggtttttttctttctagaaagtgagttacatgagcatgcagcataccttgtggatagcatgtgggactgtgctactgagctgctgaaagactgggaatgtatgaatagcttgttactggaagagccacttagtggagaggaagcactaacagataggcaagagagtgctctgattgaaataatgctttgtaccattagacaagcggctgaatgtcatcctcccgtgggaagagggacaggaaaaagggtgcttacagcaaaggagaagaagacacagttggatgataggacaaaaatcactgagctttttgccgtggcccttcctcagttattagcaaaatactctgtagatgcagaaaaggtgactaacttgttgcagttgcctcagtactttgatttggaaatatataccactggacgattagaaaagcatttggatgccttattgcgacagatccggaatattgtagagaagcacacagatacagatgttttggaagcatgttctaaaacttaccatgcactctgtaatgaagagttcacaatcttcaacagagtagatatttcaagaagtcaactgatagatgaattggcagataaatttaaccggcttcttgaagattttctgcaagagggtgaagaacctgatgaagatgatgcatatcaggtattgtcaacattgaagaggatcactgcttttcataatgcccatgacctttcaaagtgggatttatttgcttgtaattacaaactcttgaaaactggaatcgaaaatggagacatgcctgagcagattgttattcacgcactgcagtgtactcactatgtaatcctttggcaacttgctaagataactgaaagcagctctacaaaggaggacttgctgcgtttaaagaaacaaatgagagtattttgtcagatatgtcaacattacctgaccaacgtgaatactactgttaaggaacaggccttcactattctgtgtgatattttgatgatcttcagccatcagattatgtcaggagggcgtgacatgttagagccattagtgtatacccctgattcttcattgcagtctgagttgctcagctttattttggatcatgtcttcattgaacaggatgatgataataatagtgcagatggtcagcaagaggatgaagccagtaaaattgaagctctgcacaagagaagaaatttacttgcagcattttgtaagctaattgtatatactgtggtggagatgaatacagctgcagatatcttcaaacagtatatgaagtattataatgactatggagatatcatcaaagaaacaatgagtaaaacaaggcagatagacaaaattcagtgtgctaagacccttattctcagtctgcaacagctttttaatgaaatgatacaagaaaatggctataattttgatagatcatcctctacatttagtggcataaaagaacttgctcgacgttttgctttaacttttggacttgatcagttgaaaacaagagaagccattgccatgctacacaaagatggcatagaatttgcttttaaagagcctaatccgcaaggggagagccatccacctttaaatttggcatttcttgatattctgagtgaattttcttctaaactacttcgacaagacaaaagaacagtgtatgtttacttggaaaagttcatgacctttcagatgtcactccgaagagaggatgtgtggcttccactgatgtcttaccgaaattctttgctagctggtggtgatgatgacaccatgtcagtcattagtggaatcagcagccgggggtcaacagtacggagtaaaaaatcaaaaccatctacaggaaaacggaaagtggttgagggcatgcagctttcactcactgaagaaagtagtagtagtgacagtatgtggttaagcagagaacaaacactgcacacccctgttatgatgcagacaccacaactcacctccactattatgagagagcccaaaagattacggcctgaggatagcttcatgagtgtttatccaatgcagactgaacatcatcaaacacctcttgattataatcggcgtggcacaagcctaatggaagatgatgaagagccaattgtggaagatgttatgatgtcctcagaagggaggattgaggatcttaatgagggaatggattttgacaccatggatatagatttgccaccatcaaagaacagacgagagagaacagaactgaagcctgatttctttgatccagcttcaattatggatgaatcagttcttggagtgtcaatgttttaataccagtacacaattaaatctgtggtgaagtcattttctaagtggaagaggaaattttaaagtgtggtagatacagtgaaattctgtacagatttttctctaaggagaatatgacatgcttatgcttaccaagatcaagtgcattgaggggcagttttgtttgcctgaataaacgtaaaggacaagtaaacaatttgatgataagctacagtttttcttagaaagtaaatattttatttatgcgctgttagttggcttttgaatcgattatttcatgcttttttttaaaaaaaaaaaaaacaaaataacaatctgaagaggcatttggtacagatatgaattctcttacatttatttactggttgtactaaataatgatgacctctgctggatttctgtttacatccagaaaacaatgttaaggatgtatttattcccctaccctgaagaaagtgtaggatagaattgtttttagcattctaaatttaaatgcttaaaacgtcaatcaacaaaactttgttttaaatattgtaattgtggagaaaagtaaacttataagcagaacttttacaattttttcatctaaaagtattttaagatatttttaaaatccaagagcttctctatacttttcagaaatatccagatgcagtgaactgccagaaggtaaccagtctcaaacatgcttatcccattatcaaccctgaaagtttgcttgtcctttaagataaaaatgtaatgttgtgatattccttccagtaatgccactgtattttgtctccaaataaaagaagcttattgtagtatgtttgcagaaaaattctaaacaaaaattatacagcttattagagtgtgggaatagggatctaaattttaaataaaattatatatatatataaattggtgctgattttataattgcgcagtttgtttagttttttcttacttttaaattccaacttaaaattatgaggtttcagaaatatattgaaagtttaacaatgtttaaaaatagaaaagcatgagtgttcatgctttaaaatgatttttaaatttgtattttatattgttttatctatctgtctttgcaagcagtcttcaggttaaagatacttctaacaggttacagtacatttcctctgtatgtaaattagatgggataatagaattcataacccataatattctttgaaagctaagctttaaacttcattttatgtcctttcacaaataaattagtttaaaacagaaagtggctacttgccattttgacatcaactcattttgcgaggcttaggcagctagacatcgtttaaaacaaaatattaacttatattacatgtgtatctatctattgtcagtcgtctctcagttcttgaggtatattattttaatcattccatgccttaatatgcttgcaatacaagaatatcttcagatgggtgaataccaaaaggctttcagtttttagtcagaaatcaagcattgggctgtggtagccaaaaaccataggttagctaaaaagatcatgatacaattattttattaagtcatggttaataacaaatgaatccagacttgtctaacagattttccatcaacaaatattgttatgtgcaaaagtattgcctatgttgttttacacaccactgcattaactagaactgctgagaggactgtatatatgattttaaacctaagttgattttttttctcactcttgaaaggagtacttctttgtgaaagcagttcttacagctttgttttcaaccagctaaaaatgttttatatattactctaacctgttgtcctccacattctattgtcctaattgtactgttttctgatttgtatttatgtcttgagacagtaactttttgaataaaaataaacctacagtatgttgtatgttttctcttgtactcaaagggggagggtggctataaatggtttgcaaatttatatctattatcacatcttttaatgtgtttggggaataatttatagagaataccatcagtttatatttttaataaatcatatgtatttacaatgaaaccaaatc

SEQ ID NO: 367881 - DNA, 5955 bp, Homo sapiens
tcaacatatgaaaaatcaatgtaatatttcatattaacagttggaagactcacaattcatagtttcagaatttacaacacaaacctacaggaataaagacaatgtagtattagaataaggtcagatatatagatcaatggacagaattgacagtccagaaatacacccatacgattacggtcacctgatttttgactaaggttccaaaacaattcactaggggaaagaatagtcttgtcaaaaaatggtgctcagacaagtggatagccataagcacagaatgagtttggacccctatctcaaatctcaaatacaaacattaactccgaattaatcaaatgcctaaatttaagagctaaaattttaaagctcttagaagaaaacataggtacacatctttgtgactttgaattaggtcacggtttccttgacatgacacttaaaagtacaagcaacaaaagaaaaaaatagataaaatgaacttcagcaaaattagaatgtttatgcttcagaaaacactgtgaagaaagtgatcagacaactcacagaatgggaaaaatatttgtgaatcatatctcttaataagggcccagcagaaaagggcaaaggtggaaatggaggaggaaaacctccttctggtccaaaccgaatgaatggtcatcaccaacagaatggagtggaaaacatgatgttgtttgaagttgttaaaatgggcaagagtgctatgcagtcggtggtagatgattggatagaatcatacaagcatgaccgagatatagcacttcttgaccttatcaacttttttattcagtgttcaggctgtaaaggagttgtcacagcagaaatgtttagacatatgcagaactctgagataattcgaaaaatgactgaagaattcgatgaggatagtggagattatccacttaccatggctggtcctcagtggaagaagttcaaatccagtttttgtgaattcattggcgtgttagtacggcaatgtcaatatagtatcatatatgatgagtatatgatggatacagtcatttcacttcttacaggattgtctgactcacaagtcagagcatttcgacatacaagcaccctggcagctatgaagttgatgacagctttggtgaatgtggcactaaatcttagcattaatatggataatacacaaagacaatatgaagcagaacggaataaaatgattggaaaacgagccaatgagaggctagaactcctgctacaaaagcggaaagagcttcaggaaaatcaagatgaaatagaaaatatgatgaatgcaatatttaaaggagtgtttgtacatagataccgtgatgcgatagctgaaattcgagctatttgcattgaagagattggcatttggatgaagatgtatagtgatgcctttcttaatgacagttatttaaaatatgttggttggactatgcatgataagcaaggtgaagtaagactcaaatgtcttactgctctacaagggctttattataacaaagagcttaattccaaactggaactttttaccagtcggttcaaggatagaattgtgtctatgacccttgacaaagaatatgatgttgcagtacaagcaataaaattactcactcttgttttacagagtagtgaagaagttctcactgcagaagattgtgaaaatgtctatcatctggtttattcagctcaccggccagtagcagtagcagctggagaatttctctacaaaaagctcttcagtcgtagagatccagaggaggatggaatgatgaaaagaagaggaagacaaggtccaaatgccaaccttgttaagacattggtttttttctttctagaaagtgagttacatgagcatgcagcataccttgtggatagcatgtgggactgtgctactgagctgctgaaagactgggaatgtatgaatagcttgttactggaagagccacttagtggagaggaagcactaacagataggcaagagagtgctctgattgaaataatgctttgtaccattagacaagcggctgaatgtcatcctcccgtgggaagagggacaggaaaaagggtgcttacagcaaaggagaagaagacacagttggatgataggacaaaaatcactgagctttttgccgtggcccttcctcagttattagcaaaatactctgtagatgcagaaaaggtgactaacttgttgcagttgcctcagtactttgatttggaaatatataccactggacgattagaaaagcatttggatgccttattgcgacagatccggaatattgtagagaagcacacagatacagatgttttggaagcatgttctaaaacttaccatgcactctgtaatgaagagttcacaatcttcaacagagtagatatttcaagaagtcaactgatagatgaattggcagataaatttaaccggcttcttgaagattttctgcaagagggtgaagaacctgatgaagatgatgcatatcaggtattgtcaacattgaagaggatcactgcttttcataatgcccatgacctttcaaagtgggatttatttgcttgtaattacaaactcttgaaaactggaatcgaaaatggagacatgcctgagcagattgttattcacgcactgcagtgtactcactatgtaatcctttggcaacttgctaagataactgaaagcagctctacaaaggaggacttgctgcgtttaaagaaacaaatgagagtattttgtcagatatgtcaacattacctgaccaacgtgaatactactgttaaggaacaggccttcactattctgtgtgatattttgatgatcttcagccatcagattatgtcaggagggcgtgacatgttagagccattagtgtatacccctgattcttcattgcagtctgagttgctcagctttattttggatcatgtcttcattgaacaggatgatgataataatagtgcagatggtcagcaagaggatgaagccagtaaaattgaagctctgcacaagagaagaaatttacttgcagcattttgtaagctaattgtatatactgtggtggagatgaatacagctgcagatatcttcaaacagtatatgaagtattataatgactatggagatatcatcaaagaaacaatgagtaaaacaaggcagatagacaaaattcagtgtgctaagacccttattctcagtctgcaacagctttttaatgaaatgatacaagaaaatggctataattttgatagatcatcctctacatttagtggcataaaagaacttgctcgacgttttgctttaacttttggacttgatcagttgaaaacaagagaagccattgccatgctacacaaagatggcatagaatttgcttttaaagagcctaatccgcaaggggagagccatccacctttaaatttggcatttcttgatattctgagtgaattttcttctaaactacttcgacaagacaaaagaacagtgtatgtttacttggaaaagttcatgacctttcagatgtcactccgaagagaggatgtgtggcttccactgatgtcttaccgaaattctttgctagctggtggtgatgatgacaccatgtcagtcattagtggaatcagcagccgggggtcaacagtacggagtaaaaaatcaaaaccatctacaggaaaacggaaagtggttgagggcatgcagctttcactcactgaagaaagtagtagtagtgacagtatgtggttaagcagagaacaaacactgcacacccctgttatgatgcagacaccacaactcacctccactattatgagagagcccaaaagattacggcctgaggatagcttcatgagtgtttatccaatgcagactgaacatcatcaaacacctcttgattataatcggcgtggcacaagcctaatggaagatgatgaagagccaattgtggaagatgttatgatgtcctcagaagggaggattgaggatcttaatgagggaatggattttgacaccatggatatagatttgccaccatcaaagaacagacgagagagaacagaactgaagcctgatttctttgatccagcttcaattatggatgaatcagttcttggagtgtcaatgttttaataccagtacacaattaaatctgtggtgaagtcattttctaagtggaagaggaaattttaaagtgtggtagatacagtgaaattctgtacagatttttctctaaggagaatatgacatgcttatgcttaccaagatcaagtgcattgaggggcagttttgtttgcctgaataaacgtaaaggacaagtaaacaatttgatgataagctacagtttttcttagaaagtaaatattttatttatgcgctgttagttggcttttgaatcgattatttcatgcttttttttaaaaaaaaaaaaaacaaaataacaatctgaagaggcatttggtacagatatgaattctcttacatttatttactggttgtactaaataatgatgacctctgctggatttctgtttacatccagaaaacaatgttaaggatgtatttattcccctaccctgaagaaagtgtaggatagaattgtttttagcattctaaatttaaatgcttaaaacgtcaatcaacaaaactttgttttaaatattgtaattgtggagaaaagtaaacttataagcagaacttttacaattttttcatctaaaagtattttaagatatttttaaaatccaagagcttctctatacttttcagaaatatccagatgcagtgaactgccagaaggtaaccagtctcaaacatgcttatcccattatcaaccctgaaagtttgcttgtcctttaagataaaaatgtaatgttgtgatattccttccagtaatgccactgtattttgtctccaaataaaagaagcttattgtagtatgtttgcagaaaaattctaaacaaaaattatacagcttattagagtgtgggaatagggatctaaattttaaataaaattatatatatatataaattggtgctgattttataattgcgcagtttgtttagttttttcttacttttaaattccaacttaaaattatgaggtttcagaaatatattgaaagtttaacaatgtttacagtcttcaggttaaagatacttctaacaggttacagtacatttcctctgtatgtaaattagatgggataatagaattcataacccataatattctttgaaagctaagctttaaacttcattttatgtcctttcacaaataaattagtttaaaacagaaagtggctacttgccattttgacatcaactcattttgcgaggcttaggcagctagacatcgtttaaaacaaaatattaacttatattacatgtgtatctatctattgtcagtcgtctctcagttcttgaggtatattattttaatcattccatgccttaatatgcttgcaatacaagaatatcttcagatgggtgaataccaaaaggctttcagtttttagtcagaaatcaagcattgggctgtggtagccaaaaaccataggttagctaaaaagatcatgatacaattattttattaagtcatggttaataacaaatgaatccagacttgtctaacagattttccatcaacaaatattgttatgtgcaaaagtattgcctatgttgttttacacaccactgcattaactagaactgctgagaggactgtatatatgattttaaacctaagttgattttttttctcactcttgaaaggagtacttctttgtgaaagcagttcttacagctttgttttcaaccagctaaaaatgttttatatattactctaacctgttgtcctccacattctattgtcctaattgtactgttttctgatttgtatttatgtcttgagacagtaactttttgaataaaaataaacctacagta

SEQ ID NO: 367882 - DNA, 5722 bp, Homo sapiens
gcacgaactgagctgatccttgccccaggaattgtcttagaagaaagaaggcaagccaccattttacccacgtaaatatatgaatatatttctgacattgaggtgttccagaagatgataaagaaatgatagcagctccagaaataccaactgattttaatctactacaggagtcagaaacacatttttcttctgacacagattttgaagatatcgaaggaaaaaaccaaaagcaaggcaaaggcaaaacttgtaaaaaaggcaaaaagggcccagcagaaaagggcaaaggtggaaatggaggaggaaaacctccttctggtccaaaccgaatgaatggtcatcaccaacagaatggagtggaaaacatgatgttgtttgaagttgttaaaatgggcaagagtgctatgcagtcggtggtagatgattggatagaatcatacaagcatgaccgagatatagcacttcttgaccttatcaacttttttattcagtgttcaggctgtaaaggagttgtcacagcagaaatgtttagacatatgcagaactctgagataattcgaaaaatgactgaagaattcgatgaggatagtggagattatccacttaccatggctggtcctcagtggaagaagttcaaatccagtttttgtgaattcattggcgtgttagtacggcaatgtcaatatagtatcatatatgatgagtatatgatggatacagtcatttcacttcttacaggattgtctgactcacaagtcagagcatttcgacatacaagcaccctggcagctatgaagttgatgacagctttggtgaatgtggcactaaatcttagcattaatatggataatacacaaagacaatatgaagcagaacggaataaaatgattggaaaacgagccaatgagaggctagaactcctgctacaaaagcggaaagagcttcaggaaaatcaagatgaaatagaaaatatgatgaatgcaatatttaaaggagtgtttgtacatagataccgtgatgcgatagctgaaattcgagctatttgcattgaagagattggcatttggatgaagatgtatagtgatgcctttcttaatgacagttatttaaaatatgttggttggactatgcatgataagcaaggtgaagtaagactcaaatgtcttactgctctacaagggctttattataacaaagagcttaattccaaactggaactttttaccagtcggttcaaggatagaattgtgtctatgacccttgacaaagaatatgatgttgcagtacaagcaataaaattactcactcttgttttacagagtagtgaagaagttctcactgcagaagattgtgaaaatgtctatcatctggtttattcagctcaccggccagtagcagtagcagctggagaatttctctacaaaaagctcttcagtcgtagagatccagaggaggatggaatgatgaaaagaagaggaagacaaggtccaaatgccaaccttgttaagacattggtttttttctttctagaaagtgagttacatgagcatgcagcataccttgtggatagcatgtgggactgtgctactgagctgctgaaagactgggaatgtatgaatagcttgttactggaagagccacttagtggagaggaagcactaacagataggcaagagagtgctctgattgaaataatgctttgtaccattagacaagcggctgaatgtcatcctcccgtgggaagagggacaggaaaaagggtgcttacagcaaaggagaagaagacacagttggatgataggacaaaaatcactgagctttttgccgtggcccttcctcagttattagcaaaatactctgtagatgcagaaaaggtgactaacttgttgcagttgcctcagtactttgatttggaaatatataccactggacgattagaaaagcatttggatgccttattgcgacagatccggaatattgtagagaagcacacagatacagatgttttggaagcatgttctaaaacttaccatgcactctgtaatgaagagttcacaatcttcaacagagtagatatttcaagaagtcaactgatagatgaattggcagataaatttaaccggcttcttgaagattttctgcaagagggtgaagaacctgatgaagatgatgcatatcaggtattgtcaacattgaagaggatcactgcttttcataatgcccatgacctttcaaagtgggatttatttgcttgtaattacaaactcttgaaaactggaatcgaaaatggagacatgcctgagcagattgttattcacgcactgcagtgtactcactatgtaatcctttggcaacttgctaagataactgaaagcagctctacaaaggaggacttgctgcgtttaaagaaacaaatgagagtattttgtcagatatgtcaacattacctgaccaacgtgaatactactgttaaggaacaggccttcactattctgtgtgatattttgatgatcttcagccatcagattatgtcaggagggcgtgacatgttagagccattagtgtatacccctgattcttcattgcagtctgagttgctcagctttattttggatcatgtcttcattgaacaggatgatgataataatagtgcagatggtcagcaagaggatgaagccagtaaaattgaagctctgcacaagagaagaaatttacttgcagcattttgtaagctaattgtatatactgtggtggagatgaatacagctgcagatatcttcaaacagtatatgaagtattataatgactatggagatatcatcaaagaaacaatgagtaaaacaaggcagatagacaaaattcagtgtgctaagacccttattctcagtctgcaacagctttttaatgaaatgatacaagaaaatggctataattttgatagatcatcctctacatttagtggcataaaagaacttgctcgacgttttgctttaacttttggacttgatcagttgaaaacaagagaagccattgccatgctacacaaagatggcatagaatttgcttttaaagagcctaatccgcaaggggagagccatccacctttaaatttggcatttcttgatattctgagtgaattttcttctaaactacttcgacaagacaaaagaacagtgtatgtttacttggaaaagttcatgacctttcagatgtcactccgaagagaggatgtgtggcttccactgatgtcttaccgaaattctttgctagctggtggtgatgatgacaccatgtcagtcattagtggaatcagcagccgggggtcaacagtacggagtaaaaaatcaaaaccatctacaggaaaacggaaagtggttgagggcatgcagctttcactcactgaagaaagtagtagtagtgacagtatgtggttaagcagagaacaaacactgcacacccctgttatgatgcagacaccacaactcacctccactattatgagagagcccaaaagattacggcctgaggatagcttcatgagtgtttatccaatgcagactgaacatcatcaaacacctcttgattataatcggcgtggcacaagcctaatggaagatgatgaagagccaattgtggaagatgttatgatgtcctcagaagggaggattgaggatcttaatgagggaatggattttgacaccatggatatagatttgccaccatcaaagaacagacgagagagaacagaactgaagcctgatttctttgatccagcttcaattatggatgaatcagttcttggagtgtcaatgttttaataccagtacacaattaaatctgtggtgaagtcattttctaagtggaagaggaaattttaaagtgtggtagatacagtgaaattctgtacagatttttctctaaggagaatatgacatgcttatgcttaccaagatcaagtgcattgaggggcagttttgtttgcctgaataaacgtaaaggacaagtaaacaatttgatgataagctacagtttttcttagaaagtaaatattttatttatgcgctgttagttggcttttgaatcgattatttcatgcttttttttaaaaaaaaaaaaaacaaaataacaatctgaagaggcatttggtacagatatgaattctcttacatttatttactggttgtactaaataatgatgacctctgctggatttctgtttacatccagaaaacaatgttaaggatgtatttattcccctaccctgaagaaagtgtaggatagaattgtttttagcattctaaatttaaatgcttaaaacgtcaatcaacaaaactttgttttaaatattgtaattgtggagaaaagtaaacttataagcagaacttttacaattttttcatctaaaagtattttaagatatttttaaaatccaagagcttctctatacttttcagaaatatccagatgcagtgaactgccagaaggtaaccagtctcaaacatgcttatcccattatcaaccctgaaagtttgcttgtcctttaagataaaaatgtaatgttgtgatattccttccagtaatgccactgtattttgtctccaaataaaagaagcttattgtagtatgtttgcagaaaaattctaaacaaaaattatacagcttattagagtgtgggaatagggatctaaattttaaataaaattatatatatatataaattggtgctgattttataattgcgcagtttgtttagttttttcttacttttaaattccaacttaaaattatgaggtttcagaaatatattgaaagtttaacaatgtttaaaaatagaaaagcatgagtgttcatgctttaaaatgatttttaaatttgtattttatattgttttatctatctgtctttgcaagcagtcttcaggttaaagatacttctaacaggttacagtacatttcctctgtatgtaaattagatgggataatagaattcataacccataatattctttgaaagctaagctttaaacttcattttatgtcctttcacaaataaattagtttaaaacagaaagtggctacttgccattttgacatcaactcattttgcgaggcttaggcagctagacatcgtttaaaacaaaatattaacttatattacatgtgtatctatctattgtcagtcgtctctcagttcttgaggtatattattttaatcattccatgccttaatatgcttgcaatacaagaatatcttcagatgggtgaataccaaaaggctttcagtttttagtcagaaatcaagcattgggctgtggtagccaaaaaccataggttagctaaaaagatcatgatacaattattttattaagtcatggttaataacaaatgaatccagacttgtctaacagattttccatcaacaaatattgttatgtgcaaaagtattgcctatgttgttttacacaccactgcattaactagaactgctgagaggactgtatatatgattttaaacctaagttgattttttttctcactcttgaaaggagtacttctttgtgaaagcagttcttacagctttgttttcaaccagctaaaaatgttttatatattactctaacctgttgtcctccacattctattgtcctaattgtactgttttctgatttgtatttatgtcttgagacagtaactttttgaataaaaataaacctacagta

SEQ ID NO: 367883 - DNA, 5905 bp, Homo sapiens
ctgcttctcccccgccccatcatctccagcgcgtggtgggggaactgctggggaaggcgattggcatcgatctctccatcccttccgaggcccgacttcggaattgtcttagaagaaagaaggcaagccaccattttacccacgtaaatatatgaatatatttctgacattgaggtgttccagaagatgataaagaaatgatagcagctccagaaataccaactgattttaatctactacaggagtcagaaacacatttttcttctgacacagattttgaagatatcgaaggaaaaaaccaaaagcaaggcaaaggcaaaacttgtaaaaaaggcaaaaagggcccagcagaaaagggcaaaggtggaaatggaggaggaaaacctccttctggtccaaaccgaatgaatggtcatcaccaacagaatggagtggaaaacatgatgttgtttgaagttgttaaaatgggcaagagtgctatgcagtcggtggtagatgattggatagaatcatacaagcatgaccgagatatagcacttcttgaccttatcaacttttttattcagtgttcaggctgtaaaggagttgtcacagcagaaatgtttagacatatgcagaactctgagataattcgaaaaatgactgaagaattcgatgaggatagtggagattatccacttaccatggctggtcctcagtggaagaagttcaaatccagtttttgtgaattcattggcgtgttagtacggcaatgtcaatatagtatcatatatgatgagtatatgatggatacagtcatttcacttcttacaggattgtctgactcacaagtcagagcatttcgacatacaagcaccctggcagctatgaagttgatgacagctttggtgaatgtggcactaaatcttagcattaatatggataatacacaaagacaatatgaagcagaacggaataaaatgattggaaaacgagccaatgagaggctagaactcctgctacaaaagcggaaagagcttcaggaaaatcaagatgaaatagaaaatatgatgaatgcaatatttaaaggagtgtttgtacatagataccgtgatgcgatagctgaaattcgagctatttgcattgaagagattggcatttggatgaagatgtatagtgatgcctttcttaatgacagttatttaaaatatgttggttggactatgcatgataagcaaggtgaagtaagactcaaatgtcttactgctctacaagggctttattataacaaagagcttaattccaaactggaactttttaccagtcggttcaaggatagaattgtgtctatgacccttgacaaagaatatgatgttgcagtacaagcaataaaattactcactcttgttttacagagtagtgaagaagttctcactgcagaagattgtgaaaatgtctatcatctggtttattcagctcaccggccagtagcagtagcagctggagaatttctctacaaaaagctcttcagtcgtagagatccagaggaggatggaatgatgaaaagaagaggaagacaaggtccaaatgccaaccttgttaagacattggtttttttctttctagaaagtgagttacatgagcatgcagcataccttgtggatagcatgtgggactgtgctactgagctgctgaaagactgggaatgtatgaatagcttgttactggaagagccacttagtggagaggaagcactaacagataggcaagagagtgctctgattgaaataatgctttgtaccattagacaagcggctgaatgtcatcctcccgtgggaagagggacaggaaaaagggtgcttacagcaaaggagaagaagacacagttggatgataggacaaaaatcactgagctttttgccgtggcccttcctcagttattagcaaaatactctgtagatgcagaaaaggtgactaacttgttgcagttgcctcagtactttgatttggaaatatataccactggacgattagaaaagcatttggatgccttattgcgacagatccggaatattgtagagaagcacacagatacagatgttttggaagcatgttctaaaacttaccatgcactctgtaatgaagagttcacaatcttcaacagagtagatatttcaagaagtcaactgatagatgaattggcagataaatttaaccggcttcttgaagattttctgcaagagggtgaagaacctgatgaagatgatgcatatcaggtattgtcaacattgaagaggatcactgcttttcataatgcccatgacctttcaaagtgggatttatttgcttgtaattacaaactcttgaaaactggaatcgaaaatggagacatgcctgagcagattgttattcacgcactgcagtgtactcactatgtaatcctttggcaacttgctaagataactgaaagcagctctacaaaggaggacttgctgcgtttaaagaaacaaatgagagtattttgtcagatatgtcaacattacctgaccaacgtgaatactactgttaaggaacaggccttcactattctgtgtgatattttgatgatcttcagccatcagattatgtcaggagggcgtgacatgttagagccattagtgtatacccctgattcttcattgcagtctgagttgctcagctttattttggatcatgtcttcattgaacaggatgatgataataatagtgcagatggtcagcaagaggatgaagccagtaaaattgaagctctgcacaagagaagaaatttacttgcagcattttgtaagctaattgtatatactgtggtggagatgaatacagctgcagatatcttcaaacagtatatgaagtattataatgactatggagatatcatcaaagaaacaatgagtaaaacaaggcagatagacaaaattcagtgtgctaagacccttattctcagtctgcaacagctttttaatgaaatgatacaagaaaatggctataattttgatagatcatcctctacatttagtggcataaaagaacttgctcgacgttttgctttaacttttggacttgatcagttgaaaacaagagaagccattgccatgctacacaaagatggcatagaatttgcttttaaagagcctaatccgcaaggggagagccatccacctttaaatttggcatttcttgatattctgagtgaattttcttctaaactacttcgacaagacaaaagaacagtgtatgtttacttggaaaagttcatgacctttcagatgtcactccgaagagaggatgtgtggcttccactgatgtcttaccgaaattctttgctagctggtggtgatgatgacaccatgtcagtcattagtggaatcagcagccgggggtcaacagtacggagtaaaaaatcaaaaccatctacaggaaaacggaaagtggttgagggcatgcagctttcactcactgaagaaagtagtagtagtgacagtatgtggttaagcagagaacaaacactgcacacccctgttatgatgcagacaccacaactcacctccactattatgagagagcccaaaagattacggcctgaggatagcttcatgagtgtttatccaatgcagactgaacatcatcaaacacctcttgattataacacgcaggtaacatggatgttagctcaaagacaacaagaggaagcaaggcaacagcaggagagagcagcaatgagctatgttaaactgcgaactaatcttcagcatgccattcggcgtggcacaagcctaatggaagatgatgaagagccaattgtggaagatgttatgatgtcctcagaagggaggattgaggatcttaatgagggaatggattttgacaccatggatatagatttgccaccatcaaagaacagacgagagagaacagaactgaagcctgatttctttgatccagcttcaattatggatgaatcagttcttggagtgtcaatgttttaataccagtacacaattaaatctgtggtgaagtcattttctaagtggaagaggaaattttaaagtgtggtagatacagtgaaattctgtacagatttttctctaaggagaatatgacatgcttatgcttaccaagatcaagtgcattgaggggcagttttgtttgcctgaataaacgtaaaggacaagtaaacaatttgatgataagctacagtttttcttagaaagtaaatattttatttatgcgctgttagttggcttttgaatcgattatttcatgcttttttttaaaaaaaaaaaaaacaaaataacaatctgaagaggcatttggtacagatatgaattctcttacatttatttactggttgtactaaataatgatgacctctgctggatttctgtttacatccagaaaacaatgttaaggatgtatttattcccctaccctgaagaaagtgtaggatagaattgtttttagcattctaaatttaaatgcttaaaacgtcaatcaacaaaactttgttttaaatattgtaattgtggagaaaagtaaacttataagcagaacttttacaattttttcatctaaaagtattttaagatatttttaaaatccaagagcttctctatacttttcagaaatatccagatgcagtgaactgccagaaggtaaccagtctcaaacatgcttatcccattatcaaccctgaaagtttgcttgtcctttaagataaaaatgtaatgttgtgatattccttccagtaatgccactgtattttgtctccaaataaaagaagcttattgtagtatgtttgcagaaaaattctaaacaaaaattatacagcttattagagtgtgggaatagggatctaaattttaaataaaattatatatatatataaattggtgctgattttataattgcgcagtttgtttagttttttcttacttttaaattccaacttaaaattatgaggtttcagaaatatattgaaagtttaacaatgtttaaaaatagaaaagcatgagtgttcatgctttaaaatgatttttaaatttgtattttatattgttttatctatctgtctttgcaagcagtcttcaggttaaagatacttctaacaggttacagtacatttcctctgtatgtaaattagatgggataatagaattcataacccataatattctttgaaagctaagctttaaacttcattttatgtcctttcacaaataaattagtttaaaacagaaagtggctacttgccattttgacatcaactcattttgcgaggcttaggcagctagacatcgtttaaaacaaaatattaacttatattacatgtgtatctatctattgtcagtcgtctctcagttcttgaggtatattattttaatcattccatgccttaatatgcttgcaatacaagaatatcttcagatgggtgaataccaaaaggctttcagtttttagtcagaaatcaagcattgggctgtggtagccaaaaaccataggttagctaaaaagatcatgatacaattattttattaagtcatggttaataacaaatgaatccagacttgtctaacagattttccatcaacaaatattgttatgtgcaaaagtattgcctatgttgttttacacaccactgcattaactagaactgctgagaggactgtatatatgattttaaacctaagttgattttttttctcactcttgaaaggagtacttctttgtgaaagcagttcttacagctttgttttcaaccagctaaaaatgttttatatattactctaacctgttgtcctccacattctattgtcctaattgtactgttttctgatttgtatttatgtcttgagacagtaactttttgaataaaaataaacctacagta

SEQ ID NO: 367884 - DNA, 2747 bp, Homo sapiens
aaatacggctagtaagaggcccggttactcggacgaggtcgaacacaagagattaacattgccatgctacacaaagatggcatagaatttgcttttaaagagcctaatccgcaaggggagagccatccacctttaaatttggcatttcttgatattctgagtgaattttcttctaaactacttcgacaagacaaaagaacagtgtatgtttacttggaaaagttcatgacctttcagatgtcactccgaagagaggatgtgtggcttccactgatgtcttaccgaaattctttgctagctggtggtgatgatgacaccatgtcagtcattagtggaatcagcagccgggggtcaacagtacggagtaaaaaatcaaaaccatctacaggaaaacggaaagtggttgagggcatgcagctttcactcactgaagaaagtagtagtagtgacagtatgtggttaagcagagaacaaacactgcacacccctgttatgatgcagacaccacaactcacctccactattatgagagagcccaaaagattacggcctgaggatagcttcatgagtgtttatccaatgcagactgaacatcatcaaacacctcttgattataatcggcgtggcacaagcctaatggaagatgatgaagagccaattgtggaagatgttatgatgtcctcagaagggaggattgaggatcttaatgagggaatggattttgacaccatggatatagatttgccaccatcaaagaacagacgagagagaacagaactgaagcctgatttctttgatccagcttcaattatggatgaatcagttcttggagtgtcaatgttttaataccagtacacaattaaatctgtggtgaagtcattttctaagtggaagaggaaattttaaagtgtggtagatacagtgaaattctgtacagatttttctctaaggagaatatgacatgcttatgcttaccaagatcaagtgcattgaggggcagttttgtttgcctgaataaacgtaaaggacaagtaaacaatttgatgataagctacagtttttcttagaaagtaaatattttatttatgcgctgttagttggcttttgaatcgattatttcatgcttttttttaaaaaaaaaaaaaacaaaataacaatctgaagaggcatttggtacagatatgaattctcttacatttatttactggttgtactaaataatgatgacctctgctggatttctgtttacatccagaaaacaatgttaaggatgtatttattcccctaccctgaagaaagtgtaggatagaattgtttttagcattctaaatttaaatgcttaaaacgtcaatcaacaaaactttgttttaaatattgtaattgtggagaaaagtaaacttataagcagaacttttacaattttttcatctaaaagtattttaagatatttttaaaatccaagagcttctctatacttttcagaaatatccagatgcagtgaactgccagaaggtaaccagtctcaaacatgcttatcccattatcaaccctgaaagtttgcttgtcctttaagataaaaatgtaatgttgtgatattccttccagtaatgccactgtattttgtctccaaataaaagaagcttattgtagtatgtttgcagaaaaattctaaacaaaaattatacagcttattagagtgtgggaatagggatctaaattttaaataaaattatatatatatataaattggtgctgattttataattgcgcagtttgtttagttttttcttacttttaaattccaacttaaaattatgaggtttcagaaatatattgaaagtttaacaatgtttaaaaatagaaaagcatgagtgttcatgctttaaaatgatttttaaatttgtattttatattgttttatctatctgtctttgcaagcagtcttcaggttaaagatacttctaacaggttacagtacatttcctctgtatgtaaattagatgggataatagaattcataacccataatattctttgaaagctaagctttaaacttcattttatgtcctttcacaaataaattagtttaaaacagaaagtggctacttgccattttgacatcaactcattttgcgaggcttaggcagctagacatcgtttaaaacaaaatattaacttatattacatgtgtatctatctattgtcagtcgtctctcagttcttgaggtatattattttaatcattccatgccttaatatgcttgcaatacaagaatatcttcagatgggtgaataccaaaaggctttcagtttttagtcagaaatcaagcattgggctgtggtagccaaaaaccataggttagctaaaaagatcatgatacaattattttattaagtcatggttaataacaaatgaatccagacttgtctaacagattttccatcaacaaatattgttatgtgcaaaagtattgcctatgttgttttacacaccactgcattaactagaactgctgagaggactgtatatatgattttaaacctaagttgattttttttctcactcttgaaaggagtacttctttgtgaaagcagttcttacagctttgttttcaaccagctaaaaatgttttatatattactctaacctgttgtcctccacattctattgtcctaattgtactgttttctgatttgtatttatgtcttgagacagtaactttttgaataaaaataaacctacagta

SEQ ID NO: 367885 - DNA, 5036 bp, Homo sapiens
tcaacatatgaaaaatcaatgtaatatttcatattaacagttggaagactcacaattcatagtttcagaatttacaacacaaacctacaggaataaagacaatgtagtattagaataaggtcagatatatagatcaatggacagaattgacagtccagaaatacacccatacgattacggtcacctgatttttgactaaggttccaaaacaattcactaggggaaagaatagtcttgtcaaaaaatggtgctcagacaagtggatagccataagcacagaatgagtttggacccctatctcaaatctcaaatacaaacattaactccgaattaatcaaatgcctaaatttaagagctaaaattttaaagctcttagaagaaaacataggtacacatctttgtgactttgaattaggtcacggtttccttgacatgacacttaaaagtacaagcaacaaaagaaaaaaatagataaaatgaacttcagcaaaattagaatgtttatgcttcagaaaacactgtgaagaaagtgatcagacaactcacagaatgggaaaaatatttgtgaatcatatctcttaataagggcccagcagaaaagggcaaaggtggaaatggaggaggaaaacctccttctggtccaaaccgaatgaatggtcatcaccaacagaatggagtggaaaacatgatgttgtttgaagttgttaaaatgggcaagagtgctatgcagtcggtggtagatgattggatagaatcatacaagcatgaccgagatatagcacttcttgaccttatcaacttttttattcagtgttcaggctgtaaaggagttgtcacagcagaaatgtttagacatatgcagaactctgagataattcgaaaaatgactgaagaattcgatgaggatagtggagattatccacttaccatggctggtcctcagtggaagaagttcaaatccagtttttgtgaattcattggcgtgttagtacggcaatgtcaatatagtatcatatatgatgagtatatgatggatacagtcatttcacttcttacaggattgtctgactcacaagtcagagcatttcgacatacaagcaccctggcagctatgaagttgatgacagctttggtgaatgtggcactaaatcttagcattaatatggataatacacaaagacaatatgaagcagaacggaataaaatgattggaaaacgagccaatgagaggctagaactcctgctacaaaagcggaaagagcttcaggaaaatcaagatgaaatagaaaatatgatgaatgcaatatttaaaggagtgtttgtacatagataccgtgatgcgatagctgaaattcgagctatttgcattgaagagattggcatttggatgaagatgtatagtgatgcctttcttaatgacagttatttaaaatatgttggttggactatgcatgataagcaaggtgaagtaagactcaaatgtcttactgctctacaagggctttattataacaaagagcttaattccaaactggaactttttaccagtcggttcaaggatagaattgtgtctatgacccttgacaaagaatatgatgttgcagtacaagcaataaaattactcactcttgttttacagagtagtgaagaagttctcactgcagaagattgtgaaaatgtctatcatctggtttattcagctcaccggccagtagcagtagcagctggagaatttctctacaaaaagctcttcagtcgtagagatccagaggaggatggaatgatgaaaagaagaggaagacaaggtccaaatgccaaccttgttaagacattggtttttttctttctagaaagtgagttacatgagcatgcagcataccttgtggatagcatgtgggactgtgctactgagctgctgaaagactgggaatgtatgaatagcttgttactggaagagccacttagtggagaggaagcactaacagataggcaagagagtgctctgattgaaataatgctttgtaccattagacaagcggctgaatgtcatcctcccgtgggaagagggacaggaaaaagggtgcttacagcaaaggagaagaagacacagttggatgataggacaaaaatcactgagctttttgccgtggcccttcctcagttattagcaaaatactctgtagatgcagaaaaggtgactaacttgttgcagttgcctcagtactttgatttggaaatatataccactggacgattagaaaagcatttggatgccttattgcgacagatccggaatattgtagagaagcacacagatacagatgttttggaagcatgttctaaaacttaccatgcactctgtaatgaagagttcacaatcttcaacagagtagatatttcaagaagtcaactgatagatgaattggcagataaatttaaccggcttcttgaagattttctgcaagagggtgaagaacctgatgaagatgatgcatatcaggtattgtcaacattgaagaggatcactgcttttcataatgcccatgacctttcaaagtgggatttatttgcttgtaattacaaactcttgaaaactggaatcgaaaatggagacatgcctgagcagattgttattcacgcactgcagtgtactcactatgtaatcctttggcaacttgctaagataactgaaagcagctctacaaaggaggacttgctgcgtttaaagaaacaaatgagagtattttgtcagatatgtcaacattacctgaccaacgtgaatactactgttaaggaacaggccttcactattctgtgtgatattttgatgatcttcagccatcagattatgtcaggagggcgtgacatgttagagccattagtgtatacccctgattcttcattgcagtctgagttgctcagctttattttggatcatgtcttcattgaacaggatgatgataataatagtgcagatggtcagcaagaggatgaagccagtaaaattgaagctctgcacaagagaagaaatttacttgcagcattttgtaagctaattgtatatactgtggtggagatgaatacagctgcagatatcttcaaacagtatatgaagtattataatgactatggagatatcatcaaagaaacaatgagtaaaacaaggcagatagacaaaattcagtgtgctaagacccttattctcagtctgcaacagctttttaatgaaatgatacaagaaaatggctataattttgatagatcatcctctacatttagtggcataaaagaacttgctcgacgttttgctttaacttttggacttgatcagttgaaaacaagagaagccattgccatgctacacaaagatggcatagaatttgcttttaaagagcctaatccgcaaggggagagccatccacctttaaatttggcatttcttgatattctgagtgaattttcttctaaactacttcgacaagacaaaagaacagtgtatgtttacttggaaaagttcatgacctttcagatgtcactccgaagagaggatgtgtggcttccactgatgtcttaccgaaattctttgctagctggtggtgatgatgacaccatgtcagtcattagtggaatcagcagccgggggtcaacagtacggagtaaaaaatcaaaaccatctacaggaaaacggaaagtggttgagggcatgcagctttcactcactgaagaaagtagtagtagtgacagtatgtggttaagcagagaacaaacactgcacacccctgttatgatgcagacaccacaactcacctccactattatgagagagcccaaaagattacggcctgaggatagcttcatgagtgtttatccaatgcagactgaacatcatcaaacacctcttgattataatcggcgtggcacaagcctaatggaagatgatgaagagccaattgtggaagatgttatgatgtcctcagaagggaggattgaggatcttaatgagggaatggattttgacaccatggatatagatttgccaccatcaaagaacagacgagagagaacagaactgaagcctgatttctttgatccagcttcaattatggatgaatcagttcttggagtgtcaatgttttaataccagtacacaattaaatctgtggtgaagtcattttctaagtggaagaggaaattttaaagtgtggtagatacagtgaaattctgtacagatttttctctaaggagaatatgacatgcttatgcttaccaagatcaagtgcattgaggggcagttttgtttgcctgaataaacgtaaaggacaagtaaacaatttgatgataagctacagtttttcttagaaagtaaatattttatttatgcgctgttagttggcttttgaatcgattatttcatgcttttttttaaaaaaaaaaaaaacaaaataacaatctgaagaggcatttggtacagatatgaattctcttacatttatttactggttgtactaaataatgatgacctctgctggatttctgtttacatccagaaaacaatgttaaggatgtatttattcccctaccctgaagaaagtgtaggatagaattgtttttagcattctaaatttaaatgcttaaaacgtcaatcaacaaaactttgttttaaatattgtaattgtggagaaaagtaaacttataagcagaacttttacaattttttcatctaaaagtattttaagatatttttaaaatccaagagcttctctatacttttcagaaatatccagatgcagtgaactgccagaaggtaaccagtctcaaacatgcttatcccattatcaaccctgaaagtttgcttgtcctttaagataaaaatgtaatgttgtgatattccttccagtaatgccactgtattttgtctccaaataaaagaagcttattgtagtatgtttgcagaaaaattctaaacaaaaattatacagcttattagagtgtgggaatagggatctaaattttaaataaaattatatatatatata

SEQ ID NO: 367886 - DNA, 341 bp, Homo sapiens
ggaagcttttcctatattcccatcttgataatttgatgcggttgtgacttgggtgtcacattgacaacccttttgtagccatcctctccttcactgggaattcatttgttagtccttggtattctaaatattatgtagcatctcagggaatttttcttgcggtccatgctaggtaatgcttttccatgttctcttctcacctacgctggatggagtttgagtgcatgtctggcagtgagtgtcatttctcagttctggttcaagctgataccctagtgtcatcattcttgatgactcagcaggtattacaggcatgtagggaaacctgactcttggtaact

SEQ ID NO: 367887 - DNA, 182 bp, Homo sapiens
aattcaagcttctaacgatgtacggggacatgctttcccttgttactgttggagaaactcaaaccttcaagccctaggtgtagccattttgtcaagtcatcaactgtatttttgtactggcattaacaaaaaaagagataaaatattgtaccattaaactttaataaaactttaaaaggaaa

SEQ ID NO: 367888 - DNA, 1459 bp, Homo sapiens
tacgaggcctgggtgttgaaatcggccgaggggaagtagaggtgttgtgctgagcggcgctcggcgaactgtgtggaccgtctgctgggactccggccctgcgtccgctcagccccgtggccccgcgcacctactgccatggagacgcggcctcgtctcggggccacctgtttgctgggcttcagtttcctgctcctcgtcatctcttctgatggacataatgggcttggaaagggttttggagatcatattcattggaggacactggaagatgggaagaaagaagcagctgccagtggactgcccctgatggtgattattcataaatcctggtgtggagcttgcaaagctctaaagcccaaatttgcagaatctacggaaatttcagaactctcccataattttgttatggtaaatcttgaggatgaagaggaacccaaagatgaagatttcagccctgacgggggttatattccacgaatcctttttctggatcccagtggcaaggtgcatcctgaaatcatcaatgagaatggaaaccccagctacaagtatttttatgtcagtgccgagcaagttgttcaggggatgaaggaagctcaggaaaggctgacgggtgatgccttcagaaagaaacatcttgaagatgaattgtaacatgaatgtgccccttctttcatcagagttagtgttctggaaggaaagcagcagggaagggaatattgaggaatcatctagaacaattaagccgaccaggaaacctcattcctacctacactggaaggagcgctctcactgtggaagagttctgctaacagaagctggtctgcatgtttgtggatccagcggagagtggcagactttcttctccttttccctctcacctaaatgtcaacttgtcattgaatgtaaagaatgaaaccttctgacacaaaacttgagccacttggatgtttactcctcgcacttaagtatttgagtcttttcccatttcctcccactttactcaccttagtggtgaaaggagactagtagcatcttttctacaacgttaaaattgcagaagtagcttatcattaaaaaacaacaacaacaacaataacaataaatcctaagtgtaaatcagttattctaccccctaccaaggatatcagcctgttttttcccttttttctcctgggaataattgtgggcttcttcccaaatttctacagcctctttcctcttctcatgcttgagcttccctgtttgcacgcatgcgtgtgcaggactggctgtgtgcttggactcggctccaggtggaagcatgctttcccttgttactgttggagaaactcaaaccttcaagccctaggtgtagccattttgtcaagtcatcaactgtatttttgtactggcattaacaaaaaaagagataaaatattgtaccattaaactttaataaaactttaaaaggaaa

SEQ ID NO: 367889 - DNA, 2464 bp, Homo sapiens
tgcgcatccctcttagtgctagtggcggcaggtgcaggtggccgcgcggcatcctggggattgcagtctcccgagcgttctattgtgtccctgcctacaattttagggaacctaataaaagggtggtcggtatgtttttatttgggtgtgtacttttgttaggtcgctttttcgctatgcattaagtacggactttaggactcaactagtaccaggaagaaaaagaccggacattttcacctgtttgttatacagcgaaggggaaaaattgggaagaaatcctcaagctacaagaaaaataaccagaagctttacactttagcctgcagtgacttatatcctggtgtcctaagtccacctaagtcagttttgcaataagaggtcccaagtttggttttcttggagcttgcatcagttggttgcatcatccctgagtagaagatttgcggttgcaaggaaaaataaggtacagagcttctccagcgggaaagtgcatgtctgcacggcacgagcccacgcaccgcagaacaggcttgccaggtctcctcagagaccctcgcaggaacctaacaatgaaatccagttgtccagtcttgatttgtggaggggtaaggagaatccgaggccagtgggcaatccgcccactgttgggagcgactgacctcacgaatcaataatttgcttttgactaggaagtgcagcggttcttggggggaggggctggactgggtggcggacgcgaggagcaacggttctcccgaacctctcccccgcccctactatcttggcctacatattcccgctccgtcccgggacctggacacccagaatccacgaaaagcaactcgcgctcgagaacagctctcgtacccttctacgtgatctgcacctttaagctcactccatcccaaaccggaccccggaggcaccacccacatccgtctaacatcacttccttcagagtttgaaaaaaaaaaatctgggaagtagaggtgttgtgctgagcggcgctcggcgaactgtgtggaccgtctgctgggactccggccctgcgtccgctcagccccgtggccccgcgcacctactgccatggagacgcggcctcgtctcggggccacctgtttgctgggcttcagtttcctgctcctcgtcatctcttctgatggacataatgggcttggaaagggttttggagatcatattcattggaggacactggaagatgggaagaaagaagcagctgccagtggactgcccctgatggtgattattcataaatcctggtgtggagcttgcaaagctctaaagcccaaatttgcagaatctacggaaatttcagaactctcccataattttgttatggtaaatcttgaggatgaagaggaacccaaagatgaagatttcagccctgacgggggttatattccacgaatcctttttctggatcccagtggcaaggtgcatcctgaaatcatcaatgagaatggaaaccccagctacaagtatttttatgtcagtgccgagcaagttgttcaggggatgaaggaagctcaggaaaggctgacgggtgatgccttcagaaagaaacatcttgaagatgaattgtaacatgaatgtgccccttctttcatcagagttagtgttctggaaggaaagcagcagggaagggaatattgaggaatcatctagaacaattaagccgaccaggaaacctcattcctacctacactggaaggagcgctctcactgtggaagagttctgctaacagaagctggtctgcatgtttgtggatccagcggagagtggcagactttcttctccttttccctctcacctaaatgtcaacttgtcattgaatgtaaagaatgaaaccttctgacacaaaacttgagccacttggatgtttactcctcgcacttaagtatttgagtcttttcccatttcctcccactttactcaccttagtggtgaaaggagactagtagcatcttttctacaacgttaaaattgcagaagtagcttatcattaaaaaacaacaacaacaacaataacaataaatcctaagtgtaaatcagttattctaccccctaccaaggatatcagcctgttttttcccttttttctcctgggaataattgtgggcttcttcccaaatttctacagcctctttcctcttctcatgcttgagcttccctgtttgcacgcatgcgtgtgcaggactggctgtgtgcttggactcggctccaggtggaagcatgctttcccttgttactgttggagaaactcaaaccttcaagccctaggtgtagccattttgtcaagtcatcaactgtatttttgtactggcattaacaaaaaaagagataaaatattgtaccattaaactttaataaaactttaaaaggaaaaatatgcggcaaggttttttgtttgtttggttctcctggtcgagatgttccact

SEQ ID NO: 367890 - DNA, 1388 bp, Homo sapiens
gctcgcgatctagaactagttccggccctgcgtccgctcagccccgtggccccgcgcacctactgccatggagacgcggcctcgtctcggggccacctgtttgctgggcttcagtttcctgctcctcgtcatctcttctgatggacataatgggcttggaaagggttttggagatcatattcattggaggacactggaagatgggaagaaagaagcagctgccagtggactgcccctgatggtgattattcataaatcctggtgtggagcttgcaaagctctaaagcccaaatttgcagaatctacggaaatttcagaactctcccataattttgttatggtaaatcttgaggatgaagaggaacccaaagatgaagatttcagccctgacgggggttatattccacgaatcctttttctggatcccagtggcaaggtgcatcctgaaatcatcaatgagaatggaaaccccagctacaagtatttttatgtcagtgccgagcaagttgttcaggggatgaaggaagctcaggaaaggctgacgggtgatgccttcagaaagaaacatcttgaagatgaattgtaacatgaatgtgccccttctttcatcagagttagtgttctggaaggaaagcagcagggaagggaatattgaggaatcatctagaacaattaagccgaccaggaaacctcattcctacctacactggaaggagcgctctcactgtggaagagttctgctaacagaagctggtctgcatgtttgtggatccagcggagagtggcagactttcttctccttttccctctcacctaaatgtcaacttgtcattgaatgtaaagaatgaaaccttctgacacaaaacttgagccacttggatgtttactcctcgcacttaagtatttgagtcttttcccatttcctcccactttactcaccttagtggtgaaaggagactagtagcatcttttctacaacgttaaaattgcagaagtagcttatcattaaaaaacaacaacaacaacaataacaataaatcctaagtgtaaatcagttattctaccccctaccaaggatatcagcctgttttttcccttttttctcctgggaataattgtgggcttcttcccaaatttctacagcctctttcctcttctcatgcttgagcttccctgtttgcacgcatgcgtgtgcaggactggctgtgtgcttggactcggctccaggtggaagcatgctttcccttgttactgttggagaaactcaaaccttcaagccctaggtgtagccattttgtcaagtcatcaactgtatttttgtactggcattaacaaaaaaagagataaaatattgtaccattaaactttaataaaactttaaaaggaaa

SEQ ID NO: 367891 - DNA, 2356 bp, Homo sapiens
tgcgcatccctcttagtgctagtggcggcaggtgcaggtggccgcgcggcatcctggggattgcagtctcccgagcgttctattgtgtccctgcctacaattttagggaacctaataaaagggtggtcggtatgtttttatttgggtgtgtacttttgttaggtcgctttttcgctatgcattaagtacggactttaggactcaactagtaccaggaagaaaaagaccggacattttcacctgtttgttatacagcgaaggggaaaaattgggaagaaatcctcaagctacaagaaaaataaccagaagctttacactttagcctgcagtgacttatatcctggtgtcctaagtccacctaagtcagttttgcaataagaggtcccaagtttggttttcttggagcttgcatcagttggttgcatcatccctgagtagaagatttgcggttgcaaggaaaaataaggtacagagcttctccagcgggaaagtgcatgtctgcacggcacgagcccacgcaccgcagaacaggcttgccaggtctcctcagagaccctcgcaggaacctaacaatgaaatccagttgtccagtcttgatttgtggaggggtaaggagaatccgaggccagtgggcaatccgcccactgttgggagcgactgacctcacgaatcaataatttgcttttgactaggaagtgcagcggttcttggggggaggggctggactgggtggcggacgcgaggagcaacggttctcccgaacctctcccccgcccctactatcttggcctacatattcccgctccgtcccgggacctggacacccagaatccacgaaaagcaactcgcgctcgagaacagctctcgtacccttctacgtgatctgcacctttaagctcactccatcccaaaccggaccccggaggcaccacccacatccgtctaacatcacttccttcagagtttgaaaaaaaaaaatctgggaagtagaggtgttgtgctgagcggcgctcggcgaactgtgtggaccgtctgctgggactccggccctgcgtccgctcagccccgtggccccgcgcacctactgccatggagacgcggcctcgtctcggggccacctgtttgctgggcttcagtttcctgctcctcgtcatctcttctgatggacataatgggcttggaaagggttttggagatcatattcattggaggacactggaagatgggaagaaagaagcagctgccagtggactgcccctgatggtgattattcataaatcctggtgtggagcttgcaaagctctaaagcccaaatttgcagaatctacggaaatttcagaactctcccataattttgttatggtaaatcttgaggatgaagaggaacccaaagatgaagatttcagccctgacgggggttatattccacgaatcctttttctggatcccagtggcaaggtgcatcctgaaatcatcaatgagaatggaaaccccagctacaagtatttttatgtcagtgccgagcaagttgttcaggggatgaaggaagctcaggaaaggctgacgggtgatgccttcagaaagaaacatcttgaagatgaattgtaacatgaatgtgccccttctttcatcagagttagtgttctggaaggaaagcagcagggaagggaatattgaggaatcatctagaacaattaagccgaccaggaaacctcattcctacctacactggaaggagcgctctcactgtggaagagttctgctaacagaagctggtctgcatgtttgtggatccagcggagagtggcagactttcttctccttttccctctcacctaaatgtcaacttgtcattgaatgtaaagaatgaaaccttctgacacaaaacttgagccacttggatgtttactcctcgcacttaagtatttgagtcttttcccatttcctcccactttactcaccttagtggtgaaaggagactagtagcatcttttctacaacgttaaaattgcagaagtagcttatcattaaacccctaccaaggatatcagcctgttttttcccttttttctcctgggaataattgtgggcttcttcccaaatttctacagcctctttcctcttctcatgcttgagcttccctgtttgcacgcatgcgtgtgcaggactggctgtgtgcttggactcggctccaggtggaagcatgctttcccttgttactgttggagaaactcaaaccttcaagccctaggtgtagccattttgtcaagtcatcaactgtatttttgtactggcattaacaaaaaaagagataaaatattgtaccattaaactttaataaaactttaaaaggaaa

SEQ ID NO: 367892 - DNA, 1020 bp, Homo sapiens
gtgcgggtgatctagaggatcccgggtcatcgatgcacggggaatctttctgggatcccagtggcaaggtgcatcctgaaatcatcaatgagaatggaaaccccagctacaagtatttttatgtcagtgccgagcaagttgttcaggggatgaaggaagctcaggaaaggctgacgggtgatgccttcagaaagaaacatcttgaagatgaattgtaacatgaatgtgccccttctttcatcagagttagtgttctggaaggaaagcagcagggaagggaatattgaggaatcatctagaacaattaagccgaccaggaaacctcattcctacctacactggaaggagcgctctcactgtggaagagttctgctaacagaagctggtctgcatgtttgtggatccagcggagagtggcagactttcttctccttttccctctcacctaaatgtcaacttgtcattgaatgtaaagaatgaaaccttctgacacaaaacttgagccacttggatgtttactcctcgcacttaagtatttgagtcttttcccatttcctcccactttactcaccttagtggtgaaaggagactagtagcatcttttctacaacgttaaaattgcagaagtagcttatcattaaaaaacaacaacaacaacaataacaataaatcctaagtgtaaatcagttattctaccccctaccaaggatatcagcctgttttttcccttttttctcctgggaataattgtgggcttcttcccaaatttctacagcctctttcctcttctcatgcttgagcttccctgtttgcacgcatgcgtgtgcaggactggctgtgtgcttggactcggctccaggtggaagcatgctttcccttgttactgttggagaaactcaaaccttcaagccctaggtgtagccattttgtcaagtcatcaactgtatttttgtactggcattaacaaaaaaagagataaaatattgtaccattaaactttaataaaactttaaaaggaaa

SEQ ID NO: 367893 - DNA, 657 bp, Homo sapiens
aattcaagcttctaacgatgtacggggaatgtttgtggatccagcggagagtggcagactttcttctccttttccctctcacctaaatgtcaacttgtcattgaatgtaaagaatgaaaccttctgacacaaaacttgagccacttggatgtttactcctcgcacttaagtatttgagtcttttcccatttcctcccactttactcaccttagtggtgaaaggagactagtagcatcttttctacaacgttaaaattgcagaagtagcttatcattaaaaaacaacaacaacaacaataacaataaatcctaagtgtaaatcagttattctaccccctaccaaggatatcagcctgttttttcccttttttctcctgggaataattgtgggcttcttcccaaatttctacagcctctttcctcttctcatgcttgagcttccctgtttgcacgcatgcgtgtgcaggactggctgtgtgcttggactcggctccaggtggaagcatgctttcccttgttactgttggagaaactcaaaccttcaagccctaggtgtagccattttgtcaagtcatcaactgtatttttgtactggcattaacaaaaaaagagataaaatattgtaccattaaactttaataaaactttaaaaggaaa

SEQ ID NO: 367894 - DNA, 152 bp, Homo sapiens
ccttcaagccctaggtgtagccattttgtcaagtcatcaactgtatttttgtactggcattaacaaaaaaagagataaaatattgtaccattaaactttaataaaactttaaaaggaaagaaatgtgctgtgatggcctttttgttattgga

SEQ ID NO: 367895 - DNA, 407 bp, Homo sapiens
gaaaagggagtcaaccatgtggataataatggggaaagtgtgttcagcagagagttaagagcaagtccaaaagcctgtgttaggattatccctggcttgtttaatgacagcaacagcaagaggtcagtgtagctgaagaggacttaacaaggggtaggacattaagttagagaagtgcctaggtgatagatcatgtagggccttataggccactgcaaggacttggggttttgccctgacaagtggggaagccactgaatggttttgaggagagagaggacgttatctgacttaaggtttacatttaatcttaataggatgaagaggaacccaaagatgaagatttcagccctgacgggggttatattccacgaatcctttttctgggtaaggcacatgatcttaac

SEQ ID NO: 367896 - DNA, 334 bp, Homo sapiens
tcctccaatctttatttcacagttgttcaggggatgaaggaagctcaggaaaggctgacgggtgatgccttcagaaagaaacatcttgaagatgaattgtaacatgaatgtgccccttctttcatcagagttagtgttctggaaggaaagcagcagggaagggaatattgaggaatcatctagaacaattaagccgaccaggaaacctcattcctacctacactggaaggagcgctctcactgtggaagagttctgctaacagaagctggtctgcatgtttgtggatccagcggagagtggcagactttcttctccttttccctctcacctaaa

SEQ ID NO: 367897 - DNA, 2410 bp, Homo sapiens
tgcgcatccctcttagtgctagtggcggcaggtgcaggtggccgcgcggcatcctggggattgcagtctcccgagcgttctattgtgtccctgcctacaattttagggaacctaataaaagggtggtcggtatgtttttatttgggtgtgtacttttgttaggtcgctttttcgctatgcattaagtacggactttaggactcaactagtaccaggaagaaaaagaccggacattttcacctgtttgttatacagcgaaggggaaaaattgggaagaaatcctcaagctacaagaaaaataaccagaagctttacactttagcctgcagtgacttatatcctggtgtcctaagtccacctaagtcagttttgcaataagaggtcccaagtttggttttcttggagcttgcatcagttggttgcatcatccctgagtagaagatttgcggttgcaaggaaaaataaggtacagagcttctccagcgggaaagtgcatgtctgcacggcacgagcccacgcaccgcagaacaggcttgccaggtctcctcagagaccctcgcaggaacctaacaatgaaatccagttgtccagtcttgatttgtggaggggtaaggagaatccgaggccagtgggcaatccgcccactgttgggagcgactgacctcacgaatcaataatttgcttttgactaggaagtgcagcggttcttggggggaggggctggactgggtggcggacgcgaggagcaacggttctcccgaacctctcccccgcccctactatcttggcctacatattcccgctccgtcccgggacctggacacccagaatccacgaaaagcaactcgcgctcgagaacagctctcgtacccttctacgtgatctgcacctttaagctcactccatcccaaaccggaccccggaggcaccacccacatccgtctaacatcacttccttcagagtttgaaaaaaaaaaatctgggaagtagaggtgttgtgctgagcggcgctcggcgaactgtgtggaccgtctgctgggactccggccctgcgtccgctcagccccgtggccccgcgcacctactgccatggagacgcggcctcgtctcggggccacctgtttgctgggcttcagtttcctgctcctcgtcatctcttctgatggacataatgggcttggaaagggttttggagatcatattcattggaggacactggaagatgggaagaaagaagcagctgccagtggactgcccctgatggtgattattcataaatcctggtgtggagcttgcaaagctctaaagcccaaatttgcagaatctacggaaatttcagaactctcccataattttgttatggtaaatcttgaggatgaagaggaacccaaagatgaagatttcagccctgacgggggttatattccacgaatcctttttctggatcccagtggcaaggtgcatcctgaaatcatcaatgagaatggaaaccccagctacaagtatttttatgtcagtgccgagcaagttgttcaggggatgaaggaagctcaggaaaggctgacgggtgatgccttcagaaagaaacatcttgaagatgaattgtaacatgaatgtgccccttctttcatcagagttagtgttctggaaggaaagcagcagggaagggaatattgaggaatcatctagaacaattaagccgaccaggaaacctcattcctacctacactggaaggagcgctctcactgtggaagagttctgctaacagaagctggtctgcatgtttgtggatccagcggagagtggcagactttcttctccttttccctctcacctaaatgtcaacttgtcattgaatgtaaagaatgaaaccttctgacacaaaacttgagccacttggatgtttactcctcgcacttaagtatttgagtcttttcccatttcctcccactttactcaccttagtggtgaaaggagactagtagcatcttttctacaacgttaaaattgcagaagtagcttatcattaaaaaacaacaacaacaacaataacaataaatcctaagtgtaaatcagttattctaccccctaccaaggatatcagcctgttttttcccttttttctcctgggaataattgtgggcttcttcccaaatttctacagcctctttcctcttctcatgcttgagcttccctgtttgcacgcatgcgtgtgcaggactggctgtgtgcttggactcggctccaggtggaagcatgctttcccttgttactgttggagaaactcaaaccttcaagccctaggtgtagccattttgtcaagtcatcaactgtatttttgtactggcattaacaaaaaaagagataaaatattgtaccattaaactttaataaaactttaaaaggaaa

SEQ ID NO: 367898 - DNA, 2629 bp, Homo sapiens
tgcgcatccctcttagtgctagtggcggcaggtgcaggtggccgcgcggcatcctggggattgcagtctcccgagcgttctattgtgtccctgcctacaattttagggaacctaataaaagggtggtcggtatgtttttatttgggtgtgtacttttgttaggtcgctttttcgctatgcattaagtacggactttaggactcaactagtaccaggaagaaaaagaccggacattttcacctgtttgttatacagcgaaggggaaaaattgggaagaaatcctcaagctacaagaaaaataaccagaagctttacactttagcctgcagtgacttatatcctggtgtcctaagtccacctaagtcagttttgcaataagaggtcccaagtttggttttcttggagcttgcatcagttggttgcatcatccctgagtagaagatttgcggttgcaaggaaaaataaggtacagagcttctccagcgggaaagtgcatgtctgcacggcacgagcccacgcaccgcagaacaggcttgccaggtctcctcagagaccctcgcaggaacctaacaatgaaatccagttgtccagtcttgatttgtggaggggtaaggagaatccgaggccagtgggcaatccgcccactgttgggagcgactgacctcacgaatcaataatttgcttttgactaggaagtgcagcggttcttggggggaggggctggactgggtggcggacgcgaggagcaacggttctcccgaacctctcccccgcccctactatcttggcctacatattcccgctccgtcccgggacctggacacccagaatccacgaaaagcaactcgcgctcgagaacagctctcgtacccttctacgtgatctgcacctttaagctcactccatcccaaaccggaccccggaggcaccacccacatccgtctaacatcacttccttcagagtttgaaaaaaaaaaatctgggaagtagaggtgttgtgctgagcggcgctcggcgaactgtgtggaccgtctgctgggactccggccctgcgtccgctcagccccgtggccccgcgcacctactgccatggagacgcggcctcgtctcggggccacctgtttgctgggcttcagtttcctgctcctcgtcatctcttctgatggacataatgggcttggaaagggttttggagatcatattcattggaggacactggaagatgggaagaaagaagcagctgccagtggactgcccctgatggtgattattcataaatcctggtgtggagcttgcaaagctctaaagcccaaatttgcagaatctacggaaatttcagaactctcccataattttgttatggtaaatcttgaggatgaagaggaacccaaagatgaagatttcagccctgacgggggttatattccacgaatcctttttctggatcccagtggcaaggtgcatcctgaaatcatcaatgagaatggaaaccccagctacaagtatttttatgtcagtgccgagcaagttgttcaggggatgaaggaagctcaggaaaggctgacgggtgatgccttcagaaagaaacatcttgaagatgaattgtaacatgaatgtgccccttctttcatcagagttagtgttctggaaggaaagcagcagggaagggaatattgaggaatcatctagaacaattaagccgaccaggaaacctcattcctacctacactggaaggagcgctctcactgtggaagagttctgctaacagaagctggtctgcatgtttgtggatccagcggagagtggcagactttcttctccttttccctctcacctaaatgtcaacttgtcattgaatgtaaagaatgaaaccttctgacacaaaacttgagccacttggatgtttactcctcgcacttaagtatttgagtcttttcccatttcctcccactttactcaccttagtggtgaaaggagactagtagcatcttttctacaacgttaaaattgcagaagtagcttatcattaaaaaacaacaacaacaacaataacaataaatcctaagtgtaaatcagttattctaccccctaccaaggatatcagcctgttttttcccttttttctcctgggaataattgtgggcttcttcccaaatttctacagcctctttcctcttctcatgcttgagcttccctgtttgcacgcatgcgtgtgcaggactggctgtgtgcttggactcggctccaggtggaagcatgctttcccttgttactgttggagaaactcaaaccttcaagccctaggtgtagccattttgtcaagtcatcaactgtatttttgtactggcattaacaaaaaaagagataaaatattgtaccattaaactttaataaaactttaaaaggaaaaaaaaaaaaaagaaaaaaaaagaaagaaagaaagcgaagacaacaaagaaaaacaaaaccaagagaaaaacaaaaaaaagaaaaacaacacgaggcaaccggcgcaacacgaaaatcggtaacagaagcaggagaagaagagctaaaaacaaagacaaggaacaaaacaaaacgacaagacagcagaagagatggcacaatgcggaaagaaccgaaatc

SEQ ID NO: 367899 - DNA, 2563 bp, Homo sapiens
  misc_feature (2419)..(2419): n is a, c, g, or t
tgcgcatccctcttagtgctagtggcggcaggtgcaggtggccgcgcggcatcctggggattgcagtctcccgagcgttctattgtgtccctgcctacaattttagggaacctaataaaagggtggtcggtatgtttttatttgggtgtgtacttttgttaggtcgctttttcgctatgcattaagtacggactttaggactcaactagtaccaggaagaaaaagaccggacattttcacctgtttgttatacagcgaaggggaaaaattgggaagaaatcctcaagctacaagaaaaataaccagaagctttacactttagcctgcagtgacttatatcctggtgtcctaagtccacctaagtcagttttgcaataagaggtcccaagtttggttttcttggagcttgcatcagttggttgcatcatccctgagtagaagatttgcggttgcaaggaaaaataaggtacagagcttctccagcgggaaagtgcatgtctgcacggcacgagcccacgcaccgcagaacaggcttgccaggtctcctcagagaccctcgcaggaacctaacaatgaaatccagttgtccagtcttgatttgtggaggggtaaggagaatccgaggccagtgggcaatccgcccactgttgggagcgactgacctcacgaatcaataatttgcttttgactaggaagtgcagcggttcttggggggaggggctggactgggtggcggacgcgaggagcaacggttctcccgaacctctcccccgcccctactatcttggcctacatattcccgctccgtcccgggacctggacacccagaatccacgaaaagcaactcgcgctcgagaacagctctcgtacccttctacgtgatctgcacctttaagctcactccatcccaaaccggaccccggaggcaccacccacatccgtctaacatcacttccttcagagtttgaaaaaaaaaaatctgggaagtagaggtgttgtgctgagcggcgctcggcgaactgtgtggaccgtctgctgggactccggccctgcgtccgctcagccccgtggccccgcgcacctactgccatggagacgcggcctcgtctcggggccacctgtttgctgggcttcagtttcctgctcctcgtcatctcttctgatggacataatgggcttggaaagggttttggagatcatattcattggaggacactggaagatgggaagaaagaagcagctgccagtggactgcccctgatggtgattattcataaatcctggtgtggagcttgcaaagctctaaagcccaaatttgcagaatctacggaaatttcagaactctcccataattttgttatggtaaatcttgaggatgaagaggaacccaaagatgaagatttcagccctgacgggggttatattccacgaatcctttttctggatcccagtggcaaggtgcatcctgaaatcatcaatgagaatggaaaccccagctacaagtatttttatgtcagtgccgagcaagttgttcaggggatgaaggaagctcaggaaaggctgacgggtgatgccttcagaaagaaacatcttgaagatgaattgtaacatgaatgtgccccttctttcatcagagttagtgttctggaaggaaagcagcagggaagggaatattgaggaatcatctagaacaattaagccgaccaggaaacctcattcctacctacactggaaggagcgctctcactgtggaagagttctgctaacagaagctggtctgcatgtttgtggatccagcggagagtggcagactttcttctccttttccctctcacctaaatgtcaacttgtcattgaatgtaaagaatgaaaccttctgacacaaaacttgagccacttggatgtttactcctcgcacttaagtatttgagtcttttcccatttcctcccactttactcaccttagtggtgaaaggagactagtagcatcttttctacaacgttaaaattgcagaagtagcttatcattaaaaaacaacaacaacaacaataacaataaatcctaagtgtaaatcagttattctaccccctaccaaggatatcagcctgttttttcccttttttctcctgggaataattgtgggcttcttcccaaatttctacagcctctttcctcttctcatgcttgagcttccctgtttgcacgcatgcgtgtgcaggactggctgtgtgcttggactcggctccaggtggaagcatgctttcccttgttactgttggagaaactcaaaccttcaagccctaggtgtagccattttgtcaagtcatcaactgtatttttgtactggcattaacaaaaaaagagataaaatattgtaccattaaactttaataaaactttaaaaggaaaaaaaaaaanaatgcggccgccattttttttttgtttatatagtgaccaccgtggaaacaaacgcctcttgtattgttatgtacatagtccatacctgagtgctgtacataagttgttctgtgtataaataaaacaagcctgtttttgatcttc

SEQ ID NO: 367900 - DNA, 1423 bp, Homo sapiens
aacagactgatgtaacgagcgtcgatcactccggtttgtactttcaattccgggcctgggtttgtcacatgtcccttagtgtgccccttgacttacaggacatagaagacgcggcctcgtctcggggccacctgtttgctgggcttcagtttcctgctcctcgtcatctcttctgatggacataatgggcttggaaagggttttggagatcatattcattggaggacactggaagatgggaagaaagaagcagctgccagtggactgcccctgatggtgattattcataaatcctggtgtggagcttgcaaagctctaaagcccaaatttgcagaatctacggaaatttcagaactctcccataattttgttatggtaaatcttgaggatgaagaggaacccaaagatgaagatttcagccctgacgggggttatattccacgaatcctttttctggatcccagtggcaaggtgcatcctgaaatcatcaatgagaatggaaaccccagctacaagtatttttatgtcagtgccgagcaagttgttcaggggatgaaggaagctcaggaaaggctgacgggtgatgccttcagaaagaaacatcttgaagatgaattgtaacatgaatgtgccccttctttcatcagagttagtgttctggaaggaaagcagcagggaagggaatattgaggaatcatctagaacaattaagccgaccaggaaacctcattcctacctacactggaaggagcgctctcactgtggaagagttctgctaacagaagctggtctgcatgtttgtggatccagcggagagtggcagactttcttctccttttccctctcacctaaatgtcaacttgtcattgaatgtaaagaatgaaaccttctgacacaaaacttgagccacttggatgtttactcctcgcacttaagtatttgagtcttttcccatttcctcccactttactcaccttagtggtgaaaggagactagtagcatcttttctacaacgttaaaattgcagaagtagcttatcattaaaaaacaacaacaacaacaataacaataaatcctaagtgtaaatcagttattctaccccctaccaaggatatcagcctgttttttcccttttttctcctgggaataattgtgggcttcttcccaaatttctacagcctctttcctcttctcatgcttgagcttccctgtttgcacgcatgcgtgtgcaggactggctgtgtgcttggactcggctccaggtggaagcatgctttcccttgttactgttggagaaactcaaaccttcaagccctaggtgtagccattttgtcaagtcatcaactgtatttttgtactggcattaacaaaaaaagagataaaatattgtaccattaaactttaataaaactttaaaaggaaa

SEQ ID NO: 367901 - DNA, 7708 bp, Homo sapiens
gttagcggcgtctcggttgccatggagaccaggagctccaaaacgcggaggtctttagcgtcccggaccaacgagtgccaggggacaatgtgggcgccaacttcgccaccagccgggtccagcagccccagccagcccacctggaagtcctccttgtattcctccctcgcctactctgaggccttccactacagcttcgcagcccggccccgccgcctcacgcagcttgcgctggcgcagcgtcccgagcctcagctgcttcgtctgcgcccctcctcgctgcgcacccaagatatctcgcacttgctcaccggcgtcttccgcaacttgtactcagccgaggtcatcggcgacgaagtgagcgcaagcttgatcaaggcccgcggcagcgagaatgagcgccacgaggagttcgtggaccagctgcagcagattcgggagctctataagcagcggctggatgagtttgaaatgttggagagacatatcactcaggcccaagcacgggctattgcggaaaatgagcgggtcatgagccaggctggagtacaggacctcgagagccttgtcaggttgcctccagtgaagagtgtctccagatggtgtatagacagcgagttgctacggaaacatcatttgatctccccagaagattactacaccgatacagtgccgtttcactctgcacctaaaggcatctccctacctggatgttcaaaactgacatttagctgtgagaagcgttccgtccagaagaaagagctgaacaagaagcttgaagattcatgcaggaagaagcttgctgagttcgaagatgagttagaccacactgtggacagcctgacatggaatttaactcctaaggccaaagaaaggaccagagaacctctcaagaaagcaagtcaaccaaggaataaaaactggatgaaccacttacgtgtgccacagagagagctagacagacttctgcttgccagaatggagagtcggaaccacttcctaaaaaatccccgtttttttcctcctaacactcgatatggaggcaagtctcttgtttttcctccaaagaagccagcaccgataggagaattccagagtacagagccagaacagagttgtgctgatactccagtgtttctagctaagccaccaattgggtttttcacagattatgaaattggtccagtttatgagatggtaattgcgctgcagaacaccaccacgaccagccgctacctgcgagtcctcccgccttccacgccatacttcgctctgggactggggatgttcccaggaaaaggtggaatggtggctcctggaatgacctgccagtacattgtccagttttttcccgactgccttggggattttgatgattttattttagtggagacccagtcagcccacacacttctgatccccctgcaggcccggaggccgccccccgtgctgacattgtcaccggtgttggactgtggttactgcctcattgggggagtcaagatgaccagattcatctgcaaaaatgtgggtttcagtgttggcaggttctgcattatgcccaaaacaagctggccaccactaagtttcaaggccattgcaaccgtcggctttgttgaacaacctccttttggaatcctgccttcggtgtttgagctggccccgggacatgctatattagtggaggtcttgttttccccaaagagcctaggaaaggcagagcagaccttcatcatcatgtgcgacaactgccagataaaggagctggtgaccataggaattgggcagctgattgctttggatctgatctatatttctggtgaaaaaagccagccagaccctggagagctcacagacttaacagcccagcacttcatacgatttgagcctgaaaaccttcggtccacggctaggaagcagctgattattagaaatgctacgcacgtggagctggccttctactggcagatcatgaagcccaacctgcagcccctcatgcctggagaaaccttcagcatggacagcatcaagtgctaccccgacaaggagactgccttctccatcatgcccagaaagggggttctaagcccccacacagaccacgagttcatcctgagcttttctcctcatgaggttcagatggtgtcatctcagtagccacacatggttggatcatgtatttagaccccccacctgtgttcctcaatcacactgaagccacagctgggcccaccgaggtgctatcctgcccaggccagcacttggctgagttgggttggagtacacacctggtgtgcagggtgaagcagctcattttgtctggtcctgatcccagactcaccccatctgcagcaagacccttggctggcttcctccgctctgggtgtctcccacatgtctactatggcaaaaaacattaccatccccacccataccacagcatcccctagagagagtgaggtgcagggacccgagggccaggttagcacagcgctggccccagcatggagggaagccctgtgggccacggtaggctagaagggaattcgagctgggcatgaaaaggatgctccggggccattgttagtgggtttggggctgaaatgagtgatcctgcctctggtcccagcatccagctgcctcgttgtctatcctgggagggtgtggtgcttcggacacgttgaggggctttgtcagcatcaggaaggcctttgcttcttgcacccaggcccagctgagacaggcccctgagtcctggctcatgttctggcagcaaacttcacttttcctaaggaagggaagaaggaggcagcagggaagcaaccctgggttttcagaaggtccttctgatggctaggctaaggggaggaagaattcctgccatgccccagccttctccaggacaacctgctggaacgcagtggtgttttcagggcactgtgtttgccttgcagctgagggattttcacagtgtgctccagatggtgctagaggaagtcccagagcctgtaagttcagaagcggagagcctggggcactcctcctactctgtggatgatgtgattgtcctggaaatcgaggtgaaaggctcagtagaacctttccaggttctcttagagccatatgccctcatcatcccaggggagaactacattgggataaatgtgaagaaggcttttaagatgtggaacaacagcaagtcacccatcagatacctgtgggggaagatcagcgactgccacatcattgaagtggagcccggcacaggggtcatagagcccagtgaggtcggggattttgagttgaactttactgggggtgtccctggccccacaagccaggacctgctgtgtgaaatcgaagactcgccctcgccagtggtgttacacattgaggctgtctttaaggggcctgccctcatcatcaacgtctcagcccttcagtttggtctgctccgcctggggcagaaagccacaaactccatccagatccggaacgtcagccagctcccagccacatggcgcatgaaggagagcccagtctccctccaggaaaggcctgaggatgtgtctcccttcgacattgagccttcgagtggccagcttcactctctgggggagtgcagggtggacatcaccttggaggccctgcactgccagcatctggagaccgtcctggagctggaggtggaaaatggtgcctggagctaccttcctgtgtatgctgaggtacagaagccccatgtgtacctacagagcagccaggtggaggttagaaatctctacctgggtgtgcccacgaagacaaccatcacacttatcaatggcacgctcctgcctacccagttccactggggcaagctcctcggacaccaagcagaattctgcatggtgacagtctcccccaaacatggcctgctgggcccaagtgaggagtgccagctcaagttggagttgactgctcatacccaggaagagctgacccatctggccctcccttgtcacgtgtcaggcatgaagaagccactggttctaggcatttctgggaagccccagggactgcaagtggccattaccatctctaaggagagctctgattgcagcacagagcagtggccaggccacccaaaggagctccgcctggactttggctcagcggtgccactgaggacccgtgtgactcgccagctcattctcaccaatcgctccccaatacggacccgtttctccctcaagtttgagtatttcgggagcccccaaaacagcctgagcaaaaagaccagccttcccaacatgcctcctgccctgctaaagacagtgcggatgcaagagcacctggccaagcgagagcagctggattttatggagagcatgctatcccacgggaaaggagctgctttcttccctcacttttcccagggcatgctggggccctaccagcagctgtgcattgacatcacaggctgtgccaacatgtggggcgagtactgggacaacctcatctgcacggtgggagacctgctgccggaagtcatcccagtgcacatggcagcggtgggctgccccatcagctccctgaggaccacctcctacactattgaccaggcccagaaggaaccagccatgaggttcggcacccaggtctccggaggagacacagttacccgaacccttcgcctgaataactccagcccctgtgacatccgcctggattgggagacctatgttccagaagacaaggaagaccggctggtggagctgctggtgttttatgggccacctttcccgctgcgggaccaagccgggaatgagcttgtgtgccctgatacccctgagggtggctgcctcctctggtccccaggcccctccagttcatcggaattcagccatgaaactgactcatcagttgagggcagctccagtgccagcaatagggtggcacagaagctcatctcagtcatcctgcaggcacatgagggggtgccctccggccacctgtactgtatcagccccaagcaggtggtggtccctgctgggggcagcagtaccatctacatctccttcacccctatggtgctcagccctgagatcctgcacaaggtggagtgtactggctacgccctgggtttcatgagcttggacagcaaggtggaaagggagattccacggaagaggcatcgcctgcaggactttgcggtgggacccctgaaactggacctgcatagctacgtgaggcctgcacagctaagtgtggagctggactacggcggcagtatggaattccagtgccaggccagtgacctcattcccgagcagccctgctctggggtgctgagtgagctggtgaccacccaccacctgaagctgaccaacactacagagatcccacactacttccggcttatggtctccaggcccttctccgtttctcaagatggggcgagccaggaccacagagctcctggccctggccagaagcaggagtgtgaggaggagacagcctcagcggacaagcagctggtgctccaagcacaggagaacatgctggtgaacgtgtccttctcactctccctggagctgctctcctatcagaagctcccagctgaccagacactgcctggggtggacattcagcagagtgcgagtggagagagagagatggtgtttactcagaacctgctcctggagtacaccaaccagaccactcaggtggtgcccctgcgggctgtggtggccgtgcctgagctgcagctctccaccagctgggtggactttgggacctgctttgtgagccagcagcgagtccgggaggtctacctgatgaacctgagcgggtgccgaagctactggactatgctgatgggccagcaggagccagccaaggccgctgtggccttcagggtctccccaaacagtgggctgctagaagcacgatccgccaatgcacccccaacctccatcgcgttgcaggttttcttcactgccaggagtagtgagctgtacgagtccacgatggtggtggaaggtgtgctcggtgagaagtcctgcaccctgcggctccggggccaaggctcctatgatgagagatacatgttgcctcaccagccctgaggctccgccccagccctcagccccaggccccagctggagaaaaaacattgcccagggattaggagcagctcttcagcacaaagacacagacttggggacctggggacctctgggcagctcctggaatggaagaacccccttccacaatggtctcagcctaggccctcatgatatgtcctcagagctaacataaaggacaggccacaccacagcagagaccaccacattgagatcactactcagtgcatagcgaagaccagtatggcaaaattagtcttggaaaaaaaccacagccactaagataaattcatgcacttttactatgcacattgcacttctcatccatggatttgccttgccttaagaattaaccatggccttgtggcctgggtgacccaggctgcttttatcttgcacagctaaagagggtctgatgggtggctcaacaccccacccactcctataccatgtcatcagtgttcacattttccaaatgagttgaagtgccttgatctgtccactgccaccaccaccagtgctgagttttcccatgtggttttgcttttgtggtgttactgccttgctgctagagcagcaggactgtctgcgtagcgcctccagcctgggacctcactcagttcccagggtattcaaagacggcagcggctcccattccagtcccgatgcacatggacaccactccgtatgccctgtgaaaacaaaacttaattggctgggcaaaggcacccaccaaattacctccagaccaggctgacccagaaggacgtcatggacaagtaggatgcaaaaccatcagaccagatctgtgggcaagcggtaccctggcctcccacttgggcacacacacggtgacagatgcccactgcaggctagtatccctttcaaggctggcccttaaggaaaacagggatcatgcccctacatcctaagttcagggtgtttctgtgtgcatgttcccctccccagggatcgatcataatcccaaaagacacaatcccaaacacaatcatcccaaatgttgaaatcctggaagaacaaaatccctaaagtctaaaatcctgaaaatcacaatcctaaaagatcaaaatcctgaaaatataattctggaaaaaataatttggaagcctggcctggtggcatctacttgtagtcccagctattcagcaggctgaggcaagaggatcacttgtgcctaggagttcaagaccagcctaggcaatatagcaagaccccatcttagaaaaaaacttttttaaaagattgatttaaaagatatttacatttttaggccaggtgtggtggctcaaacctgtaatcccaacactttgggaggccgaggcgggaggatcacgaggtcaggagttcaagaccagcctcgccaacatggtgaaaccctgtctccaccaaaaatacaaaaattagctgggtgtggtggcagacacctataatcccagatactcgggaggctgaggctgaggcaggaaaattgcttgaacccaaaaggcagaggttgcagtgagccgagatcacaccactgcactccagccagcctggacaacggagtgagattccatgtc

SEQ ID NO: 367902 - DNA, 6694 bp, Homo sapiens
gttagcggcgtctcggttgccatggagaccaggagctccaaaacgcggaggtctttagcgtcccggaccaacgagtgccaggggacaatgtgggcgccaacttcgccaccagccgggtccagcagccccagccagcccacctggaagtcctccttgtattcctccctcgcctactctgaggccttccactacagcttcgcagcccggccccgccgcctcacgcagcttgcgctggcgcagcgtcccgagcctcagctgcttcgtctgcgcccctcctcgctgcgcacccaagatatctcgcacttgctcaccggcgtcttccgcaacttgtactcagccgaggtcatcggcgacgaagtgagcgcaagcttgatcaaggcccgcggcagcgagaatgagcgccacgaggagttcgtggaccagctgcagcagattcgggagctctataagcagcggctggatgagtttgaaatgttggagagacatatcactcaggcccaagcacgggctattgcggaaaatgagcgggtcatgagccaggctggagtacaggacctcgagagccttgtcaggttgcctccagtgaagagtgtctccagatggtgtatagacagcgagttgctacggaaacatcatttgatctccccagaagattactacaccgatacagtgccgtttcactctgcacctaaaggcatctccctacctggatgttcaaaactgacatttagctgtgagaagcgttccgtccagaagaaagagctgaacaagaagcttgaagattcatgcaggaagaagcttgctgagttcgaagatgagttagaccacactgtggacagcctgacatggaatttaactcctaaggccaaagaaaggaccagagaacctctcaagaaagcaagtcaaccaaggaataaaaactggatgaaccacttacgtgtgccacagagagagctagacagacttctgcttgccagaatggagagtcggaaccacttcctaaaaaatccccgtttttttcctcctaacactcgatatggaggcaagtctcttgtttttcctccaaagaagccagcaccgataggagaattccagagtacagagccagaacagagttgtgctgatactccagtgtttctagctaagccaccaattgggtttttcacagattatgaaattggtccagtttatgagatggtaattgcgctgcagaacaccaccacgaccagccgctacctgcgagtcctcccgccttccacgccatacttcgctctgggactggggatgttcccaggaaaaggtggaatggtggctcctggaatgacctgccagtacattgtccagttttttcccgactgccttggggattttgatgattttattttagtggagacccagtcagcccacacacttctgatccccctgcaggcccggaggccgccccccgtgctgacattgtcaccggtgttggactgtggttactgcctcattgggggagtcaagatgaccagattcatctgcaaaaatgtgggtttcagtgttggcaggttctgcattatgcccaaaacaagctggccaccactaagtttcaaggccattgcaaccgtcggctttgttgaacaacctccttttggaatcctgccttcggtgtttgagctggccccgggacatgctatattagtggaggtcttgttttccccaaagagcctaggaaaggcagagcagaccttcatcatcatgtgcgacaactgccagataaaggagctggtgaccataggaattgggcagctgattgctttggatctgatctatatttctggtgaaaaaagccagccagaccctggagagctcacagacttaacagcccagcacttcatacgatttgagcctgaaaaccttcggtccacggctaggaagcagctgattattagaaatgctacctgagggattttcacagtgtgctccagatggtgctagaggaagtcccagagcctgtaagttcagaagcggagagcctggggcactcctcctactctgtggatgatgtgattgtcctggaaatcgaggtgaaaggctcagtagaacctttccaggttctcttagagccatatgccctcatcatcccaggggagaactacattgggataaatgtgaagaaggcttttaagatgtggaacaacagcaagtcacccatcagatacctgtgggggaagatcagcgactgccacatcattgaagtggagcccggcacaggggtcatagagcccagtgaggtcggggattttgagttgaactttactgggggtgtccctggccccacaagccaggacctgctgtgtgaaatcgaagactcgccctcgccagtggtgttacacattgaggctgtctttaaggggcctgccctcatcatcaacgtctcagcccttcagtttggtctgctccgcctggggcagaaagccacaaactccatccagatccggaacgtcagccagctcccagccacatggcgcatgaaggagagcccagtctccctccaggaaaggcctgaggatgtgtctcccttcgacattgagccttcgagtggccagcttcactctctgggggagtgcagggtggacatcaccttggaggccctgcactgccagcatctggagaccgtcctggagctggaggtggaaaatggtgcctggagctaccttcctgtgtatgctgaggtacagaagccccatgtgtacctacagagcagccaggtggaggttagaaatctctacctgggtgtgcccacgaagacaaccatcacacttatcaatggcacgctcctgcctacccagttccactggggcaagctcctcggacaccaagcagaattctgcatggtgacagtctcccccaaacatggcctgctgggcccaagtgaggagtgccagctcaagttggagttgactgctcatacccaggaagagctgacccatctggccctcccttgtcacgtgtcaggcatgaagaagccactggttctaggcatttctgggaagccccagggactgcaagtggccattaccatctctaaggagagctctgattgcagcacagagcagtggccaggccacccaaaggagctccgcctggactttggctcagcggtgccactgaggacccgtgtgactcgccagctcattctcaccaatcgctccccaatacggacccgtttctccctcaagtttgagtatttcgggagcccccaaaacagcctgagcaaaaagaccagccttcccaacatgcctcctgccctgctaaagacagtgcggatgcaagagcacctggccaagcgagagcagctggattttatggagagcatgctatcccacgggaaaggagctgctttcttccctcacttttcccagggcatgctggggccctaccagcagctgtgcattgacatcacaggctgtgccaacatgtggggcgagtactgggacaacctcatctgcacggtgggagacctgctgccggaagtcatcccagtgcacatggcagcggtgggctgccccatcagctccctgaggaccacctcctacactattgaccaggcccagaaggaaccagccatgaggttcggcacccaggtctccggaggagacacagttacccgaacccttcgcctgaataactccagcccctgtgacatccgcctggattgggagacctatgttccagaagacaaggaagaccggctggtggagctgctggtgttttatgggccacctttcccgctgcgggaccaagccgggaatgagcttgtgtgccctgatacccctgagggtggctgcctcctctggtccccaggcccctccagttcatcggaattcagccatgaaactgactcatcagttgagggcagctccagtgccagcaatagggtggcacagaagctcatctcagtcatcctgcaggcacatgagggggtgccctccggccacctgtactgtatcagccccaagcaggtggtggtccctgctgggggcagcagtaccatctacatctccttcacccctatggtgctcagccctgagatcctgcacaaggtggagtgtactggctacgccctgggtttcatgagcttggacagcaaggtggaaagggagattccacggaagaggcatcgcctgcaggactttgcggtgggacccctgaaactggacctgcatagctacgtgaggcctgcacagctaagtgtggagctggactacggcggcagtatggaattccagtgccaggccagtgacctcattcccgagcagccctgctctggggtgctgagtgagctggtgaccacccaccacctgaagctgaccaacactacagagatcccacactacttccggcttatggtctccaggcccttctccgtttctcaagatggggcgagccaggaccacagagctcctggccctggccagaagcaggagtgtgaggaggagacagcctcagcggacaagcagctggtgctccaagcacaggagaacatgctggtgaacgtgtccttctcactctccctggagctgctctcctatcagaagctcccagctgaccagacactgcctggggtggacattcagcagagtgcgagtggagagagagagatggtgtttactcagaacctgctcctggagtacaccaaccagaccactcaggtggtgcccctgcgggctgtggtggccgtgcctgagctgcagctctccaccagctgggtggactttgggacctgctttgtgagccagcagcgagtccgggaggtctacctgatgaacctgagcgggtgccgaagctactggactatgctgatgggccagcaggagccagccaaggccgctgtggccttcagggtctccccaaacagtgggctgctagaagcacgatccgccaatgcacccccaacctccatcgcgttgcaggttttcttcactgccaggagtagtgagctgtacgagtccacgatggtggtggaaggtgtgctcggtgagaagtcctgcaccctgcggctccggggccaaggctcctatgatgagagatacatgttgcctcaccagccctgaggctccgccccagccctcagccccaggccccagctggagaaaaaacattgcccagggattaggagcagctcttcagcacaaagacacagacttggggacctggggacctctgggcagctcctggaatggaagaacccccttccacaatggtctcagcctaggccctcatgatatgtcctcagagctaacataaaggacaggccacaccacagcagagaccaccacattgagatcactactcagtgcatagcgaagaccagtatggcaaaattagtcttggaaaaaaaccacagccactaagataaattcatgcacttttactatgcacattgcacttctcatccatggatttgccttgccttaagaattaaccatggccttgtggcctgggtgacccaggctgcttttatcttgcacagctaaagagggtctgatgggtggctcaacaccccacccactcctataccatgtcatcagtgttcacattttccaaatgagttgaagtgccttgatctgtccactgccaccaccaccagtgctgagttttcccatgtggttttgcttttgtggtgttactgccttgctgctagagcagcaggactgtctgcgtagcgcctccagcctgggacctcactcagttcccagggtattcaaagacggcagcggctcccattccagtcccgatgcacatggacaccactccgtatgccctgtgaaaacaaaacttaattggctgggcaaaggcacccaccaaattacctccagaccaggctgacccagaaggacgtcatggacaagtaggatgcaaaaccatcagaccagatctgtgggcaagcggtaccctggcctcccacttgggcacacacacggtgacagatgcccactgcaggctagtatccctttcaaggctggcccttaaggaaaacagggatcatgcccctacatcctaagttcagggtgtttctgtgtgcatgttcccctccccagggatcgatcataatcccaaaagacacaatcccaaacacaatcatcccaaatgttgaaatcctggaagaacaaaatccctaaagtctaaaatcctgaaaatcacaatcctaaaagatcaaaatcctgaaaatataattctggaaaaaataatttggaagcctggcctggtggcatctacttgtagtcccagctattcagcaggctgaggcaagaggatcacttgtgcctaggagttcaagaccagcctaggcaatatagcaagaccccatcttagaaaaaaacttttttaaaagattgatttaaaagatatttacatttttaggccaggtgtggtggctcaaacctgtaatcccaacactttgggaggccgaggcgggaggatcacgaggtcaggagttcaagaccagcctcgccaacatggtgaaaccctgtctccaccaaaaatacaaaaattagctgggtgtggtggcagacacctataatcccagatactcgggaggctgaggctgaggcaggaaaattgcttgaacccaaaaggcagaggttgcagtgagccgagatcacaccactgcactccagccagcctggacaacggagtgagattccatgtc

SEQ ID NO: 367903 - DNA, 449 bp, Homo sapiens
cctgcctcctacctctgtggctgcccaggtgctgagtgagctggtgaccacccaccacctgaagctgaccaacactacagagatcccacactacttccggcttatggtctccaggcccttctccgtttctcaagatggggcgagccaggaccacagagctcctggccctggccagaagcaggagtgtgaggaggagacagcctcagcggacaagcagctggtgctccaagcacaggagaacatgctggtcagtgggggagtctgcagcccttgcctcaatggcacaccctcacatgtgtacagacagcacccctgcacgccaccctcaggtgcttgtacccagacgcaaactgcatgcctgaccctgccataccctgcatgaacactcgggggtgcactcccaccagagacaccacattcagcacctctgcacaagtggctcacatggg

SEQ ID NO: 367904 - DNA, 250 bp, Homo sapiens
acgttgtgttcacatacatgcatgcacgtgctccataaatgtccccagacttccctttccctcttagtccccactgctgagatgctggtggaggctgatgcattcctgtgagcacctccccttcccacacacacagactccgtcctcctgtgcaagctcagggtttgtgtcccagctcaggtgagcccatggggttgccataattgtaagacactccaggttctaacgtaaaatttcctcttctgactta

SEQ ID NO: 367905 - DNA, 6296 bp, Homo sapiens
gttagcggcgtctcggttgccatggagaccaggagctccaaaacgcggaggtctttagcgtcccggaccaacgagtgccaggggacaatgtgggcgccaacttcgccaccagccgggtccagcagccccagccagcccacctggaagtcctccttgtattcctccctcgcctactctgaggccttccactacagcttcgcagcccggccccgccgcctcacgcagcttgcgctggcgcagcgtcccgagcctcagctgcttcgtctgcgcccctcctcgctgcgcacccaagatatctcgcacttgctcaccggcgtcttccgcaacttgtactcagccgaggtcatcggcgacgaagtgagcgcaagcttgatcaaggcccgcggcagcgagaatgagcgccacgaggagttcgtggaccagctgcagcagattcgggagctctataagcagcggctggatgagtttgaaatgttggagagacatatcactcaggcccaagcacgggctattgcggaaaatgagcgggtcatgagccaggctggagtacaggacctcgagagccttgtcaggttgcctccagtgaagagtgtctccagatggtgtatagacagcgagttgctacggaaacatcatttgatctccccagaagattactacaccgatacagtgccgtttcactctgcacctaaaggcatctccctacctggatgttcaaaactgacatttagctgtgagaagcgttccgtccagaagaaagagctgaacaagaagcttgaagattcatgcaggaagaagcttgctgagttcgaagatgagttagaccacactgtggacagcctgacatggaatttaactcctaaggccaaagaaaggaccagagaacctctcaagaaagcaagtcaaccaaggaataaaaactggatgaaccacttacgtgtgccacagagagagctagacagacttctgcttgccagaatggagagtcggaaccacttcctaaaaaatccccgtttttttcctcctaacactcgatatggaggcaagtctcttgtttttcctccaaagaagccagcaccgataggagaattccagagtacagagccagaacagagttgtgctgatactccagtgtttctagctaagccaccaattgggtttttcacagattatgaaattggtccagtttatgagatggtaattgcgctgcagaacaccaccacgaccagccgctacctgcgagtcctcccgccttccacgccatacttcgctctgggactggggatgttcccaggaaaaggtggaatggtggctcctggaatgacctgccagtacattgtccagttttttcccgactgccttggggattttgatgattttattttagtggagacccagtcagcccacacacttctgatccccctgcaggcccggaggccgccccccgtgctgacattgtcaccggtgttggactgtggttactgcctcattgggggagtcaagatgaccagattcatctgcaaaaatgtgggtttcagtgttggcaggttctgcattatgcccaaaacaagctggccaccactaagtttcaaggccattgcaaccgtcggctttgttgaacaacctccttttggaatcctgccttcggtgtttgagctggccccgggacatgctatattagtggaggtcttgttttccccaaagagcctaggaaaggcagagcagaccttcatcatcatgtgcgacaactgccagataaaggagctggtgaccataggaattgggcagctgattgctttggatctgatctatatttctggtgaaaaaagccagccagaccctggagagctcacagacttaacagcccagcacttcatacgatttgagcctgaaaaccttcggtccacggctaggaagcagctgattattagaaatgctacgcacgtggagctggccttctactggcagatcatgaagcccaacctgcagcccctcatgcctggagaaaccttcagcatggacagcatcaagtgctaccccgacaaggagactgccttctccatcatgcccagaaagggggttctaagcccccacacagaccacgagttcatcctgagcttttctcctcatgaggttcagatggtgtcatctcagtagccacacatggttggatcatgtatttagaccccccacctgtgttcctcaatcacactgaagccacagctgggcccaccgaggtgctatcctgcccaggccagcacttggctgagttgggttggagtacacacctggtgtgcagggtgaagcagctcattttgtctggtcctgatcccagactcaccccatctgcagcaagacccttggctggcttcctccgctctgggtgtctcccacatgtctactatggcaaaaaacattaccatccccacccataccacagcatcccctagagagagtgaggtgcagggacccgagggccaggttagcacagcgctggccccagcatggagggaagccctgtgggccacggtaggctagaagggaattcgagctgggcatgaaaaggatgctccggggccattgttagtgggtttggggctgaaatgagtgatcctgcctctggtcccagcatccagctgcctcgttgtctatcctgggagggtgtggtgcttcggacacgttgaggggctttgtcagcatcaggaaggcctttgcttcttgcacccaggcccagctgagacaggcccctgagtcctggctcatgttctggcagcaaacttcacttttcctaaggaagggaagaaggaggcagcagggaagcaaccctgggttttcagaaggtccttctgatggctaggctaaggggaggaagaattcctgccatgccccagccttctccaggacaacctgctggaacgcagtggtgttttcagggcactgtgtttgccttgcagctgagggattttcacagtgtgctccagatggtgctagaggaagtcccagagcctgtaagttcagaagcggagagcctggggcactcctcctactctgtggatgatgtgattgtcctggaaatcgaggtgaaaggctcagtagaacctttccaggttctcttagagccatatgccctcatcatcccaggggagaactacattgggataaatgtgaagaaggcttttaagatgtggaacaacagcaagtcacccatcagatacctgtgggggaagatcagcgactgccacatcattgaagtggagcccggcacaggggtcatagagcccagtgaggtcggggattttgagttgaactttactgggggtgtccctggccccacaagccaggacctgctgtgtgaaatcgaagactcgccctcgccagtggtgttacacattgaggctgtctttaagcccttcagtttggtctgctccgcctggggcagaaagccacaaactccatccagatccggaacgtcagccagctcccagccacatggcgcatgaaggagagcccagtctccctccaggaaaggcctgaggatgtgtctcccttcgacattgagccttcgagtggccagcttcactctctgggggagtgcagggtggacatcaccttggaggccctgcactgccagcatctggagaccgtcctggagctggaggtggaaaatggtgcctggagctaccttcctgtgtatgctgaggtacagaagccccatgtgtacctacagagcagccaggtggaggttagaaatctctacctgggtgtgcccacgaagacaaccatcacacttatcaatggcacgctcctgcctacccagttccactggggcaagctcctcggacaccaagcagaattctgcatggtgacagtctcccccaaacatggcctgctgggcccaagtgaggagtgccagctcaagttggagttgactgctcatacccaggaagagctgacccatctggccctcccttgtcacgtgtcaggcatgaagaagccactggttctaggcatttctgggaagccccagggactgcaagtggccattaccatctctaaggagagctctgattgcagcacagagcagtggccaggccacccaaaggagctccgcctggactttggctcagcggtgccactgaggacccgtgtgactcgccagctcattctcaccaatcgctccccaatacggacccgtttctccctcaagtttgagtatttcgggagcccccaaaacagcctgagcaaaaagaccagccttcccaacatgcctcctgccctgctaaagacagtgcggatgcaagagcacctggccaagcgagagcagctgggctgtgccaacatgtggggcgagtactgggacaacctcatctgcacggtgggagacctgctgccggaagtcatcccagtgcacatggcagcggtgggctgccccatcagctccctgaggaccacctcctacactattgaccaggcccagaaggaaccagccatgaggttcggcacccaggtctccggaggagacacagttacccgaacccttcgcctgaataactccagcccctgtgacatccgcctggattgggagacctatgttccagaagacaaggaagaccggctggtggagctgctggtgttttatgggccacctttcccgctgcgggaccaagccgggaatgagcttgtgtgccctgatacccctgagggtggctgcctcctctggtccccaggcccctccagttcatcggaattcagccatgaaactgactcatcagttgagggcagctccagtgccagcaatagggtggcacagaagctcatctcagtcatcctgcaggcacatgagggggtgccctccggccacctgtactgtatcagccccaagcaggtggtggtccctgctgggggcagcagtaccatctacatctccttcacccctatggtgctcagccctgagatcctgcacaaggtggagtgtactggctacgccctgggtttcatgagcttggacagcaaggtggaaagggagattccacggaagaggcatcgcctgcaggactttgcggtgggacccctgaaactggacctgcatagctacgtgaggcctgcacagctaagtgtggagctggactacggcggcagtatggaattccagtgccaggccagtgacctcattcccgagcagccctgctctggggtgctgagtgagctggtgaccacccaccacctgaagctgaccaacactacagagatcccacactacttccggcttatggtctccaggcccttctccgtttctcaagatggggcgagccaggaccacagagctcctggccctggccagaagcaggagtgtgaggaggagacagcctcagcggacaagcagctggtgctccaagcacaggagaacatgctggtgaacgtgtccttctcactctccctggagctgctctcctatcagaagctcccagctgaccagacactgcctggggtggacattcagcagagtgcgagtggagagagagagatggtgtttactcagaacctgctcctggagtacaccaaccagaccactcaggtggtgcccctgcgggctgtggtggccgtgcctgagctgcagctctccaccagctgggtggactttgggacctgctttgtgagccagcagcgagtccgggaggtctacctgatgaacctgagcgggtgccgaagctactggactatgctgatgggccagcaggagccagccaaggccgctgtggccttcagggtctccccaaacagtgggctgctagaagcacgatccgccaatgcacccccaacctccatcgcgttgcaggttttcttcactgccaggagtagtgagctgtacgagtccacgatggtggtggaaggtgtgctcggtgagaagtcctgcaccctgcggctccggggccaaggctcctatgatgagagatacatgttgcctcaccagccctgaggctccgccccagccctcagccccaggccccagctggagaaaaaacattgcccagggattaggagcagctcttcagcacaaagacacagacttggggacctggggacctctgggcagctcctggaatggaagaacccccttccacaatggtctcagcctaggccctcatgatatgtcctcagagctaacataaaggacaggccacaccacagcagagaccaccacattgagatcactactcagtgcatagcgaagaccagtatggcaaaattagtcttggaaaaaaaccacagccactaagataaattcatgcactttt

SEQ ID NO: 367906 - DNA, 4102 bp, Homo sapiens
aggggacagggctgtaggtaccctgggcttgcccacatgaggcccagcaactgggagccatgccagcatgccgctggccagggacggtttgtgcagagtttgaggcctctctcagcatcatgggtgggcaggaaaggtgggtctgtggttggcagctcaatgaaacaggagtctgaggatgaagcctggtgtctgggcagcttctgcatgcccacccaagatggctccctgggcagggccaagggtggtgtgttacatagtaccaatgggcacaggacagtgttttcagcacagagcagtggccaggccacccaaaggagctccgcctggactttggctcagcggtgccactgaggacccgtgtgactcgccagctcattctcaccaatcgctccccaatacggacccgtttctccctcaagtttgagtatttcgggagcccccaaaacagcctgagcaaaaagaccagccttcccaacatgcctcctgccctgctaaagacagtgcggatgcaagagcacctggccaagcgagagcagctggattttatggagagcatgctatcccacgggaaaggagctgctttcttccctcacttttcccagggcatgctggggccctaccagcagctgtgcattgacatcacaggctgtgccaacatgtggggcgagtactgggacaacctcatctgcacggtgggagacctgctgccggaagtcatcccagtgcacatggcagcggtgggctgccccatcagctccctgaggaccacctcctacactattgaccaggcccagaaggaaccagccatgaggttcggcacccaggtctccggaggagacacagttacccgaacccttcgcctgaataactccagcccctgtgacatccgcctggattgggagacctatgttccagaagacaaggaagaccggctggtggagctgctggtgttttatgggccacctttcccgctgcgggaccaagccgggaatgagcttgtgtgccctgatacccctgagggtggctgcctcctctggtccccaggcccctccagttcatcggaattcagccatgaaactgactcatcagttgagggcagctccagtgccagcaatagggtggcacagaagctcatctcagtcatcctgcaggcacatgagggggtgccctccggccacctgtactgtatcagccccaagcaggtggtggtccctgctgggggcagcagtaccatctacatctccttcacccctatggtgctcagccctgagatcctgcacaaggtggagtgtactggctacgccctgggtttcatgagcttggacagcaaggtgagctcttccggcctggggtgggggccgcagccactgctccctcctgggtagcatgctgcctactcagcccagggatcagctgtgatcagacttgggctcagtaggtggaaagggagattccacggaagaggcatcgcctgcaggactttgcggtgggacccctgaaactggacctgcatagctacgtgaggcctgcacagtgagtcagctggggtgccccatctcctttcatccccatggggtgcaccctcaccaggcactggtggagccaggcagggttctcagagcaaaaggacgggcatgggtggagaagtcagcagaggagcccagggaaaggctggcccgaggctggatgagcagagtgggggcagccagaaggccccaggcgcccggcttgccccaacaatgcctattgctgggcaggctaagtgtggagctggactacggcggcagtatggaattccagtgccaggccagtgacctcattcccgagcagccctgctctggggtgctgagtgagctggtgaccacccaccacctgaagctgaccaacactacagagatcccacactacttccggcttatggtctccaggcccttctccgtttctcaagatggggcgagccaggaccacagagctcctggccctggccagaagcaggagtgtgaggaggagacagcctcagcggacaagcagctggtgctccaagcacaggagaacatgctggtgaacgtgtccttctcactctccctggagctgctctcctatcagaagctcccagctgaccagacactgcctggggtggacattcagcagagtgcgagtggagagagagagatggtgtttactcagaacctgctcctggagtacaccaaccagaccactcaggtggtgcccctgcgggctgtggtggccgtgcctgagctgcagctctccaccagctgggtggactttgggacctgctttgtgagccagcagcgagtccgggaggtctacctgatgaacctgagcgggtgccgaagctactggactatgctgatgggagtagtgagctgtacgagtccacgatggtggtggaaggtgtgctcggtgagaagtcctgcaccctgcggctccggggccaaggctcctatgatgagagatacatgttgcctcaccagccctgaggctccgccccagccctcagccccaggccccagctggagaaaaaacattgcccagggattaggagcagctcttcagcacaaagacacagacttggggacctggggacctctgggcagctcctggaatggaagaacccccttccacaatggtctcagcctaggccctcatgatatgtcctcagagctaacataaaggacaggccacaccacagcagagaccaccacattgagatcactactcagtgcatagcgaagaccagtatggcaaaattagtcttggaaaaaaaccacagccactaagataaattcatgcacttttactatgcacattgcacttctcatccatggatttgccttgccttaagaattaaccatggccttgtggcctgggtgacccaggctgcttttatcttgcacagctaaagagggtctgatgggtggctcaacaccccacccactcctataccatgtcatcagtgttcacattttccaaatgagttgaagtgccttgatctgtccactgccaccaccaccagtgctgagttttcccatgtggttttgcttttgtggtgttactgccttgctgctagagcagcaggactgtctgcgtagcgcctccagcctgggacctcactcagttcccagggtattcaaagacggcagcggctcccattccagtcccgatgcacatggacaccactccgtatgccctgtgaaaacaaaacttaattggctgggcaaaggcacccaccaaattacctccagaccaggctgacccagaaggacgtcatggacaagtaggatgcaaaaccatcagaccagatctgtgggcaagcggtaccctggcctcccacttgggcacacacacggtgacagatgcccactgcaggctagtatccctttcaaggctggcccttaaggaaaacagggatcatgcccctacatcctaagttcagggtgtttctgtgtgcatgttcccctccccagggatcgatcataatcccaaaagacacaatcccaaacacaatcatcccaaatgttgaaatcctggaagaacaaaatccctaaagtctaaaatcctgaaaatcacaatcctaaaagatcaaaatcctgaaaatataattctggaaaaaataatttggaagcctggcctggtggcatctacttgtagtcccagctattcagcaggctgaggcaagaggatcacttgtgcctaggagttcaagaccagcctaggcaatatagcaagaccccatcttagaaaaaaacttttttaaaagattgatttaaaagatatttacatttttaggccaggtgtggtggctcaaacctgtaatcccaacactttgggaggccgaggcgggaggatcacgaggtcaggagttcaagaccagcctcgccaacatggtgaaaccctgtctccaccaaaaatacaaaaattagctgggtgtggtggcagacacctataatcccagatactcgggaggctgaggctgaggcaggaaaattgcttgaacccaaaaggcagaggttgcagtgagccgagatcacaccactgcactccagccagcctggacaacggagtgagattccatgtc

SEQ ID NO: 367907 - DNA, 393 bp, Homo sapiens
gtaagttcagtaagaaatctcaaaagtttctctgctatccaccaaagaaattctaagccatagggccaggcatggccccacctgacctttctggatggatggtgtcatttccccccaggctctggcatgcttacctggagtcgccacccttgcagcctgctcccctcgcatgcccttttcctgccatcagcgcggctttggcgccagaaggcacttacagagccagccctggcagggctggggtctgtaccagctgagctcaagccctggtggctggctgctcccaggatcctcacttgtcacttttgtcatgcacagggatgttcccaggaaaaggtggaatggtggctcctggaatgacctgccagtacattgtccagttttttcccgact

SEQ ID NO: 367908 - DNA, 6887 bp, Homo sapiens
gttagcggcgtctcggttgccatggagaccaggagctccaaaacgcggaggtctttagcgtcccggaccaacgagtgccaggggacaatgtgggcgccaacttcgccaccagccgggtccagcagccccagccagcccacctggaagtcctccttgtattcctccctcgcctactctgaggccttccactacagcttcgcagcccggccccgccgcctcacgcagcttgcgctggcgcagcgtcccgagcctcagctgcttcgtctgcgcccctcctcgctgcgcacccaagatatctcgcacttgctcaccggcgtcttccgcaacttgtactcagccgaggtcatcggcgacgaagtgagcgcaagcttgatcaaggcccgcggcagcgagaatgagcgccacgaggagttcgtggaccagctgcagcagattcgggagctctataagcagcggctggatgagtttgaaatgttggagagacatatcactcaggcccaagcacgggctattgcggaaaatgagcgggtcatgagccaggctggagtacaggacctcgagagccttgtcaggttgcctccagtgaagagtgtctccagatggtgtatagacagcgagttgctacggaaacatcatttgatctccccagaagattactacaccgatacagtgccgtttcactctgcacctaaaggcatctccctacctggatgttcaaaactgacatttagctgtgagaagcgttccgtccagaagaaagagctgaacaagaagcttgaagattcatgcaggaagaagcttgctgagttcgaagatgagttagaccacactgtggacagcctgacatggaatttaactcctaaggccaaagaaaggaccagagaacctctcaagaaagcaagtcaaccaaggaataaaaactggatgaaccacttacgtgtgccacagagagagctagacagacttctgcttgccagaatggagagtcggaaccacttcctaaaaaatccccgtttttttcctcctaacactcgatatggaggcaagtctcttgtttttcctccaaagaagccagcaccgataggagaattccagagtacagagccagaacagagttgtgctgatactccagtgtttctagctaagccaccaattgggtttttcacagattatgaaattggtccagtttatgagatggtaattgcgctgcagaacaccaccacgaccagccgctacctgcgagtcctcccgccttccacgccatacttcgctctgggactggggatgttcccaggaaaaggtggaatggtggctcctggaatgacctgccagtacattgtccagttttttcccgactgccttggggattttgatgattttattttagtggagacccagtcagcccacacacttctgatccccctgcaggcccggaggccgccccccgtgctgacattgtcaccggtgttggactgtggttactgcctcattgggggagtcaagatgaccagattcatctgcaaaaatgtgggtttcagtgttggcaggttctgcattatgcccaaaacaagctggccaccactaagtttcaaggccattgcaaccgtcggctttgttgaacaacctccttttggaatcctgccttcggtgtttgagctggccccgggacatgctatattagtggaggtcttgttttccccaaagagcctaggaaaggcagagcagaccttcatcatcatgtgcgacaactgccagataaaggagctggtgaccataggaattgggcagctgattgctttggatctgatctatatttctggtgaaaaaagccagccagaccctggagagctcacagacttaacagcccagcacttcatacgatttgagcctgaaaaccttcggtccacggctaggaagcagctgattattagaaatgctacgcacgtggagctggccttctactggcagatcatgaagcccaacctgcagcccctcatgcctggagaaaccttcagcatggacagcatcaagtgctaccccgacaaggagactgccttctccatcatgcccagaaagggggttctaagcccccacacagaccacgagttcatcctgagcttttctcctcatgagctgagggattttcacagtgtgctccagatggtgctagaggaagtcccagagcctgtaagttcagaagcggagagcctggggcactcctcctactctgtggatgatgtgattgtcctggaaatcgaggtgaaaggctcagtagaacctttccaggttctcttagagccatatgccctcatcatcccaggggagaactacattgggataaatgtgaagaaggcttttaagatgtggaacaacagcaagtcacccatcagatacctgtgggggaagatcagcgactgccacatcattgaagtggagcccggcacaggggtcatagagcccagtgaggtcggggattttgagttgaactttactgggggtgtccctggccccacaagccaggacctgctgtgtgaaatcgaagactcgccctcgccagtggtgttacacattgaggctgtctttaaggggcctgccctcatcatcaacgtctcagcccttcagtttggtctgctccgcctggggcagaaagccacaaactccatccagatccggaacgtcagccagctcccagccacatggcgcatgaaggagagcccagtctccctccaggaaaggcctgaggatgtgtctcccttcgacattgagccttcgagtggccagcttcactctctgggggagtgcagggtggacatcaccttggaggccctgcactgccagcatctggagaccgtcctggagctggaggtggaaaatggtgcctggagctaccttcctgtgtatgctgaggtacagaagccccatgtgtacctacagagcagccaggtggaggttagaaatctctacctgggtgtgcccacgaagacaaccatcacacttatcaatggcacgctcctgcctacccagttccactggggcaagctcctcggacaccaagcagaattctgcatggtgacagtctcccccaaacatggcctgctgggcccaagtgaggagtgccagctcaagttggagttgactgctcatacccaggaagagctgacccatctggccctcccttgtcacgtgtcaggcatgaagaagccactggttctaggcatttctgggaagccccagggactgcaagtggccattaccatctctaaggagagctctgattgcagcacagagcagtggccaggccacccaaaggagctccgcctggactttggctcagcggtgccactgaggacccgtgtgactcgccagctcattctcaccaatcgctccccaatacggacccgtttctccctcaagtttgagtatttcgggagcccccaaaacagcctgagcaaaaagaccagccttcccaacatgcctcctgccctgctaaagacagtgcggatgcaagagcacctggccaagcgagagcagctggattttatggagagcatgctatcccacgggaaaggagctgctttcttccctcacttttcccagggcatgctggggccctaccagcagctgtgcattgacatcacaggctgtgccaacatgtggggcgagtactgggacaacctcatctgcacggtgggagacctgctgccggaagtcatcccagtgcacatggcagcggtgggctgccccatcagctccctgaggaccacctcctacactattgaccaggcccagaaggaaccagccatgaggttcggcacccaggtctccggaggagacacagttacccgaacccttcgcctgaataactccagcccctgtgacatccgcctggattgggagacctatgttccagaagacaaggaagaccggctggtggagctgctggtgttttatgggccacctttcccgctgcgggaccaagccgggaatgagcttgtgtgccctgatacccctgagggtggctgcctcctctggtccccaggcccctccagttcatcggaattcagccatgaaactgactcatcagttgagggcagctccagtgccagcaatagggtggcacagaagctcatctcagtcatcctgcaggcacatgagggggtgccctccggccacctgtactgtatcagccccaagcaggtggtggtccctgctgggggcagcagtaccatctacatctccttcacccctatggtgctcagccctgagatcctgcacaaggtggagtgtactggctacgccctgggtttcatgagcttggacagcaaggtggaaagggagattccacggaagaggcatcgcctgcaggactttgcggtgggacccctgaaactggacctgcatagctacgtgaggcctgcacagctaagtgtggagctggactacggcggcagtatggaattccagtgccaggccagtgacctcattcccgagcagccctgctctggggtgctgagtgagctggtgaccacccaccacctgaagctgaccaacactacagagatcccacactacttccggcttatggtctccaggcccttctccgtttctcaagatggggcgagccaggaccacagagctcctggccctggccagaagcaggagtgtgaggaggagacagcctcagcggacaagcagctggtgctccaagcacaggagaacatgctggtgaacgtgtccttctcactctccctggagctgctctcctatcagaagctcccagctgaccagacactgcctggggtggacattcagcagagtgcgagtggagagagagagatggtgtttactcagaacctgctcctggagtacaccaaccagaccactcaggtggtgcccctgcgggctgtggtggccgtgcctgagctgcagctctccaccagctgggtggactttgggacctgctttgtgagccagcagcgagtccgggaggtctacctgatgaacctgagcgggtgccgaagctactggactatgctgatgggccagcaggagccagccaaggccgctgtggccttcagggtctccccaaacagtgggctgctagaagcacgatccgccaatgcacccccaacctccatcgcgttgcaggttttcttcactgccaggagtagtgagctgtacgagtccacgatggtggtggaaggtgtgctcggtgagaagtcctgcaccctgcggctccggggccaaggctcctatgatgagagatacatgttgcctcaccagccctgaggctccgccccagccctcagccccaggccccagctggagaaaaaacattgcccagggattaggagcagctcttcagcacaaagacacagacttggggacctggggacctctgggcagctcctggaatggaagaacccccttccacaatggtctcagcctaggccctcatgatatgtcctcagagctaacataaaggacaggccacaccacagcagagaccaccacattgagatcactactcagtgcatagcgaagaccagtatggcaaaattagtcttggaaaaaaaccacagccactaagataaattcatgcacttttactatgcacattgcacttctcatccatggatttgccttgccttaagaattaaccatggccttgtggcctgggtgacccaggctgcttttatcttgcacagctaaagagggtctgatgggtggctcaacaccccacccactcctataccatgtcatcagtgttcacattttccaaatgagttgaagtgccttgatctgtccactgccaccaccaccagtgctgagttttcccatgtggttttgcttttgtggtgttactgccttgctgctagagcagcaggactgtctgcgtagcgcctccagcctgggacctcactcagttcccagggtattcaaagacggcagcggctcccattccagtcccgatgcacatggacaccactccgtatgccctgtgaaaacaaaacttaattggctgggcaaaggcacccaccaaattacctccagaccaggctgacccagaaggacgtcatggacaagtaggatgcaaaaccatcagaccagatctgtgggcaagcggtaccctggcctcccacttgggcacacacacggtgacagatgcccactgcaggctagtatccctttcaaggctggcccttaaggaaaacagggatcatgcccctacatcctaagttcagggtgtttctgtgtgcatgttcccctccccagggatcgatcataatcccaaaagacacaatcccaaacacaatcatcccaaatgttgaaatcctggaagaacaaaatccctaaagtctaaaatcctgaaaatcacaatcctaaaagatcaaaatcctgaaaatataattctggaaaaaataatttggaagcctggcctggtggcatctacttgtagtcccagctattcagcaggctgaggcaagaggatcacttgtgcctaggagttcaagaccagcctaggcaatatagcaagaccccatcttagaaaaaaacttttttaaaagattgatttaaaagatatttacatttttaggccaggtgtggtggctcaaacctgtaatcccaacactttgggaggccgaggcgggaggatcacgaggtcaggagttcaagaccagcctcgccaacatggtgaaaccctgtctccaccaaaaatacaaaaattagctgggtgtggtggcagacacctataatcccagatactcgggaggctgaggctgaggcaggaaaattgcttgaacccaaaaggcagaggttgcagtgagccgagatcacaccactgcactccagccagcctggacaacggagtgagattccatgtc

SEQ ID NO: 367909 - DNA, 6796 bp, Homo sapiens
gttagcggcgtctcggttgccatggagaccaggagctccaaaacgcggaggtctttagcgtcccggaccaacgagtgccaggggacaatgtgggcgccaacttcgccaccagccgggtccagcagccccagccagcccacctggaagtcctccttgtattcctccctcgcctactctgaggccttccactacagcttcgcagcccggccccgccgcctcacgcagcttgcgctggcgcagcgtcccgagcctcagctgcttcgtctgcgcccctcctcgctgcgcacccaagatatctcgcacttgctcaccggcgtcttccgcaacttgtactcagccgaggtcatcggcgacgaagtgagcgcaagcttgatcaaggcccgcggcagcgagaatgagcgccacgaggagttcgtggaccagctgcagcagattcgggagctctataagcagcggctggatgagtttgaaatgttggagagacatatcactcaggcccaagcacgggctattgcggaaaatgagcgggtcatgagccaggctggagtacaggacctcgagagccttgtcaggttgcctccagtgaagagtgtctccagatggtgtatagacagcgagttgctacggaaacatcatttgatctccccagaagattactacaccgatacagtgccgtttcactctgcacctaaaggcatctccctacctggatgttcaaaactgacatttagctgtgagaagcgttccgtccagaagaaagagctgaacaagaagcttgaagattcatgcaggaagaagcttgctgagttcgaagatgagttagaccacactgtggacagcctgacatggaatttaactcctaaggccaaagaaaggaccagagaacctctcaagaaagcaagtcaaccaaggaataaaaactggatgaaccacttacgtgtgccacagagagagctagacagacttctgcttgccagaatggagagtcggaaccacttcctaaaaaatccccgtttttttcctcctaacactcgatatggaggcaagtctcttgtttttcctccaaagaagccagcaccgataggagaattccagagtacagagccagaacagagttgtgctgatactccagtgtttctagctaagccaccaattgggtttttcacagattatgaaattggtccagtttatgagatggtaattgcgctgcagaacaccaccacgaccagccgctacctgcgagtcctcccgccttccacgccatacttcgctctgggactggggatgttcccaggaaaaggtggaatggtggctcctggaatgacctgccagtacattgtccagttttttcccgactgccttggggattttgatgattttattttagtggagacccagtcagcccacacacttctgatccccctgcaggcccggaggccgccccccgtgctgacattgtcaccggtgttggactgtggttactgcctcattgggggagtcaagatgaccagattcatctgcaaaaatgtgggtttcagtgttggcaggttctgcattatgcccaaaacaagctggccaccactaagtttcaaggccattgcaaccgtcggctttgttgaacaacctccttttggaatcctgccttcggtgtttgagctggccccgggacatgctatattagtggaggaattgggcagctgattgctttggatctgatctatatttctggtgaaaaaagccagccagaccctggagagctcacagacttaacagcccagcacttcatacgatttgagcctgaaaaccttcggtccacggctaggaagcagctgattattagaaatgctacgcacgtggagctggccttctactggcagatcatgaagcccaacctgcagcccctcatgcctggagaaaccttcagcatggacagcatcaagtgctaccccgacaaggagactgccttctccatcatgcccagaaagggggttctaagcccccacacagaccacgagttcatcctgagcttttctcctcatgagctgagggattttcacagtgtgctccagatggtgctagaggaagtcccagagcctgtaagttcagaagcggagagcctggggcactcctcctactctgtggatgatgtgattgtcctggaaatcgaggtgaaaggctcagtagaacctttccaggttctcttagagccatatgccctcatcatcccaggggagaactacattgggataaatgtgaagaaggcttttaagatgtggaacaacagcaagtcacccatcagatacctgtgggggaagatcagcgactgccacatcattgaagtggagcccggcacaggggtcatagagcccagtgaggtcggggattttgagttgaactttactgggggtgtccctggccccacaagccaggacctgctgtgtgaaatcgaagactcgccctcgccagtggtgttacacattgaggctgtctttaaggggcctgccctcatcatcaacgtctcagcccttcagtttggtctgctccgcctggggcagaaagccacaaactccatccagatccggaacgtcagccagctcccagccacatggcgcatgaaggagagcccagtctccctccaggaaaggcctgaggatgtgtctcccttcgacattgagccttcgagtggccagcttcactctctgggggagtgcagggtggacatcaccttggaggccctgcactgccagcatctggagaccgtcctggagctggaggtggaaaatggtgcctggagctaccttcctgtgtatgctgaggtacagaagccccatgtgtacctacagagcagccaggtggaggttagaaatctctacctgggtgtgcccacgaagacaaccatcacacttatcaatggcacgctcctgcctacccagttccactggggcaagctcctcggacaccaagcagaattctgcatggtgacagtctcccccaaacatggcctgctgggcccaagtgaggagtgccagctcaagttggagttgactgctcatacccaggaagagctgacccatctggccctcccttgtcacgtgtcaggcatgaagaagccactggttctaggcatttctgggaagccccagggactgcaagtggccattaccatctctaaggagagctctgattgcagcacagagcagtggccaggccacccaaaggagctccgcctggactttggctcagcggtgccactgaggacccgtgtgactcgccagctcattctcaccaatcgctccccaatacggacccgtttctccctcaagtttgagtatttcgggagcccccaaaacagcctgagcaaaaagaccagccttcccaacatgcctcctgccctgctaaagacagtgcggatgcaagagcacctggccaagcgagagcagctggattttatggagagcatgctatcccacgggaaaggagctgctttcttccctcacttttcccagggcatgctggggccctaccagcagctgtgcattgacatcacaggctgtgccaacatgtggggcgagtactgggacaacctcatctgcacggtgggagacctgctgccggaagtcatcccagtgcacatggcagcggtgggctgccccatcagctccctgaggaccacctcctacactattgaccaggcccagaaggaaccagccatgaggttcggcacccaggtctccggaggagacacagttacccgaacccttcgcctgaataactccagcccctgtgacatccgcctggattgggagacctatgttccagaagacaaggaagaccggctggtggagctgctggtgttttatgggccacctttcccgctgcgggaccaagccgggaatgagcttgtgtgccctgatacccctgagggtggctgcctcctctggtccccaggcccctccagttcatcggaattcagccatgaaactgactcatcagttgagggcagctccagtgccagcaatagggtggcacagaagctcatctcagtcatcctgcaggcacatgagggggtgccctccggccacctgtactgtatcagccccaagcaggtggtggtccctgctgggggcagcagtaccatctacatctccttcacccctatggtgctcagccctgagatcctgcacaaggtggagtgtactggctacgccctgggtttcatgagcttggacagcaaggtggaaagggagattccacggaagaggcatcgcctgcaggactttgcggtgggacccctgaaactggacctgcatagctacgtgaggcctgcacagctaagtgtggagctggactacggcggcagtatggaattccagtgccaggccagtgacctcattcccgagcagccctgctctggggtgctgagtgagctggtgaccacccaccacctgaagctgaccaacactacagagatcccacactacttccggcttatggtctccaggcccttctccgtttctcaagatggggcgagccaggaccacagagctcctggccctggccagaagcaggagtgtgaggaggagacagcctcagcggacaagcagctggtgctccaagcacaggagaacatgctggtgaacgtgtccttctcactctccctggagctgctctcctatcagaagctcccagctgaccagacactgcctggggtggacattcagcagagtgcgagtggagagagagagatggtgtttactcagaacctgctcctggagtacaccaaccagaccactcaggtggtgcccctgcgggctgtggtggccgtgcctgagctgcagctctccaccagctgggtggactttgggacctgctttgtgagccagcagcgagtccgggaggtctacctgatgaacctgagcgggtgccgaagctactggactatgctgatgggccagcaggagccagccaaggccgctgtggccttcagggtctccccaaacagtgggctgctagaagcacgatccgccaatgcacccccaacctccatcgcgttgcaggttttcttcactgccaggagtagtgagctgtacgagtccacgatggtggtggaaggtgtgctcggtgagaagtcctgcaccctgcggctccggggccaaggctcctatgatgagagatacatgttgcctcaccagccctgaggctccgccccagccctcagccccaggccccagctggagaaaaaacattgcccagggattaggagcagctcttcagcacaaagacacagacttggggacctggggacctctgggcagctcctggaatggaagaacccccttccacaatggtctcagcctaggccctcatgatatgtcctcagagctaacataaaggacaggccacaccacagcagagaccaccacattgagatcactactcagtgcatagcgaagaccagtatggcaaaattagtcttggaaaaaaaccacagccactaagataaattcatgcacttttactatgcacattgcacttctcatccatggatttgccttgccttaagaattaaccatggccttgtggcctgggtgacccaggctgcttttatcttgcacagctaaagagggtctgatgggtggctcaacaccccacccactcctataccatgtcatcagtgttcacattttccaaatgagttgaagtgccttgatctgtccactgccaccaccaccagtgctgagttttcccatgtggttttgcttttgtggtgttactgccttgctgctagagcagcaggactgtctgcgtagcgcctccagcctgggacctcactcagttcccagggtattcaaagacggcagcggctcccattccagtcccgatgcacatggacaccactccgtatgccctgtgaaaacaaaacttaattggctgggcaaaggcacccaccaaattacctccagaccaggctgacccagaaggacgtcatggacaagtaggatgcaaaaccatcagaccagatctgtgggcaagcggtaccctggcctcccacttgggcacacacacggtgacagatgcccactgcaggctagtatccctttcaaggctggcccttaaggaaaacagggatcatgcccctacatcctaagttcagggtgtttctgtgtgcatgttcccctccccagggatcgatcataatcccaaaagacacaatcccaaacacaatcatcccaaatgttgaaatcctggaagaacaaaatccctaaagtctaaaatcctgaaaatcacaatcctaaaagatcaaaatcctgaaaatataattctggaaaaaataatttggaagcctggcctggtggcatctacttgtagtcccagctattcagcaggctgaggcaagaggatcacttgtgcctaggagttcaagaccagcctaggcaatatagcaagaccccatcttagaaaaaaacttttttaaaagattgatttaaaagatatttacatttttaggccaggtgtggtggctcaaacctgtaatcccaacactttgggaggccgaggcgggaggatcacgaggtcaggagttcaagaccagcctcgccaacatggtgaaaccctgtctccaccaaaaatacaaaaattagctgggtgtggtggcagacacctataatcccagatactcgggaggctgaggctgaggcaggaaaattgcttgaacccaaaaggcagaggttgcagtgagccgagatcacaccactgcactccagccagcctggacaacggagtgagattccatgtc

SEQ ID NO: 367910 - DNA, 6763 bp, Homo sapiens
gttagcggcgtctcggttgccatggagaccaggagctccaaaacgcggaggtctttagcgtcccggaccaacgagtgccaggggacaatgtgggcgccaacttcgccaccagccgggtccagcagccccagccagcccacctggaagtcctccttgtattcctccctcgcctactctgaggccttccactacagcttcgcagcccggccccgccgcctcacgcagcttgcgctggcgcagcgtcccgagcctcagctgcttcgtctgcgcccctcctcgctgcgcacccaagatatctcgcacttgctcaccggcgtcttccgcaacttgtactcagccgaggtcatcggcgacgaagtgagcgcaagcttgatcaaggcccgcggcagcgagaatgagcgccacgaggagttcgtggaccagctgcagcagattcgggagctctataagcagcggctggatgagtttgaaatgttggagagacatatcactcaggcccaagcacgggctattgcggaaaatgagcgggtcatgagccaggctggagtacaggacctcgagagccttgtcaggttgcctccagtgaagagtgtctccagatggtgtatagacagcgagttgctacggaaacatcatttgatctccccagaagattactacaccgatacagtgccgtttcactctgcacctaaaggcatctccctacctggatgttcaaaactgacatttagctgtgagaagcgttccgtccagaagaaagagctgaacaagaagcttgaagattcatgcaggaagaagcttgctgagttcgaagatgagttagaccacactgtggacagcctgacatggaatttaactcctaaggccaaagaaaggaccagagaacctctcaagaaagcaagtcaaccaaggaataaaaactggatgaaccacttacgtgtgccacagagagagctagacagacttctgcttgccagaatggagagtcggaaccacttcctaaaaaatccccgtttttttcctcctaacactcgatatggaggcaagtctcttgtttttcctccaaagaagccagcaccgataggagaattccagagtacagagccagaacagagttgtgctgatactccagtgtttctagctaagccaccaattgggtttttcacagattatgaaattggtccagtttatgagatggtaattgcgctgcagaacaccaccacgaccagccgctacctgcgagtcctcccgccttccacgccatacttcgctctgggactggggatgttcccaggaaaaggtggaatggtggctcctggaatgacctgccagtacattgtccagttttttcccgactgccttggggattttgatgattttattttagtggagacccagtcagcccacacacttctgatccccctgcaggcccggaggccgccccccgtgctgacattgtcaccggtgttggactgtggttactgcctcattgggggagtcaagatgaccagattcatctgcaaaaatgtgggtttcagtgttggcaggttctgcattatgcccaaaacaagctggccaccactaagtttcaaggccattgcaaccgtcggctttgttgaacaacctccttttggaatcctgccttcggtgtttgagctggccccgggacatgctatattagtggaggtcttgttttccccaaagagcctaggaaaggcagagcagaccttcatcatcatgtgcgacaactgccagataaaggagctggtgaccataggaattgggcagctgattgctttggatctgatctatatttctggtgaaaaaagccagccagaccctggagagctcacagacttaacagcccagcacttcatacgatttgagcctgaaaaccttcggtccacggctaggaagcagctgattattagaaatgctacgcacgtggagctggccttctactggcagatcatgaagcccaacctgcagcccctcatgcctggagaaaccttcagcatggacagcatcaagtgctaccccgacaaggagactgccttctccatcatgcccagaaagggggttctaagcccccacacagaccacgagttcatcctgagcttttctcctcatgagctgagggattttcacagtgtgctccagatggtgctagaggaagtcccagagcctgtaagttcagaagcggagagcctggggcactcctcctactctgtggatgatgtgattgtcctggaaatcgaggtgaaaggctcagtagaacctttccaggttctcttagagccatatgccctcatcatcccaggggagaactacattgggataaatgtgaagaaggcttttaagatgtggaacaacagcaagtcacccatcagatacctgtgggggaagatcagcgactgccacatcattgaagtggagcccggcacaggggtcatagagcccagtgaggtcggggattttgagttgaactttactgggggtgtccctggccccacaagccaggacctgctgtgtgaaatcgaagactcgccctcgccagtggtgttacacattgaggctgtctttaaggggcctgccctcatcatcaacgtctcagcccttcagtttggtctgctccgcctggggcagaaagccacaaactccatccagatccggaacgtcagccagctcccagccacatggcgcatgaaggagagcccagtctccctccaggaaaggcctgaggatgtgtctcccttcgacattgagccttcgagtggccagcttcactctctgggggagtgcagggtggacatcaccttggaggccctgcactgccagcatctggagaccgtcctggagctggaggtggaaaatggtgcctggagctaccttcctgtgtatgctgaggtacagaagccccatgtgtacctacagagcagccaggtggaggttagaaatctctacctgggtgtgcccacgaagacaaccatcacacttatcaatggcacgctcctgcctacccagttccactggggcaagctcctcggacaccaagcagaattctgcatggtgacagtctcccccaaacatggcctgctgggcccaagtgaggagtgccagctcaagttggagttgactgctcatacccaggaagagctgacccatctggccctcccttgtcacgtgtcaggcatgaagaagccactggttctaggcatttctgggaagccccagggactgcaagtggccattaccatctctaaggagagctctgattgcagcacagagcagtggccaggccacccaaaggagctccgcctggactttggctcagcggtgccactgaggacccgtgtgactcgccagctcattctcaccaatcgctccccaatacggacccgtttctccctcaagtttgagtatttcgggagcccccaaaacagcctgagcaaaaagaccagccttcccaacatgcctcctgccctgctaaagacagtgcggatgcaagagcacctggccaagcgagagcagctggattttatggagagcatgctatcccacgggaaaggagctgctttcttccctcacttttcccagggcatgctggggccctaccagcagctgtgcattgacatcacaggctgtgccaacatgtggggcgagtactgggacaacctcatctgcacggtgggagacctgctgccggaagtcatcccagtgcacatggcagcggtgggctgccccatcagctccctgaggaccacctcctacactattgaccaggcccagaaggaaccagccatgaggttcggcacccaggtctccggaggagacacagttacccgaacccttcgcctgaataactccagcccctgtgacatccgcctggattgggagacctatgttccagaagacaaggaagaccggctggtggagctgctggtgttttatgggccacctttcccgctgcgggaccaagccgggaatgagcttgtgtgccctgatacccctgagggtggctgcctcctctggtccccaggcccctccagttcatcggaattcagccatgaaactgactcatcagttgagggcagctccagtgccagcaatagggtggcacagaagctcatctcagtcatcctgcaggcacatgagggggtgccctccggccacctgtactgtatcagccccaagcaggtggtggtccctgctgggggcagcagtaccatctacatctccttcacccctatggtgctcagccctgagatcctgcacaaggtggagtgtactggctacgccctgggtttcatgagcttggacagcaaggtggaaagggagattccacggaagaggcatcgcctgcaggactttgcggtgggacccctgaaactggacctgcatagctacgtgaggcctgcacagctaagtgtggagctggactacggcggcagtatggaattccagtgccaggccagtgacctcattcccgagcagccctgctctggggtgctgagtgagctggtgaccacccaccacctgaagctgaccaacactacagagatcccacactacttccggcttatggtctccaggcccttctccgtttctcaagatggggcgagccaggaccacagagctcctggccctggccagaagcaggagtgtgaggaggagacagcctcagcggacaagcagctggtgctccaagcacaggagaacatgctggtgaacgtgtccttctcactctccctggagctgctctcctatcagaagctcccagctgaccagacactgcctggggtggacattcagcagagtgcgagtggagagagagagatggtgtttactcagaacctgctcctggagtacaccaaccagaccactcaggtggtgcccctgcgggctgtggtggccgtgcctgagctgcagctctccaccagctgggtggactttgggacctgctttgtgagccagcagcgagtccgggaggtctacctgatgaacctgagcgggtgccgaagctactggactatgctgatgggagtagtgagctgtacgagtccacgatggtggtggaaggtgtgctcggtgagaagtcctgcaccctgcggctccggggccaaggctcctatgatgagagatacatgttgcctcaccagccctgaggctccgccccagccctcagccccaggccccagctggagaaaaaacattgcccagggattaggagcagctcttcagcacaaagacacagacttggggacctggggacctctgggcagctcctggaatggaagaacccccttccacaatggtctcagcctaggccctcatgatatgtcctcagagctaacataaaggacaggccacaccacagcagagaccaccacattgagatcactactcagtgcatagcgaagaccagtatggcaaaattagtcttggaaaaaaaccacagccactaagataaattcatgcacttttactatgcacattgcacttctcatccatggatttgccttgccttaagaattaaccatggccttgtggcctgggtgacccaggctgcttttatcttgcacagctaaagagggtctgatgggtggctcaacaccccacccactcctataccatgtcatcagtgttcacattttccaaatgagttgaagtgccttgatctgtccactgccaccaccaccagtgctgagttttcccatgtggttttgcttttgtggtgttactgccttgctgctagagcagcaggactgtctgcgtagcgcctccagcctgggacctcactcagttcccagggtattcaaagacggcagcggctcccattccagtcccgatgcacatggacaccactccgtatgccctgtgaaaacaaaacttaattggctgggcaaaggcacccaccaaattacctccagaccaggctgacccagaaggacgtcatggacaagtaggatgcaaaaccatcagaccagatctgtgggcaagcggtaccctggcctcccacttgggcacacacacggtgacagatgcccactgcaggctagtatccctttcaaggctggcccttaaggaaaacagggatcatgcccctacatcctaagttcagggtgtttctgtgtgcatgttcccctccccagggatcgatcataatcccaaaagacacaatcccaaacacaatcatcccaaatgttgaaatcctggaagaacaaaatccctaaagtctaaaatcctgaaaatcacaatcctaaaagatcaaaatcctgaaaatataattctggaaaaaataatttggaagcctggcctggtggcatctacttgtagtcccagctattcagcaggctgaggcaagaggatcacttgtgcctaggagttcaagaccagcctaggcaatatagcaagaccccatcttagaaaaaaacttttttaaaagattgatttaaaagatatttacatttttaggccaggtgtggtggctcaaacctgtaatcccaacactttgggaggccgaggcgggaggatcacgaggtcaggagttcaagaccagcctcgccaacatggtgaaaccctgtctccaccaaaaatacaaaaattagctgggtgtggtggcagacacctataatcccagatactcgggaggctgaggctgaggcaggaaaattgcttgaacccaaaaggcagaggttgcagtgagccgagatcacaccactgcactccagccagcctggacaacggagtgagattccatgtc

SEQ ID NO: 367911 - DNA, 7915 bp, Homo sapiens
gttagcggcgtctcggttgccatggagaccaggagctccaaaacgcggaggtctttagcgtcccggaccaacgagtgccaggggacaatgtgggcgccaacttcgccaccagccgggtccagcagccccagccagcccacctggaagtcctccttgtattcctccctcgcctactctgaggccttccactacagcttcgcagcccggccccgccgcctcacgcagcttgcgctggcgcagcgtcccgagcctcagctgcttcgtctgcgcccctcctcgctgcgcacccaagatatctcgcacttgctcaccggcgtcttccgcaacttgtactcagccgaggtcatcggcgacgaagtgagcgcaagcttgatcaaggcccgcggcagcgagaatgagcgccacgaggagttcgtggaccagctgcagcagattcgggagctctataagcagcggctggatgagtttgaaatgttggagagacatatcactcaggcccaagcacgggctattgcggaaaatgagcgggtcatgagccaggctggagtacaggacctcgagagccttgtcaggttgcctccagtgaagagtgtctccagatggtgtatagacagcgagttgctacggaaacatcatttgatctccccagaagattactacaccgatacagtgccgtttcactctgcacctaaaggcatctccctacctggatgttcaaaactgacatttagctgtgagaagcgttccgtccagaagaaagagctgaacaagaagcttgaagattcatgcaggaagaagcttgctgagttcgaagatgagttagaccacactgtggacagcctgacatggaatttaactcctaaggccaaagaaaggaccagagaacctctcaagaaagcaagtcaaccaaggaataaaaactggatgaaccacttacgtgtgccacagagagagctagacagacttctgcttgccagaatggagagtcggaaccacttcctaaaaaatccccgtttttttcctcctaacactcgatatggaggcaagtctcttgtttttcctccaaagaagccagcaccgataggagaattccagagtacagagccagaacagagttgtgctgatactccagtgtttctagctaagccaccaattgggtttttcacagattatgaaattggtccagtttatgagatggtaattgcgctgcagaacaccaccacgaccagccgctacctgcgagtcctcccgccttccacgccatacttcgctctgggactggggatgttcccaggaaaaggtggaatggtggctcctggaatgacctgccagtacattgtccagttttttcccgactgccttggggattttgatgattttattttagtggagacccagtcagcccacacacttctgatccccctgcaggcccggaggccgccccccgtgctgacattgtcaccggtgttggactgtggttactgcctcattgggggagtcaagatgaccagattcatctgcaaaaatgtgggtttcagtgttggcaggttctgcattatgcccaaaacaagctggccaccactaagtttcaaggccattgcaaccgtcggctttgttgaacaacctccttttggaatcctgccttcggtgtttgagctggccccgggacatgctatattagtggaggtcttgttttccccaaagagcctaggaaaggcagagcagaccttcatcatcatgtgcgacaactgccagataaaggagctggtgaccataggaattgggcagctgattgctttggatctgatctatatttctggtgaaaaaagccagccagaccctggagagctcacagacttaacagcccagcacttcatacgatttgagcctgaaaaccttcggtccacggctaggaagcagctgattattagaaatgctacgcacgtggagctggccttctactggcagatcatgaagcccaacctgcagcccctcatgcctggagaaaccttcagcatggacagcatcaagtgctaccccgacaaggagactgccttctccatcatgcccagaaagggggttctaagcccccacacagaccacgagttcatcctgagcttttctcctcatgaggttcagatggtgtcatctcagtagccacacatggttggatcatgtatttagaccccccacctgtgttcctcaatcacactgaagccacagctgggcccaccgaggtgctatcctgcccaggccagcacttggctgagttgggttggagtacacacctggtgtgcagggtgaagcagctcattttgtctggtcctgatcccagactcaccccatctgcagcaagacccttggctggcttcctccgctctgggtgtctcccacatgtctactatggcaaaaaacattaccatccccacccataccacagcatcccctagagagagtgaggtgcagggacccgagggccaggttagcacagcgctggccccagcatggagggaagccctgtgggccacggtaggctagaagggaattcgagctgggcatgaaaaggatgctccggggccattgttagtgggtttggggctgaaatgagtgatcctgcctctggtcccagcatccagctgcctcgttgtctatcctgggagggtgtggtgcttcggacacgttgaggggctttgtcagcatcaggaaggcctttgcttcttgcacccaggcccagctgagacaggcccctgagtcctggctcatgttctggcagcaaacttcacttttcctaaggaagggaagaaggaggcagcagggaagcaaccctgggttttcagaaggtccttctgatggctaggctaaggggaggaagaattcctgccatgccccagccttctccaggacaacctgctggaacgcagtggtgttttcagggcactgtgtttgccttgcagctgagggattttcacagtgtgctccagatggtgctagaggaagtcccagagcctgtaagttcagaagcggagagcctggggcactcctcctactctgtggatgatgtgattgtcctggaaatcgaggtgaaaggctcagtagaacctttccaggttctcttagagccatatgccctcatcatcccaggggagaactacattgggataaatgtgaagaaggcttttaagatgtggaacaacagcaagtcacccatcagatacctgtgggggaagatcagcgactgccacatcattgaagtggagcccggcacaggggtcatagagcccagtgaggtcggggattttgagttgaactttactgggggtgtccctggccccacaagccaggacctgctgtgtgaaatcgaagactcgccctcgccagtggtgttacacattgaggctgtctttaaggggcctgccctcatcatcaacgtctcagcccttcagtttggtctgctccgcctggggcagaaagccacaaactccatccagatccggaacgtcagccagctcccagccacatggcgcatgaaggagagcccagtctccctccaggaaaggcctgaggatgtgtctcccttcgacattgagccttcgagtggccagcttcactctctgggggagtgcagggtggacatcaccttggaggccctgcactgccagcatctggagaccgtcctggagctggaggtggaaaatggtgcctggagctaccttcctgtgtatgctgaggtacagaagccccatgtgtacctacagagcagccaggtggaggttagaaatctctacctgggtgtgcccacgaagacaaccatcacacttatcaatggcacgctcctgcctacccagttccactggggcaagctcctcggacaccaagcagaattctgcatggtgacagtctcccccaaacatggcctgctgggcccaagtgaggagtgccagctcaagttggagttgactgctcatacccaggaagagctgacccatctggccctcccttgtcacgtgtcaggcatgaagaagccactggttctaggcatttctgggaagccccagggactgcaagtggccattaccatctctaaggagagctctgattgcagcacagagcagtggccaggccacccaaaggagctccgcctggactttggctcagcggtgccactgaggacccgtgtgactcgccagctcattctcaccaatcgctccccaatacggacccgtttctccctcaagtttgagtatttcgggagcccccaaaacagcctgagcaaaaagaccagccttcccaacatgcctcctgccctgctaaagacagtgcggatgcaagagcacctggccaagcgagagcagctggattttatggagagcatgctatcccacgggaaaggagctgctttcttccctcacttttcccagggcatgctggggccctaccagcagctgtgcattgacatcacaggctgtgccaacatgtggggcgagtactgggacaacctcatctgcacggtgggagacctgctgccggaagtcatcccagtgcacatggcagcggtgggctgccccatcagctccctgaggaccacctcctacactattgaccaggcccagaaggaaccagccatgaggttcggcacccaggtctccggaggagacacagttacccgaacccttcgcctgaataactccagcccctgtgacatccgcctggattgggagacctatgttccagaagacaaggaagaccggctggtggagctgctggtgttttatgggccacctttcccgctgcgggaccaagccgggaatgagcttgtgtgccctgatacccctgagggtggctgcctcctctggtccccaggcccctccagttcatcggaattcagccatgaaactgactcatcagttgagggcagctccagtgccagcaatagggtggcacagaagctcatctcagtcatcctgcaggcacatgagggggtgccctccggccacctgtactgtatcagccccaagcaggtggtggtccctgctgggggcagcagtaccatctacatctccttcacccctatggtgctcagccctgagatcctgcacaaggtggagtgtactggctacgccctgggtttcatgagcttggacagcaaggtgagctcttccggcctggggtgggggccgcagccactgctccctcctgggtagcatgctgcctactcagcccagggatcagctgtgatcagacttgggctcagtaggtggaaagggagattccacggaagaggcatcgcctgcaggactttgcggtgggacccctgaaactggacctgcatagctacgtgaggcctgcacagtgagtcagctggggtgccccatctcctttcatccccatggggtgcaccctcaccaggcactggtggagccaggcagggttctcagagcaaaaggacgggcatgggtggagaagtcagcagaggagcccagggaaaggctggcccgaggctggatgagcagagtgggggcagccagaaggccccaggcgcccggcttgccccaacaatgcctattgctgggcaggctaagtgtggagctggactacggcggcagtatggaattccagtgccaggccagtgacctcattcccgagcagccctgctctggggtgctgagtgagctggtgaccacccaccacctgaagctgaccaacactacagagatcccacactacttccggcttatggtctccaggcccttctccgtttctcaagatggggcgagccaggaccacagagctcctggccctggccagaagcaggagtgtgaggaggagacagcctcagcggacaagcagctggtgctccaagcacaggagaacatgctggtgaacgtgtccttctcactctccctggagctgctctcctatcagaagctcccagctgaccagacactgcctggggtggacattcagcagagtgcgagtggagagagagagatggtgtttactcagaacctgctcctggagtacaccaaccagaccactcaggtggtgcccctgcgggctgtggtggccgtgcctgagctgcagctctccaccagctgggtggactttgggacctgctttgtgagccagcagcgagtccgggaggtctacctgatgaacctgagcgggtgccgaagctactggactatgctgatgggagtagtgagctgtacgagtccacgatggtggtggaaggtgtgctcggtgagaagtcctgcaccctgcggctccggggccaaggctcctatgatgagagatacatgttgcctcaccagccctgaggctccgccccagccctcagccccaggccccagctggagaaaaaacattgcccagggattaggagcagctcttcagcacaaagacacagacttggggacctggggacctctgggcagctcctggaatggaagaacccccttccacaatggtctcagcctaggccctcatgatatgtcctcagagctaacataaaggacaggccacaccacagcagagaccaccacattgagatcactactcagtgcatagcgaagaccagtatggcaaaattagtcttggaaaaaaaccacagccactaagataaattcatgcacttttactatgcacattgcacttctcatccatggatttgccttgccttaagaattaaccatggccttgtggcctgggtgacccaggctgcttttatcttgcacagctaaagagggtctgatgggtggctcaacaccccacccactcctataccatgtcatcagtgttcacattttccaaatgagttgaagtgccttgatctgtccactgccaccaccaccagtgctgagttttcccatgtggttttgcttttgtggtgttactgccttgctgctagagcagcaggactgtctgcgtagcgcctccagcctgggacctcactcagttcccagggtattcaaagacggcagcggctcccattccagtcccgatgcacatggacaccactccgtatgccctgtgaaaacaaaacttaattggctgggcaaaggcacccaccaaattacctccagaccaggctgacccagaaggacgtcatggacaagtaggatgcaaaaccatcagaccagatctgtgggcaagcggtaccctggcctcccacttgggcacacacacggtgacagatgcccactgcaggctagtatccctttcaaggctggcccttaaggaaaacagggatcatgcccctacatcctaagttcagggtgtttctgtgtgcatgttcccctccccagggatcgatcataatcccaaaagacacaatcccaaacacaatcatcccaaatgttgaaatcctggaagaacaaaatccctaaagtctaaaatcctgaaaatcacaatcctaaaagatcaaaatcctgaaaatataattctggaaaaaataatttggaagcctggcctggtggcatctacttgtagtcccagctattcagcaggctgaggcaagaggatcacttgtgcctaggagttcaagaccagcctaggcaatatagcaagaccccatcttagaaaaaaacttttttaaaagattgatttaaaagatatttacatttttaggccaggtgtggtggctcaaacctgtaatcccaacactttgggaggccgaggcgggaggatcacgaggtcaggagttcaagaccagcctcgccaacatggtgaaaccctgtctccaccaaaaatacaaaaattagctgggtgtggtggcagacacctataatcccagatactcgggaggctgaggctgaggcaggaaaattgcttgaacccaaaaggcagaggttgcagtgagccgagatcacaccactgcactccagccagcctggacaacggagtgagattccatgtc

SEQ ID NO: 367912 - DNA, 448 bp, Homo sapiens
ctgagggtggctgcctcctctggtccccaggcccctccagttcatcggaattcagccatgaaactgactcatcagtgagcaggggtggaggggcggggcaggctggccactgagggccactgaggtgtggccagtaggctagttgaacctcagtgactgcgtgaacctcagtgattccttggtgacaggttgagggcagctccagtgccagcaatagggtggcacagaagctcatctcagtcatcctgcaggcacatgagggggtgccctccggccacctgtactgtatcagccccaagcaggtggtgagttggggtatgggctgggagctgtctgcattggccggccagtgggcatgggacagtgctaaggctgctgtgtctatgccaggtggtccctgctgggggcagcagtaccatctacatctccttcacccctatggtgctca

SEQ ID NO: 367913 - DNA, 502 bp, Homo sapiens
gaaaatgggcaaaaaatgtgaataaataccagaggaagaaatttgaaaggccaaacaagatataaaagagtctcaacatcactagtaaacatggaaatgcaaattgaaacaataatgagatggctcattacaccaatccgattggcaaaattagtgtctaacgggagtattgatgaagatatgggggaaataccaatgtctgtaaactgatgggaatttaaatttgcacaactactttggagagcaatttgaaaatgcttgataaactttaagacgagcaaatctaggatccagccaactttgccactgatgtgtgattcttaggttaagtttcctaattggggcctgagtcagggattcttgtgcagtgatttattgaagcagaactcttaggtgaaagggagatgggatggcagatagggtggaagcgctaggcagtgatatgttcttggttgaagattagcttcaatctgatcccatgggagctctggggcatgagtga

SEQ ID NO: 367914 - DNA, 6781 bp, Homo sapiens
ccacaacccagcaaagaacataggctaggtacgaggccttcgtgttaattcggccgaggctcaatccgtacctctagtaaagaagagcttgtgcccctccccgaccccttaccaagggcgagctgcgtggagtcgttggactgggcagaactttggcgggcaaggagacaaacagccacactgtgctgccggggaagagaagaagaaggaaaggccagacacacaggcgtcgtgcggctgcggaaggattccgtttcctgcagggggcggagggatttgacagcacggtaacttccggaaaagtcctgaacctcagtggaaaagccttgcaagaaacaataacaaacgggaggaggaagcgattctggggtttctgtgttgaacggttcttgtccgcgaagatgcgcttcggcctctgtcaggggacttgaacgggcttagtgggcttcagccagcttttctccaccggttccccacggggaccccccccccccccggccgttgcaatggcgggcgtggggccggggggctacgcggcggagttcgtgccaccgccagagtgccccgtctttgagccgagttgggaggagttcacagatccgctcagctttatcggccgcatccggcctttggcggagaaaaccggcatctgcaaaattcggccgcccaaggactggcagcctccatttgcctgtgaagtaaaaagctttcgtttcactccaagagtccagcgcctgaatgaacttgaggcaatgaccagagtgagattggatttcttggatcaactagcaaaattttgggaacttcaaggatctactctgaagatccctgtggtagagagaaaaatcctggatctgtatgctttgagcaagattgttgccagcaaaggaggttttgaaatggtcaccaaagagaagaaatggtctaaagtgggtagtcgcttgggatatctgccaggaaaaggaactgggtctcttttgaagtcacattatgaaagaattctctacccatatgagcttttccagtctggtgtgagccttatgggtgtgcagatgcctaatttagatcttaaagaaaaagtggagcctgaggttctcagcactgatacccaaacttccccagagccaggcacaaggatgaacattctgccgaagagaacaagacgtgtgaagactcagtcagaatctggagatgtgagtagaaacacggaactgaagaaacttcagatttttggggctgggcccaaggttgtgggcttggcaatgggaacaaaagataaagaagatgaggtcacccgaagacgaaaagttaccaacaggtcagacgcatttaacatgcaaatgagacaacggaaaggcactctctctgttaactttgttgatctctatgtttgtatgttttgtggtcggggaaacaatgaagataaattgcttttgtgtgatggatgtgatgacagctatcatacattttgtctaattcctccactacctgatgtgcccaaaggagactggaggtgtcctaaatgtgtcgccgaggaatgtagcaaacctcgagaagcctttggatttgaacaagctgtacgagagtatacacttcagagctttggagagatggcagataattttaagtctgattattttaatatgccagtccatatggttcccacagaactagtagaaaaggaattttggcggctggtaagcagcattgaagaagatgttattgtggaatatggagcagatatctcctcaaaagactttggaagtggatttccggtgaaggatgggcggagaaagattctgccagaagaagaggaatatgcactttctggttggaatttgaataacatgcctgtcctggaacagtctgttcttgcacatattaatgtggacatctctggtatgaaagtgccgtggctctatgtgggaatgtgcttctcttctttttgctggcacattgaggatcactggagttattccatcaactacttgcactggggggagccaaagacatggtatggtgtgccatctcatgctgcagagcaactggaggaggtgatgagagagctggcccccgagttatttgaatcccagcctgatcttctgcatcagttagttaccatcatgaaccccaacgtgctaatggagcatggtgtgcctgtgtacaggaccaatcagtgtgctggcgagtttgttgtgacatttcctcgtgcctatcactctggatttaaccagggctacaactttgctgaagctgtgaacttctgtactgctgactggttgcccattggacgtcaatgtgtaaatcattaccgacgcctaaggcgccactgtgtcttttcacacgaggaactaattttcaagatggcagcagatccagaatgcttagatgtggggctggctgccatggtctgcaaagaattgactctcatgactgaagaagaaacacgattaagagagtctgttgtacagatgggtgtcctgatgtcagaagaagaagtgtttgaacttgttcctgatgatgagcggcagtgttcagcatgcagaaccacatgttttctctctgctctcacatgttcctgtaatcctgagcggcttgtatgtctctaccatccaactgatctgtgcccctgccccatgcagaagaaatgtcttagatatcgctacccattagaagacctcccttctctgctatatggtgtaaaagtcagggcacagtcctatgacacttgggtcagtcgtgttacagaagcattgtctgctaacttcaaccacaaaaaagatttgattgaattgcgagtaatgctggaagatgctgaggataggaaatacccagagaatgatctctttcgaaaactcagggatgctgtaaaagaagctgagacctgtgcttctgtggctcagctgcttctgagcaaaaagcagaaacacagacagagcccagatagtgggaggactcggaccaaactgacagtggaagaattgaaggcctttgtccaacaactttttagtcttccgtgtgtcatcagccaagctcggcaagtaaagaatctgctagatgatgtggaagagtttcatgaacgtgctcaggaggccatgatggatgaaaccccagattcttccaaactccagatgttgatagatatgggctctagtctctatgtggaactccctgaattaccacgactgaagcaagagctacaacaggctcggtggttggacgaagtaagactgaccttatcagatccgcaacaagtcactttggatgtcatgaagaagctgatagactctggggtagggttggcaccccaccatgctgtggagaaagcaatggctgaactacaggagctccttacagtctctgaacgatgggaagaaaaggctaaggtctgcctacaggcaagaccgaggcacagtgtggcaagtttagaaagcattgtgaatgaagccaagaacattccagcctttctacccaatgtgttgtccttgaaagaagccttacaaaaggctcgagaatggaccgctaaagtggaagctattcagagtggcagcaattacgcttatttggagcagcttgagagcttgtctgcgaaaggacgccctattcctgtgcgtcttgaagcactgccgcaagtggaatcacaggtagcagcagcacgggcatggagagaacggactgggcggacgtttcttaagaagaattctagccatacattgttacaggtgctgagcccccggaccgacattggtgtatatgggagtggcaaaaataggaggaaaaaagtaaaagaactaatagaaaaagaaaaagaaaaggatctggacctggagcctctgagtgatctggaggaaggattggaggaaaccagagatacagccatggtggtggcagttttcaaagaacgggagcaaaaagagattgaagccatgcattctctcagagcagccaacctagccaagatgacaatggtggaccgcatagaagaagtaaaattttgcatttgccgcaagacagccagtgggtttatgctacagtgtgagctctgcaaagactggttccataacagctgtgttcctcttcctaaatcaagttcccaaaaaaaaggatccagctggcaagctaaagaagtaaaattcctttgccctctttgtatgcggtctcgaaggcccaggctagagactattctgtcactcctggtatcccttcagaagttgcccgtacggttgcctgaaggagaggccctgcagtgtttgacagaacgtgctatgagttggcaagatagagcgcggcaggctctagccacagatgaactatcctctgccctggccaaactatctgtgttgagccagcgtatggtggaacaggcggctcgagaaaaaactgaaaagatcatcagtgcagaactccaaaaagcagctgccaatccagacttacagggacacttacctagtttccagcagtctgcttttaaccgggtggtgagcagtgtgtcatcttctcctcgacaaacaatggactatgatgatgaagaaacagactctgatgaagacattcgagagacatatggctacgacatgaaggacacagccagtgtgaagtcctctagtagtcttgaacccaatcttttttgtgatgaagagattcccatcaaatccgaggaggtggtgacccacatgtggacagcaccttcattttgtgcagagcatgcttattcttctgcttctaagagttgttctcaaggttctagcaccccaaggaaacaacctcggaagagccctttggtgccccgaagtttggaacctccagtgctggagttgtcacctggagctaaggcacaactggaagaacttatgatggttggagatctcctggaagtatctctggacgagactcaacacatatggcggattttgcaggccacacacccaccctctgaagacagattcttgcatatcatggaggatgacagcatggaagagaaaccactaaaagtgaaaggaaaggactcttcagagaagaaacggaaacggaagctagaaaaggtagagcaactttttggagaaggaaaacagaagtccaaggagttaaagaaaatggacaaacctagaaagaagaaattaaaattaggtgcagacaaatcaaaggagctgaataaactggccaagaaactagcaaaagaagaagagagaaagaaaaagaaggagaaggctgctgcagccaaagttgaacttgtgaaagagagcactgaaaagaaaagagagaaaaaggtgctggacatcccctcaaagtatgactggtcaggagcagaggagtctgatgatgagaatgctgtgtgcgcagcacagaactgccaaaggccctgcaaggacaagggagttgtatttgtaacggaagaagagaagaataaaaaatattagttttaaaagtggcctatgtgactgcttttctaaaaaggtagactgggtacaatgtgatggtggctgtgatgagtggtttcatcaagtttgtgtgggtgtatctccagaaatggctgaaaatgaagattacatctgtataaactgtgcaaagaagcaggggccagttagcccaggtccagcaccacctccttccttcataatgagctacaaactaccaatggaggatcttaaagagaccagttagcagatgcttggttagtttgggacatggggggacatggaccacattgagaccttagtcatcaagtagagtggtttatatccacttggaatgttgcttccaaagatgaatggccttcagagaaagtccccttagtgctggcttcctctttgcatggactctgtgggttacattctctatcaacatatctatgcagagggtgtcttctttggtacaacagccaatatttcatgtctcctttgagtgtggtttactgcattaaggccagatgcttaattgagctctagggtggctggttagtattaatacattggtgtgctaacagggcatataggatgtggcttttgtccagctgatagtagttagaggcttacaacttaggagcagcaccaactgaaggtgctaattgcttggatctccttcattgggatagttggagagggattggagtaccactttccttccactgttacctggtacttaatgccctaaagatacaactaggagtaacagggccaaagttatttctgttagacgtcaaggaatggtatcacagtctattgacctcagcgatttgtgcttgtttgtgctagaagaacatcccaaataggagaacctctcacaagctggggcaggtcaccttatctttgtaagatgaggatatcatctagatcagaaatctgactagattggattctgaggagaagaacctactacaaggcaaggagccgttttttggctttgaaaagtcttgctgtcttgggtctacattttagggaagagcaggtacatggatccaggcttctgccaaaaaaaaaaagagaagaagatgacgatgatgaccagtcgtactatcttactgagccacagtgatgcatgcttttcggggaaaacttcattcacaagtattccagacaccaggcttcaggcatggccatgagcaagaccagcaaataacagctttttgccttgcagccctgaccccaatgtctgctgtttccaacactggtgatttctaactacggcccacagcagatgctgttgaataacaccatggcttcatcagaggatgtggggttgtagtacctctgggtgatgaagttgttttagtaaatccattttt

SEQ ID NO: 367915 - DNA, 10905 bp, Homo sapiens
ccacaacccagcaaagaacataggctaggtacgaggccttcgtgttaattcggccgaggctcaatccgtacctctagtaaagaagagcttgtgcccctccccgaccccttaccaagggcgagctgcgtggagtcgttggactgggcagaactttggcgggcaaggagacaaacagccacactgtgctgccggggaagagaagaagaaggaaaggccagacacacaggcgtcgtgcggctgcggaaggattccgtttcctgcagggggcggagggatttgacagcacggtaacttccggaaaagtcctgaacctcagtggaaaagccttgcaagaaacaataacaaacgggaggaggaagcgattctggggtttctgtgttgaacggttcttgtccgcgaagatgcgcttcggcctctgtcaggggacttgaacgggcttagtgggcttcagccagcttttctccaccggttccccacggggaccccccccccccccggccgttgcaatggcgggcgtggggccggggggctacgcggcggagttcgtgccaccgccagagtgccccgtctttgagccgagttgggaggagttcacagatccgctcagctttatcggccgcatccggcctttggcggagaaaaccggcatctgcaaaattcggccgcccaaggactggcagcctccatttgcctgtgaagtaaaaagctttcgtttcactccaagagtccagcgcctgaatgaacttgaggcaatgaccagagtgagattggatttcttggatcaactagcaaaattttgggaacttcaaggatctactctgaagatccctgtggtagagagaaaaatcctggatctgtatgctttgagcaagattgttgccagcaaaggaggttttgaaatggtcaccaaagagaagaaatggtctaaagtgggtagtcgcttgggatatctgccaggaaaaggaactgggtctcttttgaagtcacattatgaaagaattctctacccatatgagcttttccagtctggtgtgagccttatgggtgtgcagatgcctaatttagatcttaaagaaaaagtggagcctgaggttctcagcactgatacccaaacttccccagagccaggcacaaggatgaacattctgccgaagagaacaagacgtgtgaagactcagtcagaatctggagatgtgagtagaaacacggaactgaagaaacttcagatttttggggctgggcccaaggttgtgggcttggcaatgggaacaaaagataaagaagatgaggtcacccgaagacgaaaagttaccaacaggtcagacgcatttaacatgcaaatgagacaacggaaaggcactctctctgttaactttgttgatctctatgtttgtatgttttgtggtcggggaaacaatgaagataaattgcttttgtgtgatggatgtgatgacagctatcatacattttgtctaattcctccactacctgatgtgcccaaaggagactggaggtgtcctaaatgtgtcgccgaggaatgtagcaaacctcgagaagcctttggatttgaacaagctgtacgagagtatacacttcagagctttggagagatggcagataattttaagtctgattattttaatatgccagtccatatggttcccacagaactagtagaaaaggaattttggcggctggtaagcagcattgaagaagatgttattgtggaatatggagcagatatctcctcaaaagactttggaagtggatttccggtgaaggatgggcggagaaagattctgccagaagaagaggaatatgcactttctggttggaatttgaataacatgcctgtcctggaacagtctgttcttgcacatattaatgtggacatctctggtatgaaagtgccgtggctctatgtgggaatgtgcttctcttctttttgctggcacattgaggatcactggagttattccatcaactacttgcactggggggagccaaagacatggtatggtgtgccatctcatgctgcagagcaactggaggaggtgatgagagagctggcccccgagttatttgaatcccagcctgatcttctgcatcagttagttaccatcatgaaccccaacgtgctaatggagcatggtgtgcctgtgtacaggaccaatcagtgtgctggcgagtttgttgtgacatttcctcgtgcctatcactctggatttaaccagggctacaactttgctgaagctgtgaacttctgtactgctgactggttgcccattggacgtcaatgtgtaaatcattaccgacgcctaaggcgccactgtgtcttttcacacgaggaactaattttcaagatggcagcagatccagaatgcttagatgtggggctggctgccatggtctgcaaagaattgactctcatgactgaagaagaaacacgattaagagagtctgttgtacagatgggtgtcctgatgtcagaagaagaagtgtttgaacttgttcctgatgatgagcggcagtgttcagcatgcagaaccacatgttttctctctgctctcacatgttcctgtaatcctgagcggcttgtatgtctctaccatccaactgatctgtgcccctgccccatgcagaagaaatgtcttagatatcgctacccattagaagacctcccttctctgctatatggtgtaaaagtcagggcacagtcctatgacacttgggtcagtcgtgttacagaagcattgtctgctaacttcaaccacaaaaaagatttgattgaattgcgagtaatgctggaagatgctgaggataggaaatacccagagaatgatctctttcgaaaactcagggatgctgtaaaagaagctgagacctgtgcttctgtggctcagctgcttctgagcaaaaagcagaaacacagacagagcccagatagtgggaggactcggaccaaactgacagtggaagaattgaaggcctttgtccaacaactttttagtcttccgtgtgtcatcagccaagctcggcaagtaaagaatctgctagatgatgtggaagagtttcatgaacgtgctcaggaggccatgatggatgaaaccccagattcttccaaactccagatgttgatagatatgggctctagtctctatgtggaactccctgaattaccacgactgaagcaagagctacaacaggctcggtggttggacgaagtaagactgaccttatcagatccgcaacaagtcactttggatgtcatgaagaagctgatagactctggggtagggttggcaccccaccatgctgtggagaaagcaatggctgaactacaggagctccttacagtctctgaacgatgggaagaaaaggctaaggtctgcctacaggcaagaccgaggcacagtgtggcaagtttagaaagcattgtgaatgaagccaagaacattccagcctttctacccaatgtgttgtccttgaaagaagccttacaaaaggctcgagaatggaccgctaaagtggaagctattcagagtggcagcaattacgcttatttggagcagcttgagagcttgtctgcgaaaggacgccctattcctgtgcgtcttgaagcactgccgcaagtggaatcacaggtagcagcagcacgggcatggagagaacggactgggcggacgtttcttaagaagaattctagccatacattgttacaggtgctgagcccccggaccgacattggtgtatatgggagtggcaaaaataggaggaaaaaagtaaaagaactaatagaaaaagaaaaagaaaaggatctggacctggagcctctgagtgatctggaggaaggattggaggaaaccagagatacagccatggtggtggcagttttcaaagaacgggagcaaaaagagattgaagccatgcattctctcagagcagccaacctagccaagatgacaatggtggaccgcatagaagaagtaaaattttgcatttgccgcaagacagccagtgggtttatgctacagtgtgagctctgcaaagactggttccataacagctgtgttcctcttcctaaatcaagttcccaaaaaaaaggatccagctggcaagctaaagaagtaaaattcctttgccctctttgtatgcggtctcgaaggcccaggctagagactattctgtcactcctggtatcccttcagaagttgcccgtacggttgcctgaaggagaggccctgcagtgtttgacagaacgtgctatgagttggcaagatagagcgcggcaggctctagccacagatgaactatcctctgccctggccaaactatctgtgttgagccagcgtatggtggaacaggcggctcgagaaaaaactgaaaagatcatcagtgcagaactccaaaaagcagctgccaatccagacttacagggacacttacctagtttccagcagtctgcttttaaccgggtggtgagcagtgtgtcatcttctcctcgacaaacaatggactatgatgatgaagaaacagactctgatgaagacattcgagagacatatggctacgacatgaaggacacagccagtgtgaagtcctctagtagtcttgaacccaatcttttttgtgatgaagagattcccatcaaatccgaggaggtggtgacccacatgtggacagcaccttcattttgtgcagagcatgcttattcttctgcttctaagagttgttctcaaggttctagcaccccaaggaaacaacctcggaagagccctttggtgccccgaagtttggaacctccagtgctggagttgtcacctggagctaaggcacaactggaagaacttatgatggttggagatctcctggaagtatctctggacgagactcaacacatatggcggattttgcaggccacacacccaccctctgaagacagattcttgcatatcatggaggatgacagcatggaagagaaaccactaaaagtgaaaggaaaggactcttcagagaagaaacggaaacggaagctagaaaaggtagagcaactttttggagaaggaaaacagaagtccaaggagttaaagaaaatggacaaacctagaaagaagaaattaaaattaggtgcagacaaatcaaaggagctgaataaactggccaagaaactagcaaaagaagaagagagaaagaaaaagaaggagaaggctgctgcagccaaagttgaacttgtgaaagagagcactgaaaagaaaagagagaaaaaggtgctggacatcccctcaaagtatgactggtcaggagcagaggagtctgatgatgagaatgctgtgtgcgcagcacagaactgccaaaggccctgcaaggacaaggtagactgggtacaatgtgatggtggctgtgatgagtggtttcatcaagtttgtgtgggtgtatctccagaaatggctgaaaatgaagattacatctgtataaactgtgcaaagaagcaggggccagttagcccaggtccagcaccacctccttccttcataatgagctacaaactaccaatggaggatcttaaagagaccagttagcagatgcttggttagtttgggacatggggggacatggaccacattgagaccttagtcatcaagtagagtggtttatatccacttggaatgttgcttccaaagatgaatggccttcagagaaagtccccttagtgctggcttcctctttgcatggactctgtgggttacattctctatcaacatatctatgcagagggtgtcttctttggtacaacagccaatatttcatgtctcctttgagtgtggtttactgcattaaggccagatgcttaattgagctctagggtggctggttagtattaatacattggtgtgctaacagggcatataggatgtggcttttgtccagctgatagtagttagaggcttacaacttaggagcagcaccaactgaaggtgctaattgcttggatctccttcattgggatagttggagagggattggagtaccactttccttccactgttacctggtacttaatgccctaaagatacaactaggagtaacagggccaaagttatttctgttagacgtcaaggaatggtatcacagtctattgacctcagcgatttgtgcttgtttgtgctagaagaacatcccaaataggagaacctctcacaagctggggcaggtcaccttatctttgtaagatgaggatatcatctagatcagaaatctgactagattggattctgaggagaagaacctactacaaggcaaggagccgttttttggctttgaaaagtcttgctgtcttgggtctacattttagggaagagcaggtacatggatccaggcttctgccaaaaaaaaaaagagaagaagatgacgatgatgaccagtcgtactatcttactgagccacagtgatgcatgcttttcggggaaaacttcattcacaagtattccagacaccaggcttcaggcatggccatgagcaagaccagcaaataacagctttttgccttgcagccctgaccccaatgtctgctgtttccaacactggtgatttctaactacggcccacagcagatgctgttgaataacaccatggcttcatcagaggatgtggggttgtagtacctctgggtgatgaagttgttttagtaaatccatttttaaaaaaaaaaaaggacttgtttttacttttttctaaatgtctctgactactgactgttctatacatagattatttttccttttttaatatacatatatgaatatataaatatatatatttactgttaccagcagcatatgacagagtttcaacatcaaaaatccatttgggggcttgctttttcttttttgctttaaaaaaaaaaatcccattccttctttgtagtacaaggagttagcactccctcctccatcccagcctgaccagatcttccattttgcttttgttcatatagataattatatgtcctttgtgtgttgggacttgtccctgtctgttgggaaacttggtctcactctagtctgtgctggctcttttttcttttgtgtgtgaatgtttgaaactatggtgctgtgtcctcttccctcctgttgtgttctctgttcttcttaaggtattaggtaagctgtatgtaaactcttattagaaggggactaatttttttttaaaggacaaaaaaaaaaatgactaaaaatagtgttttgtcatcactgtctggtgtctttattttggtttaaaaaaatctgtggtttgacttaaattcatcagttttccttttaaaggggggattggggtggacctagcaacagcttatagtttcctcttccctttttgccccagtctcttttaaagaactgtcttctagtaactagaagtgaaatgtactgtccagttacagtttgagtgggtatgagatttaactcaaaaggaatcttacaaaaaaaaagatgttttcttataaaatccaatttctgtaaatgttttctctgaagttcatactacctactttttattcattcttaatactgtataacattttgagtgttttgacttgttcagaggtttgttagtgttgctgtgcatatgtcttgaggtctcatctgaagtaagtttgtgtatgatcgaagatttcaatggatattgcaaggtaactaattaactgatttcataagttttcgttttgccaagctaacgattatcaattaagaatttcctctggttgatgttatacaagaaagcacaatattttttgcctgttgatcttctttgtaacagtcttcagatatttgtgggttaaaaattgaatgtaattttaagtgacagatgcctggaatacatttaaaatttttatttttccttcctaatcatccattaactattccactatcagtggagagtcatgaggatgctgagaaagtatgaatagcttcctgtcaccttctgacgttttgaaacttaaatatgtcttttcgttgatactgtgggattttctgtatttacttgacagtcatggaggatttggtatgacttgaccacaggtttagaccaaggctgagaagaacagaagggagaaattaatggcaaaacaaaaaatacacaaatctgcggttttggaattaatgaaacaagattcatctatttaaagaaatgttggtgttctaatacaaagcattattttcacttagagaaaattacttacttgctcccttctgtattgtaatattttgtattaagacatgatttaaaatgtctttctacccttatctcctctaaactgcaactgaagttgcaattcttcatcattagtattttaactctggcaaaggttatagaaagaaaaatggaaatatggtaggcctgtggtattcttaaaagctaagtcattagaactatgcagatccccaagtttaaaagtacaaatacagcaccagtagttagctttctagctgggggagaagacaggagatttttcttccacagatgtttattttgcttcctgataggtactgcagcaaagccatgttgatgtgtagatgcatgacttcctcactaagctgctgcacaccagctttgcctgcatgattcaaatttgtgcctcagtaaaattataaattattgcatgtcataccttgaataatggaaacggcaaacattaaacctgtgattacccataatgtactttaataataaaaaacatggcagccaggtgcagtagagtgcacctgtggtcaggaggctgaagtgggaagattgcttcaacctgtgagtttgagtcccgcctggtcaacagcgagaccccatgtgtctgtctgtctctctctttttttaaaggacagaggctaagctgtaaggttagcatggttctgcctgggctttgcttctgtgcttctgtgcaggctgagctgtaaggttagcatggttctgcctgggctttgcttctgcgcttctgtgcaggctgagctgtaaggttagcatggttctgcctgggctttgcttctgcgcttctgtgcaggctgagctgtaaggttagcatggttctgcctgggctttgcttctgcgcttctgtgctagcaggtgcccacaaaatgtctttttgaatttcttaatttttgggttctggatgcaattcgtgcacgccaagaaactacttgcttgtcagtattttaattctgtagtacatgtgtgtgaatatcagccagtacttacagtaggaggatgaacagaaaaactgagaagacctgtctttcaaaagatgggtttatccactttttaagggaaaaagtgacagtttggcatgggatttgaaaagtggaaattgtggaaaaattgagctgttgaagtcccacatataaccagatttaataaagcttcacatgtgaattagctccatatgtgtgtagaaggttgcttttatagcaggtccttaagtactccttttgaaattcctcctttttttttaagtcataccattacttctttggatatgaatgtcccaagtggtatctcctactgtagtatgaggaagaatggctgttaatgtattttttgaattttggtcttgtcttggcctggatcatatccagtcaccactatgcaacaaatgatgtgcactgggcaaggatatgatgggttatgaaagctgtatcttgtttgttttttcttttgcagtactccaagtggtctaaacaggaatgtcttgtaaaacctcaagactccctattgattattcccttacatatttatttacaatttatcagggtaattggtggtgccttatgaaaagtataactcgatttcttgatctttgagcatgttttgtgtttcttgtgttttctaaaagaatattagatatggttaattgcattacatctaaaagatttaaaaaattgtgtgtatgctcaggttccccacacccatacccaccctaacccctgtcatttacattggtggcaactttaaatggtaaccaagcaaaagtacattttgataatgagtattgataatcctgaggaaaactagtgagtatatgggagccacctttgacctgtgccaaagcagtttctaatttcatttgctaactataaaataaagaactgagccaaaataatttgatcagtggtgtgattagcctattatcattgctgagaatagtgtttttggagtgtgaagtgattcctgaagatttcacctgccttctgtttccagcaagaatccagtgatgaccaacacatttcctcacttttggttcttgagaagtttatccctttgcaacaaaccattaatagggaaaacaaggaaatgctttccctttctctttggcttcttaaagctcacaaccaattcagaccccaagttacttcagagaagcaaatggcaccttttccccattgccaaggatcccagcttatgcagatatgaaggacggatcatttctgaaaatgttaagactctgcttgcagtggacttggcctcagtttcatgaaatgtgtaactctgtatgtgtatgttaggaggagggttggttgaaagagcgggggcagggaggggaatctgattacctcttgggaaataattttcttgccaacaaaaagatacacttgaagtttcttaaggtggcaagtccattaaaaaaaaaaattgtgttggaccctcccagtttagatcaagtatttcttgggggtcttgctattgtggttgataccaataaatggaagatccagaatattttcatttaaagctcaaccattaattggaacatggtgaaacattgtacacattgtaaaagtagggaacagtacaaaagaatggaatcaaatactatattatgtgaataaactagagtgattttggaatttcactctcttc

SEQ ID NO: 367916 - DNA, 11450 bp, Homo sapiens
ccacaacccagcaaagaacataggctaggtacgaggccttcgtgttaattcggccgaggctcaatccgtacctctagtaaagaagagcttgtgcccctccccgaccccttaccaagggcgagctgcgtggagtcgttggactgggcagaactttggcgggcaaggagacaaacagccacactgtgctgccggggaagagaagaagaaggaaaggccagacacacaggcgtcgtgcggctgcggaaggattccgtttcctgcagggggcggagggatttgacagcacggtaacttccggaaaagtcctgaacctcagtggaaaagccttgcaagaaacaataacaaacgggaggaggaagcgattctggggtttctgtgttgaacggttcttgtccgcgaagatgcgcttcggcctctgtcaggggacttgaacgggcttagtgggcttcagccagcttttctccaccggttccccacggggaccccccccccccccggccgttgcaatggcgggcgtggggccggggggctacgcggcggagttcgtgccaccgccagagtgccccgtctttgagccgagttgggaggagttcacagatccgctcagctttatcggccgcatccggcctttggcggagaaaaccggcatctgcaaaattcggccgcccaaggactggcagcctccatttgcctgtgaagtaaaaagctttcgtttcactccaagagtccagcgcctgaatgaacttgaggcaatgaccagagtgagattggatttcttggatcaactagcaaaattttgggaacttcaaggatctactctgaagatccctgtggtagagagaaaaatcctggatctgtatgctttgagcaagattgttgccagcaaaggaggttttgaaatggtcaccaaagagaagaaatggtctaaagtgggtagtcgcttgggatatctgccaggaaaaggaactgggtctcttttgaagtcacattatgaaagaattctctacccatatgagcttttccagtctggtgtgagccttatgggtgtgcagatgcctaatttagatcttaaagaaaaagtggagcctgaggttctcagcactgatacccaaacttccccagagccaggcacaaggatgaacattctgccgaagagaacaagacgtgtgaagactcagtcagaatctggagatgtgagtagaaacacggaactgaagaaacttcagatttttggggctgggcccaaggttgtgggcttggcaatgggaacaaaagataaagaagatgaggtcacccgaagacgaaaagttaccaacaggtcagacgcatttaacatgcaaatgagacaacggaaaggcactctctctgttaactttgttgatctctatgtttgtatgttttgtggtcggggaaacaatgaagataaattgcttttgtgtgatggatgtgatgacagctatcatacattttgtctaattcctccactacctgatgtgcccaaaggagactggaggtgtcctaaatgtgtcgccgaggaatgtagcaaacctcgagaagcctttggatttgaacaagctgtacgagagtatacacttcagagctttggagagatggcagataattttaagtctgattattttaatatgccagtccatatggttcccacagaactagtagaaaaggaattttggcggctggtaagcagcattgaagaagatgttattgtggaatatggagcagatatctcctcaaaagactttggaagtggatttccggtgaaggatgggcggagaaagattctgccagaagaagaggaatatgcactttctggttggaatttgaataacatgcctgtcctggaacagtctgttcttgcacatattaatgtggacatctctggtatgaaagtgccgtggctctatgtgggaatgtgcttctcttctttttgctggcacattgaggatcactggagttattccatcaactacttgcactggggggagccaaagacatggtatggtgtgccatctcatgctgcagagcaactggaggaggtgatgagagagctggcccccgagttatttgaatcccagcctgatcttctgcatcagttagttaccatcatgaaccccaacgtgctaatggagcatggtgtgcctgtgtacaggaccaatcagtgtgctggcgagtttgttgtgacatttcctcgtgcctatcactctggatttaaccagggctacaactttgctgaagctgtgaacttctgtactgctgactggttgcccattggacgtcaatgtgtaaatcattaccgacgcctaaggcgccactgtgtcttttcacacgaggaactaattttcaagatggcagcagatccagaatgcttagatgtggggctggctgccatggtctgcaaagaattgactctcatgactgaagaagaaacacgattaagagagtctgttgtacagatgggtgtcctgatgtcagaagaagaagtgtttgaacttgttcctgatgatgagcggcagtgttcagcatgcagaaccacatgttttctctctgctctcacatgttcctgtaatcctgagcggcttgtatgtctctaccatccaactgatctgtgcccctgccccatgcagaagaaatgtcttagatatcgctacccattagaagacctcccttctctgctatatggtgtaaaagtcagggcacagtcctatgacacttgggtcagtcgtgttacagaagcattgtctgctaacttcaaccacaaaaaagatttgattgaattgcgagtaatgctggaagatgctgaggataggaaatacccagagaatgatctctttcgaaaactcagggatgctgtaaaagaagctgagacctgtgcttctgtggctcagctgcttctgagcaaaaagcagaaacacagacagagcccagatagtgggaggactcggaccaaactgacagtggaagaattgaaggcctttgtccaacaactttttagtcttccgtgtgtcatcagccaagctcggcaagtaaagaatctgctagatgatgtggaagagtttcatgaacgtgctcaggaggccatgatggatgaaaccccagattcttccaaactccagatgttgatagatatgggctctagtctctatgtggaactccctgaattaccacgactgaagcaagagctacaacaggctcggtggttggacgaagtaagactgaccttatcagatccgcaacaagtcactttggatgtcatgaagaagctgatagactctggggtagggttggcaccccaccatgctgtggagaaagcaatggctgaactacaggagctccttacagtctctgaacgatgggaagaaaaggctaaggtctgcctacaggcaagaccgaggcacagtgtggcaagtttagaaagcattgtgaatgaagccaagaacattccagcctttctacccaatgtgttgtccttgaaagaagccttacaaaaggctcgagaatggaccgctaaagtggaagctattcagagtggcagcaattacgcttatttggagcagcttgagagcttgtctgcgaaaggacgccctattcctgtgcgtcttgaagcactgccgcaagtggaatcacaggtagcagcagcacgggcatggagagaacggactgggcggacgtttcttaagaagaattctagccatacattgttacaggtgctgagcccccggaccgacattggtgtatatgggagtggcaaaaataggaggaaaaaagtaaaagaactaatagaaaaagaaaaagaaaaggatctggacctggagcctctgagtgatctggaggaaggattggaggaaaccagagatacagccatggtggtggcagttttcaaagaacgggagcaaaaagagattgaagccatgcattctctcagagcagccaacctagccaagatgacaatggtggaccgcatagaagaagtaaaattttgcatttgccgcaagacagccagtgggtttatgctacagtgtgagctctgcaaagactggttccataacagctgtgttcctcttcctaaatcaagttcccaaaaaaaaggatccagctggcaagctaaagaagtaaaattcctttgccctctttgtatgcggtctcgaaggcccaggctagagactattctgtcactcctggtatcccttcagaagttgcccgtacggttgcctgaaggagaggccctgcagtgtttgacagaacgtgctatgagttggcaagatagagcgcggcaggctctagccacagatgaactatcctctgccctggccaaactatctgtgttgagccagcgtatggtggaacaggcggctcgagaaaaaactgaaaagatcatcagtgcagaactccaaaaagcagctgccaatccagacttacagggacacttacctagtttccagcagtctgcttttaaccgggtggtgagcagtgtgtcatcttctcctcgacaaacaatggactatgatgatgaagaaacagactctgatgaagacattcgagagacatatggctacgacatgaaggacacagccagtgtgaagtcctctagtagtcttgaacccaatcttttttgtgatgaagagattcccatcaaatccgaggaggtggtgacccacatgtggacagcaccttcattttgtgcagagcatgcttattcttctgcttctaagagttgttctcaaggttctagcaccccaaggaaacaacctcggaagagccctttggtgccccgaagtttggaacctccagtgctggagttgtcacctggagctaaggcacaactggaagaacttatgatggttggagatctcctggaagtatctctggacgagactcaacacatatggcggattttgcaggccacacacccaccctctgaagacagattcttgcatatcatggaggatgacagcatggaagagaaaccactaaaagtgaaaggaaaggactcttcagagaagaaacggaaacggaagctagaaaaggtagagcaactttttggagaaggaaaacagaagtccaaggagttaaagaaaatggacaaacctagaaagaagaaattaaaattaggtgcagacaaatcaaaggagctgaataaactggccaagaaactagcaaaagaagaagagagaaagaaaaagaaggagaaggctgctgcagccaaagttgaacttgtgaaagagagcactgaaaagaaaagagagaaaaaggtgctggacatcccctcaaagtatgactggtcaggagcagaggagtctgatgatgagaatgctgtgtgcgcagcacagaactgccaaaggccctgcaaggacaagggagttgtatttgtaacggaagaagagaagaataaaaaatattagttttaaaagtggcctatgtgactgcttttctaaaaaggtatttaatgctcttagtactttggcttatctctttgaaataaagctaatacacaggattgccttcacattgttgtactcttcctttcttgattgataattgcattgtcttagagcctagaaattgttaatattagctaaaactacttggctgctctattagaagttccctttttgtcaaatttttctcaaacatgtttctgcctcacaaggagccccaggtattcatgaggtaatggagtacctaagaggcctaattttgtggacacactatggtgaaatataattttggggtattaacttctcagcttctttctttaaaaaataaccccataagaagtcattgcctatctagacatcccagttgtttgctattgtttaagccaagaaagctctttggtttgcttttattctaggcttaatgtttatgtaacctaaacattccccaatcttgtttcctacaggtagactgggtacaatgtgatggtggctgtgatgagtggtttcatcaagtttgtgtgggtgtatctccagaaatggctgaaaatgaagattacatctgtataaactgtgcaaagaagcaggggccagttagcccaggtccagcaccacctccttccttcataatgagctacaaactaccaatggaggatcttaaagagaccagttagcagatgcttggttagtttgggacatggggggacatggaccacattgagaccttagtcatcaagtagagtggtttatatccacttggaatgttgcttccaaagatgaatggccttcagagaaagtccccttagtgctggcttcctctttgcatggactctgtgggttacattctctatcaacatatctatgcagagggtgtcttctttggtacaacagccaatatttcatgtctcctttgagtgtggtttactgcattaaggccagatgcttaattgagctctagggtggctggttagtattaatacattggtgtgctaacagggcatataggatgtggcttttgtccagctgatagtagttagaggcttacaacttaggagcagcaccaactgaaggtgctaattgcttggatctccttcattgggatagttggagagggattggagtaccactttccttccactgttacctggtacttaatgccctaaagatacaactaggagtaacagggccaaagttatttctgttagacgtcaaggaatggtatcacagtctattgacctcagcgatttgtgcttgtttgtgctagaagaacatcccaaataggagaacctctcacaagctggggcaggtcaccttatctttgtaagatgaggatatcatctagatcagaaatctgactagattggattctgaggagaagaacctactacaaggcaaggagccgttttttggctttgaaaagtcttgctgtcttgggtctacattttagggaagagcaggtacatggatccaggcttctgccaaaaaaaaaaagagaagaagatgacgatgatgaccagtcgtactatcttactgagccacagtgatgcatgcttttcggggaaaacttcattcacaagtattccagacaccaggcttcaggcatggccatgagcaagaccagcaaataacagctttttgccttgcagccctgaccccaatgtctgctgtttccaacactggtgatttctaactacggcccacagcagatgctgttgaataacaccatggcttcatcagaggatgtggggttgtagtacctctgggtgatgaagttgttttagtaaatccatttttaaaaaaaaaaaaggacttgtttttacttttttctaaatgtctctgactactgactgttctatacatagattatttttccttttttaatatacatatatgaatatataaatatatatatttactgttaccagcagcatatgacagagtttcaacatcaaaaatccatttgggggcttgctttttcttttttgctttaaaaaaaaaaatcccattccttctttgtagtacaaggagttagcactccctcctccatcccagcctgaccagatcttccattttgcttttgttcatatagataattatatgtcctttgtgtgttgggacttgtccctgtctgttgggaaacttggtctcactctagtctgtgctggctcttttttcttttgtgtgtgaatgtttgaaactatggtgctgtgtcctcttccctcctgttgtgttctctgttcttcttaaggtattaggtaagctgtatgtaaactcttattagaaggggactaatttttttttaaaggacaaaaaaaaaaatgactaaaaatagtgttttgtcatcactgtctggtgtctttattttggtttaaaaaaatctgtggtttgacttaaattcatcagttttccttttaaaggggggattggggtggacctagcaacagcttatagtttcctcttccctttttgccccagtctcttttaaagaactgtcttctagtaactagaagtgaaatgtactgtccagttacagtttgagtgggtatgagatttaactcaaaaggaatcttacaaaaaaaaagatgttttcttataaaatccaatttctgtaaatgttttctctgaagttcatactacctactttttattcattcttaatactgtataacattttgagtgttttgacttgttcagaggtttgttagtgttgctgtgcatatgtcttgaggtctcatctgaagtaagtttgtgtatgatcgaagatttcaatggatattgcaaggtaactaattaactgatttcataagttttcgttttgccaagctaacgattatcaattaagaatttcctctggttgatgttatacaagaaagcacaatattttttgcctgttgatcttctttgtaacagtcttcagatatttgtgggttaaaaattgaatgtaattttaagtgacagatgcctggaatacatttaaaatttttatttttccttcctaatcatccattaactattccactatcagtggagagtcatgaggatgctgagaaagtatgaatagcttcctgtcaccttctgacgttttgaaacttaaatatgtcttttcgttgatactgtgggattttctgtatttacttgacagtcatggaggatttggtatgacttgaccacaggtttagaccaaggctgagaagaacagaagggagaaattaatggcaaaacaaaaaatacacaaatctgcggttttggaattaatgaaacaagattcatctatttaaagaaatgttggtgttctaatacaaagcattattttcacttagagaaaattacttacttgctcccttctgtattgtaatattttgtattaagacatgatttaaaatgtctttctacccttatctcctctaaactgcaactgaagttgcaattcttcatcattagtattttaactctggcaaaggttatagaaagaaaaatggaaatatggtaggcctgtggtattcttaaaagctaagtcattagaactatgcagatccccaagtttaaaagtacaaatacagcaccagtagttagctttctagctgggggagaagacaggagatttttcttccacagatgtttattttgcttcctgataggtactgcagcaaagccatgttgatgtgtagatgcatgacttcctcactaagctgctgcacaccagctttgcctgcatgattcaaatttgtgcctcagtaaaattataaattattgcatgtcataccttgaataatggaaacggcaaacattaaacctgtgattacccataatgtactttaataataaaaaacatggcagccaggtgcagtagagtgcacctgtggtcaggaggctgaagtgggaagattgcttcaacctgtgagtttgagtcccgcctggtcaacagcgagaccccatgtgtctgtctgtctctctctttttttaaaggacagaggctaagctgtaaggttagcatggttctgcctgggctttgcttctgtgcttctgtgcaggctgagctgtaaggttagcatggttctgcctgggctttgcttctgcgcttctgtgcaggctgagctgtaaggttagcatggttctgcctgggctttgcttctgcgcttctgtgcaggctgagctgtaaggttagcatggttctgcctgggctttgcttctgcgcttctgtgctagcaggtgcccacaaaatgtctttttgaatttcttaatttttgggttctggatgcaattcgtgcacgccaagaaactacttgcttgtcagtattttaattctgtagtacatgtgtgtgaatatcagccagtacttacagtaggaggatgaacagaaaaactgagaagacctgtctttcaaaagatgggtttatccactttttaagggaaaaagtgacagtttggcatgggatttgaaaagtggaaattgtggaaaaattgagctgttgaagtcccacatataaccagatttaataaagcttcacatgtgaattagctccatatgtgtgtagaaggttgcttttatagcaggtccttaagtactccttttgaaattcctcctttttttttaagtcataccattacttctttggatatgaatgtcccaagtggtatctcctactgtagtatgaggaagaatggctgttaatgtattttttgaattttggtcttgtcttggcctggatcatatccagtcaccactatgcaacaaatgatgtgcactgggcaaggatatgatgggttatgaaagctgtatcttgtttgttttttcttttgcagtactccaagtggtctaaacaggaatgtcttgtaaaacctcaagactccctattgattattcccttacatatttatttacaatttatcagggtaattggtggtgccttatgaaaagtataactcgatttcttgatctttgagcatgttttgtgtttcttgtgttttctaaaagaatattagatatggttaattgcattacatctaaaagatttaaaaaattgtgtgtatgctcaggttccccacacccatacccaccctaacccctgtcatttacattggtggcaactttaaatggtaaccaagcaaaagtacattttgataatgagtattgataatcctgaggaaaactagtgagtatatgggagccacctttgacctgtgccaaagcagtttctaatttcatttgctaactataaaataaagaactgagccaaaataatttgatcagtggtgtgattagcctattatcattgctgagaatagtgtttttggagtgtgaagtgattcctgaagatttcacctgccttctgtttccagcaagaatccagtgatgaccaacacatttcctcacttttggttcttgagaagtttatccctttgcaacaaaccattaatagggaaaacaaggaaatgctttccctttctctttggcttcttaaagctcacaaccaattcagaccccaagttacttcagagaagcaaatggcaccttttccccattgccaaggatcccagcttatgcagatatgaaggacggatcatttctgaaaatgttaagactctgcttgcagtggacttggcctcagtttcatgaaatgtgtaactctgtatgtgtatgttaggaggagggttggttgaaagagcgggggcagggaggggaatctgattacctcttgggaaataattttcttgccaacaaaaagatacacttgaagtttcttaaggtggcaagtccattaaaaaaaaaaattgtgttggaccctcccagtttagatcaagtatttcttgggggtcttgctattgtggttgataccaataaatggaagatccagaatattttcatttaaagctcaaccattaattggaacatggtgaaacattgtacacattgtaaaagtagggaacagtacaaaagaatggaatcaaatactatattatgtgaataaactagagtgattttggaatttcactctcttc

SEQ ID NO: 367917 - DNA, 10135 bp, Homo sapiens
caattcagatagtggactgaactctagaagattaaataatattgttccatctctcttaaaacatcccatgtaataagacttactaaatacattgtaataataatatttcctttttaagaattaagtactttatttttgttactcttgtaattatagtattggctgtcaacagtcttagaaattagtccctaatttgggagttcctccaagtaatacctgcaggttgtatgtagtacgtactgcatacacatacaacattaatgggtaagctctctggatcttacgtgactggattagaatcttaaatttgccttgctgtatgattttgagcaagttactaactttgctgtacctcaggttcttcatcttcagtgagagataataaatagtatatctacctctagataaacagttgtaagattttaactaatttaaataattttaaatagtgtctggtccatagtaagctctcaacattggtttttactattattgtgtaactttttatttcaagatgaggtcacccgaagacgaaaagttaccaacaggtcagacgcatttaacatgcaaatgagacaacggaaaggcactctctctgttaactttgttgatctctatgtttgtatgttttgtggtcggggaaacaatgaagataaattgcttttgtgtgatggatgtgatgacagctatcatacattttgtctaattcctccactacctgatgtgcccaaaggagactggaggtgtcctaaatgtgtcgccgaggaatgtagcaaacctcgagaagcctttggatttgaacaagctgtacgagagtatacacttcagagctttggagagatggcagataattttaagtctgattattttaatatgccagtccatatggttcccacagaactagtagaaaaggaattttggcggctggtaagcagcattgaagaagatgttattgtggaatatggagcagatatctcctcaaaagactttggaagtggatttccggtgaaggatgggcggagaaagattctgccagaagaagaggaatatgcactttctggttggaatttgaataacatgcctgtcctggaacagtctgttcttgcacatattaatgtggacatctctggtatgaaagtgccgtggctctatgtgggaatgtgcttctcttctttttgctggcacattgaggatcactggagttattccatcaactacttgcactggggggagccaaagacatggtatggtgtgccatctcatgctgcagagcaactggaggaggtgatgagagagctggcccccgagttatttgaatcccagcctgatcttctgcatcagttagttaccatcatgaaccccaacgtgctaatggagcatggtgtgcctgtgtacaggaccaatcagtgtgctggcgagtttgttgtgacatttcctcgtgcctatcactctggatttaaccagggctacaactttgctgaagctgtgaacttctgtactgctgactggttgcccattggacgtcaatgtgtaaatcattaccgacgcctaaggcgccactgtgtcttttcacacgaggaactaattttcaagatggcagcagatccagaatgcttagatgtggggctggctgccatggtctgcaaagaattgactctcatgactgaagaagaaacacgattaagagagtctgttgtacagatgggtgtcctgatgtcagaagaagaagtgtttgaacttgttcctgatgatgagcggcagtgttcagcatgcagaaccacatgttttctctctgctctcacatgttcctgtaatcctgagcggcttgtatgtctctaccatccaactgatctgtgcccctgccccatgcagaagaaatgtcttagatatcgctacccattagaagacctcccttctctgctatatggtgtaaaagtcagggcacagtcctatgacacttgggtcagtcgtgttacagaagcattgtctgctaacttcaaccacaaaaaagatttgattgaattgcgagtaatgctggaagatgctgaggataggaaatacccagagaatgatctctttcgaaaactcagggatgctgtaaaagaagctgagacctgtgcttctgtggctcagctgcttctgagcaaaaagcagaaacacagacagagcccagatagtgggaggactcggaccaaactgacagtggaagaattgaaggcctttgtccaacaactttttagtcttccgtgtgtcatcagccaagctcggcaagtaaagaatctgctagatgatgtggaagagtttcatgaacgtgctcaggaggccatgatggatgaaaccccagattcttccaaactccagatgttgatagatatgggctctagtctctatgtggaactccctgaattaccacgactgaagcaagagctacaacaggctcggtggttggacgaagtaagactgaccttatcagatccgcaacaagtcactttggatgtcatgaagaagctgatagactctggggtagggttggcaccccaccatgctgtggagaaagcaatggctgaactacaggagctccttacagtctctgaacgatgggaagaaaaggctaaggtctgcctacaggcaagaccgaggcacagtgtggcaagtttagaaagcattgtgaatgaagccaagaacattccagcctttctacccaatgtgttgtccttgaaagaagccttacaaaaggctcgagaatggaccgctaaagtggaagctattcagagtggcagcaattacgcttatttggagcagcttgagagcttgtctgcgaaaggacgccctattcctgtgcgtcttgaagcactgccgcaagtggaatcacaggtagcagcagcacgggcatggagagaacggactgggcggacgtttcttaagaagaattctagccatacattgttacaggtgctgagcccccggaccgacattggtgtatatgggagtggcaaaaataggaggaaaaaagtaaaagaactaatagaaaaagaaaaagaaaaggatctggacctggagcctctgagtgatctggaggaaggattggaggaaaccagagatacagccatggtggtggcagttttcaaagaacgggagcaaaaagagattgaagccatgcattctctcagagcagccaacctagccaagatgacaatggtggaccgcatagaagaagtaaaattttgcatttgccgcaagacagccagtgggtttatgctacagtgtgagctctgcaaagactggttccataacagctgtgttcctcttcctaaatcaagttcccaaaaaaaaggatccagctggcaagctaaagaagtaaaattcctttgccctctttgtatgcggtctcgaaggcccaggctagagactattctgtcactcctggtatcccttcagaagttgcccgtacggttgcctgaaggagaggccctgcagtgtttgacagaacgtgctatgagttggcaagatagagcgcggcaggctctagccacagatgaactatcctctgccctggccaaactatctgtgttgagccagcgtatggtggaacaggcggctcgagaaaaaactgaaaagatcatcagtgcagaactccaaaaagcagctgccaatccagacttacagggacacttacctagtttccagcagtctgcttttaaccgggtggtgagcagtgtgtcatcttctcctcgacaaacaatggactatgatgatgaagaaacagactctgatgaagacattcgagagacatatggctacgacatgaaggacacagccagtgtgaagtcctctagtagtcttgaacccaatcttttttgtgatgaagagattcccatcaaatccgaggaggtggtgacccacatgtggacagcaccttcattttgtgcagagcatgcttattcttctgcttctaagagttgttctcaaggttctagcaccccaaggaaacaacctcggaagagccctttggtgccccgaagtttggaacctccagtgctggagttgtcacctggagctaaggcacaactggaagaacttatgatggttggagatctcctggaagtatctctggacgagactcaacacatatggcggattttgcaggccacacacccaccctctgaagacagattcttgcatatcatggaggatgacagcatggaagagaaaccactaaaagtgaaaggaaaggactcttcagagaagaaacggaaacggaagctagaaaaggtagagcaactttttggagaaggaaaacagaagtccaaggagttaaagaaaatggacaaacctagaaagaagaaattaaaattaggtgcagacaaatcaaaggagctgaataaactggccaagaaactagcaaaagaagaagagagaaagaaaaagaaggagaaggctgctgcagccaaagttgaacttgtgaaagagagcactgaaaagaaaagagagaaaaaggtgctggacatcccctcaaagtatgactggtcaggagcagaggagtctgatgatgagaatgctgtgtgcgcagcacagaactgccaaaggccctgcaaggacaaggtagactgggtacaatgtgatggtggctgtgatgagtggtttcatcaagtttgtgtgggtgtatctccagaaatggctgaaaatgaagattacatctgtataaactgtgcaaagaagcaggggccagttagcccaggtccagcaccacctccttccttcataatgagctacaaactaccaatggaggatcttaaagagaccagttagcagatgcttggttagtttgggacatggggggacatggaccacattgagaccttagtcatcaagtagagtggtttatatccacttggaatgttgcttccaaagatgaatggccttcagagaaagtccccttagtgctggcttcctctttgcatggactctgtgggttacattctctatcaacatatctatgcagagggtgtcttctttggtacaacagccaatatttcatgtctcctttgagtgtggtttactgcattaaggccagatgcttaattgagctctagggtggctggttagtattaatacattggtgtgctaacagggcatataggatgtggcttttgtccagctgatagtagttagaggcttacaacttaggagcagcaccaactgaaggtgctaattgcttggatctccttcattgggatagttggagagggattggagtaccactttccttccactgttacctggtacttaatgccctaaagatacaactaggagtaacagggccaaagttatttctgttagacgtcaaggaatggtatcacagtctattgacctcagcgatttgtgcttgtttgtgctagaagaacatcccaaataggagaacctctcacaagctggggcaggtcaccttatctttgtaagatgaggatatcatctagatcagaaatctgactagattggattctgaggagaagaacctactacaaggcaaggagccgttttttggctttgaaaagtcttgctgtcttgggtctacattttagggaagagcaggtacatggatccaggcttctgccaaaaaaaaaaagagaagaagatgacgatgatgaccagtcgtactatcttactgagccacagtgatgcatgcttttcggggaaaacttcattcacaagtattccagacaccaggcttcaggcatggccatgagcaagaccagcaaataacagctttttgccttgcagccctgaccccaatgtctgctgtttccaacactggtgatttctaactacggcccacagcagatgctgttgaataacaccatggcttcatcagaggatgtggggttgtagtacctctgggtgatgaagttgttttagtaaatccatttttaaaaaaaaaaaaggacttgtttttacttttttctaaatgtctctgactactgactgttctatacatagattatttttccttttttaatatacatatatgaatatataaatatatatatttactgttaccagcagcatatgacagagtttcaacatcaaaaatccatttgggggcttgctttttcttttttgctttaaaaaaaaaaatcccattccttctttgtagtacaaggagttagcactccctcctccatcccagcctgaccagatcttccattttgcttttgttcatatagataattatatgtcctttgtgtgttgggacttgtccctgtctgttgggaaacttggtctcactctagtctgtgctggctcttttttcttttgtgtgtgaatgtttgaaactatggtgctgtgtcctcttccctcctgttgtgttctctgttcttcttaaggtattaggtaagctgtatgtaaactcttattagaaggggactaatttttttttaaaggacaaaaaaaaaaatgactaaaaatagtgttttgtcatcactgtctggtgtctttattttggtttaaaaaaatctgtggtttgacttaaattcatcagttttccttttaaaggggggattggggtggacctagcaacagcttatagtttcctcttccctttttgccccagtctcttttaaagaactgtcttctagtaactagaagtgaaatgtactgtccagttacagtttgagtgggtatgagatttaactcaaaaggaatcttacaaaaaaaaagatgttttcttataaaatccaatttctgtaaatgttttctctgaagttcatactacctactttttattcattcttaatactgtataacattttgagtgttttgacttgttcagaggtttgttagtgttgctgtgcatatgtcttgaggtctcatctgaagtaagtttgtgtatgatcgaagatttcaatggatattgcaaggtaactaattaactgatttcataagttttcgttttgccaagctaacgattatcaattaagaatttcctctggttgatgttatacaagaaagcacaatattttttgcctgttgatcttctttgtaacagtcttcagatatttgtgggttaaaaattgaatgtaattttaagtgacagatgcctggaatacatttaaaatttttatttttccttcctaatcatccattaactattccactatcagtggagagtcatgaggatgctgagaaagtatgaatagcttcctgtcaccttctgacgttttgaaacttaaatatgtcttttcgttgatactgtgggattttctgtatttacttgacagtcatggaggatttggtatgacttgaccacaggtttagaccaaggctgagaagaacagaagggagaaattaatggcaaaacaaaaaatacacaaatctgcggttttggaattaatgaaacaagattcatctatttaaagaaatgttggtgttctaatacaaagcattattttcacttagagaaaattacttacttgctcccttctgtattgtaatattttgtattaagacatgatttaaaatgtctttctacccttatctcctctaaactgcaactgaagttgcaattcttcatcattagtattttaactctggcaaaggttatagaaagaaaaatggaaatatggtaggcctgtggtattcttaaaagctaagtcattagaactatgcagatccccaagtttaaaagtacaaatacagcaccagtagttagctttctagctgggggagaagacaggagatttttcttccacagatgtttattttgcttcctgataggtactgcagcaaagccatgttgatgtgtagatgcatgacttcctcactaagctgctgcacaccagctttgcctgcatgattcaaatttgtgcctcagtaaaattataaattattgcatgtcataccttgaataatggaaacggcaaacattaaacctgtgattacccataatgtactttaataataaaaaacatggcagccaggtgcagtagagtgcacctgtggtcaggaggctgaagtgggaagattgcttcaacctgtgagtttgagtcccgcctggtcaacagcgagaccccatgtgtctgtctgtctctctctttttttaaaggacagaggctaagctgtaaggttagcatggttctgcctgggctttgcttctgtgcttctgtgcaggctgagctgtaaggttagcatggttctgcctgggctttgcttctgcgcttctgtgcaggctgagctgtaaggttagcatggttctgcctgggctttgcttctgcgcttctgtgcaggctgagctgtaaggttagcatggttctgcctgggctttgcttctgcgcttctgtgctagcaggtgcccacaaaatgtctttttgaatttcttaatttttgggttctggatgcaattcgtgcacgccaagaaactacttgcttgtcagtattttaattctgtagtacatgtgtgtgaatatcagccagtacttacagtaggaggatgaacagaaaaactgagaagacctgtctttcaaaagatgggtttatccactttttaagggaaaaagtgacagtttggcatgggatttgaaaagtggaaattgtggaaaaattgagctgttgaagtcccacatataaccagatttaataaagcttcacatgtgaattagctccatatgtgtgtagaaggttgcttttatagcaggtccttaagtactccttttgaaattcctcctttttttttaagtcataccattacttctttggatatgaatgtcccaagtggtatctcctactgtagtatgaggaagaatggctgttaatgtattttttgaattttggtcttgtcttggcctggatcatatccagtcaccactatgcaacaaatgatgtgcactgggcaaggatatgatgggttatgaaagctgtatcttgtttgttttttcttttgcagtactccaagtggtctaaacaggaatgtcttgtaaaacctcaagactccctattgattattcccttacatatttatttacaatttatcagggtaattggtggtgccttatgaaaagtataactcgatttcttgatctttgagcatgttttgtgtttcttgtgttttctaaaagaatattagatatggttaattgcattacatctaaaagatttaaaaaattgtgtgtatgctcaggttccccacacccatacccaccctaacccctgtcatttacattggtggcaactttaaatggtaaccaagcaaaagtacattttgataatgagtattgataatcctgaggaaaactagtgagtatatgggagccacctttgacctgtgccaaagcagtttctaatttcatttgctaactataaaataaagaactgagccaaaataatttgatcagtggtgtgattagcctattatcattgctgagaatagtgtttttggagtgtgaagtgattcctgaagatttcacctgccttctgtttccagcaagaatccagtgatgaccaacacatttcctcacttttggttcttgagaagtttatccctttgcaacaaaccattaatagggaaaacaaggaaatgctttccctttctctttggcttcttaaagctcacaaccaattcagaccccaagttacttcagagaagcaaatggcaccttttccccattgccaaggatcccagcttatgcagatatgaaggacggatcatttctgaaaatgttaagactctgcttgcagtggacttggcctcagtttcatgaaatgtgtaactctgtatgtgtatgttaggaggagggttggttgaaagagcgggggcagggaggggaatctgattacctcttgggaaataattttcttgccaacaaaaagatacacttgaagtttcttaaggtggcaagtccattaaaaaaaaaaattgtgttggaccctcccagtttagatcaagtatttcttgggggtcttgctattgtggttgataccaataaatggaagatccagaatattttcatttaaagctcaaccattaattggaacatggtgaaacattgtacacattgtaaaagtagggaacagtacaaaagaatggaatcaaatactatattatgtgaataaactagagtgattttggaatttcactctcttc

SEQ ID NO: 367918 - DNA, 8309 bp, Homo sapiens
cacaccacctgagtccacaccacctgagtccccctgccccatgcagaagaaatgtcttagatatcgctacccattagaagacctcccttctctgctatatggtgtaaaagtcagggcacagtcctatgacacttgggtcagtcgtgttacagaagcattgtctgctaacttcaaccacaaaaaagatttgattgaattgcgagtaatgctggaagatgctgaggataggaaatacccagagaatgatctctttcgaaaactcagggatgctgtaaaagaagctgagacctgtgcttctgtggctcagctgcttctgagcaaaaagcagaaacacagacagagcccagatagtgggaggactcggaccaaactgacagtggaagaattgaaggcctttgtccaacaactttttagtcttccgtgtgtcatcagccaagctcggcaagtaaagaatctgctagatgatgtggaagagtttcatgaacgtgctcaggaggccatgatggatgaaaccccagattcttccaaactccagatgttgatagatatgggctctagtctctatgtggaactccctgaattaccacgactgaagcaagagctacaacaggctcggtggttggacgaagtaagactgaccttatcagatccgcaacaagtcactttggatgtcatgaagaagctgatagactctggggtagggttggcaccccaccatgctgtggagaaagcaatggctgaactacaggagctccttacagtctctgaacgatgggaagaaaaggctaaggtctgcctacaggcaagaccgaggcacagtgtggcaagtttagaaagcattgtgaatgaagccaagaacattccagcctttctacccaatgtgttgtccttgaaagaagccttacaaaaggctcgagaatggaccgctaaagtggaagctattcagagtggcagcaattacgcttatttggagcagcttgagagcttgtctgcgaaaggacgccctattcctgtgcgtcttgaagcactgccgcaagtggaatcacaggtagcagcagcacgggcatggagagaacggactgggcggacgtttcttaagaagaattctagccatacattgttacaggtgctgagcccccggaccgacattggtgtatatgggagtggcaaaaataggaggaaaaaagtaaaagaactaatagaaaaagaaaaagaaaaggatctggacctggagcctctgagtgatctggaggaaggattggaggaaaccagagatacagccatggtggtggcagttttcaaagaacgggagcaaaaagagattgaagccatgcattctctcagagcagccaacctagccaagatgacaatggtggaccgcatagaagaagtaaaattttgcatttgccgcaagacagccagtgggtttatgctacagtgtgagctctgcaaagactggttccataacagctgtgttcctcttcctaaatcaagttcccaaaaaaaaggatccagctggcaagctaaagaagtaaaattcctttgccctctttgtatgcggtctcgaaggcccaggctagagactattctgtcactcctggtatcccttcagaagttgcccgtacggttgcctgaaggagaggccctgcagtgtttgacagaacgtgctatgagttggcaagatagagcgcggcaggctctagccacagatgaactatcctctgccctggccaaactatctgtgttgagccagcgtatggtggaacaggcggctcgagaaaaaactgaaaagatcatcagtgcagaactccaaaaagcagctgccaatccagacttacagggacacttacctagtttccagcagtctgcttttaaccgggtggtgagcagtgtgtcatcttctcctcgacaaacaatggactatgatgatgaagaaacagactctgatgaagacattcgagagacatatggctacgacatgaaggacacagccagtgtgaagtcctctagtagtcttgaacccaatcttttttgtgatgaagagattcccatcaaatccgaggaggtggtgacccacatgtggacagcaccttcattttgtgcagagcatgcttattcttctgcttctaagagttgttctcaaggttctagcaccccaaggaaacaacctcggaagagccctttggtgccccgaagtttggaacctccagtgctggagttgtcacctggagctaaggcacaactggaagaacttatgatggttggagatctcctggaagtatctctggacgagactcaacacatatggcggattttgcaggccacacacccaccctctgaagacagattcttgcatatcatggaggatgacagcatggaagagaaaccactaaaagtgaaaggaaaggactcttcagagaagaaacggaaacggaagctagaaaaggtagagcaactttttggagaaggaaaacagaagtccaaggagttaaagaaaatggacaaacctagaaagaagaaattaaaattaggtgcagacaaatcaaaggagctgaataaactggccaagaaactagcaaaagaagaagagagaaagaaaaagaaggagaaggctgctgcagccaaagttgaacttgtgaaagagagcactgaaaagaaaagagagaaaaaggtgctggacatcccctcaaagtatgactggtcaggagcagaggagtctgatgatgagaatgctgtgtgcgcagcacagaactgccaaaggccctgcaaggacaaggtagactgggtacaatgtgatggtggctgtgatgagtggtttcatcaagtttgtgtgggtgtatctccagaaatggctgaaaatgaagattacatctgtataaactgtgcaaagaagcaggggccagttagcccaggtccagcaccacctccttccttcataatgagctacaaactaccaatggaggatcttaaagagaccagttagcagatgcttggttagtttgggacatggggggacatggaccacattgagaccttagtcatcaagtagagtggtttatatccacttggaatgttgcttccaaagatgaatggccttcagagaaagtccccttagtgctggcttcctctttgcatggactctgtgggttacattctctatcaacatatctatgcagagggtgtcttctttggtacaacagccaatatttcatgtctcctttgagtgtggtttactgcattaaggccagatgcttaattgagctctagggtggctggttagtattaatacattggtgtgctaacagggcatataggatgtggcttttgtccagctgatagtagttagaggcttacaacttaggagcagcaccaactgaaggtgctaattgcttggatctccttcattgggatagttggagagggattggagtaccactttccttccactgttacctggtacttaatgccctaaagatacaactaggagtaacagggccaaagttatttctgttagacgtcaaggaatggtatcacagtctattgacctcagcgatttgtgcttgtttgtgctagaagaacatcccaaataggagaacctctcacaagctggggcaggtcaccttatctttgtaagatgaggatatcatctagatcagaaatctgactagattggattctgaggagaagaacctactacaaggcaaggagccgttttttggctttgaaaagtcttgctgtcttgggtctacattttagggaagagcaggtacatggatccaggcttctgccaaaaaaaaaaagagaagaagatgacgatgatgaccagtcgtactatcttactgagccacagtgatgcatgcttttcggggaaaacttcattcacaagtattccagacaccaggcttcaggcatggccatgagcaagaccagcaaataacagctttttgccttgcagccctgaccccaatgtctgctgtttccaacactggtgatttctaactacggcccacagcagatgctgttgaataacaccatggcttcatcagaggatgtggggttgtagtacctctgggtgatgaagttgttttagtaaatccatttttaaaaaaaaaaaaggacttgtttttacttttttctaaatgtctctgactactgactgttctatacatagattatttttccttttttaatatacatatatgaatatataaatatatatatttactgttaccagcagcatatgacagagtttcaacatcaaaaatccatttgggggcttgctttttcttttttgctttaaaaaaaaaaatcccattccttctttgtagtacaaggagttagcactccctcctccatcccagcctgaccagatcttccattttgcttttgttcatatagataattatatgtcctttgtgtgttgggacttgtccctgtctgttgggaaacttggtctcactctagtctgtgctggctcttttttcttttgtgtgtgaatgtttgaaactatggtgctgtgtcctcttccctcctgttgtgttctctgttcttcttaaggtattaggtaagctgtatgtaaactcttattagaaggggactaatttttttttaaaggacaaaaaaaaaaatgactaaaaatagtgttttgtcatcactgtctggtgtctttattttggtttaaaaaaatctgtggtttgacttaaattcatcagttttccttttaaaggggggattggggtggacctagcaacagcttatagtttcctcttccctttttgccccagtctcttttaaagaactgtcttctagtaactagaagtgaaatgtactgtccagttacagtttgagtgggtatgagatttaactcaaaaggaatcttacaaaaaaaaagatgttttcttataaaatccaatttctgtaaatgttttctctgaagttcatactacctactttttattcattcttaatactgtataacattttgagtgttttgacttgttcagaggtttgttagtgttgctgtgcatatgtcttgaggtctcatctgaagtaagtttgtgtatgatcgaagatttcaatggatattgcaaggtaactaattaactgatttcataagttttcgttttgccaagctaacgattatcaattaagaatttcctctggttgatgttatacaagaaagcacaatattttttgcctgttgatcttctttgtaacagtcttcagatatttgtgggttaaaaattgaatgtaattttaagtgacagatgcctggaatacatttaaaatttttatttttccttcctaatcatccattaactattccactatcagtggagagtcatgaggatgctgagaaagtatgaatagcttcctgtcaccttctgacgttttgaaacttaaatatgtcttttcgttgatactgtgggattttctgtatttacttgacagtcatggaggatttggtatgacttgaccacaggtttagaccaaggctgagaagaacagaagggagaaattaatggcaaaacaaaaaatacacaaatctgcggttttggaattaatgaaacaagattcatctatttaaagaaatgttggtgttctaatacaaagcattattttcacttagagaaaattacttacttgctcccttctgtattgtaatattttgtattaagacatgatttaaaatgtctttctacccttatctcctctaaactgcaactgaagttgcaattcttcatcattagtattttaactctggcaaaggttatagaaagaaaaatggaaatatggtaggcctgtggtattcttaaaagctaagtcattagaactatgcagatccccaagtttaaaagtacaaatacagcaccagtagttagctttctagctgggggagaagacaggagatttttcttccacagatgtttattttgcttcctgataggtactgcagcaaagccatgttgatgtgtagatgcatgacttcctcactaagctgctgcacaccagctttgcctgcatgattcaaatttgtgcctcagtaaaattataaattattgcatgtcataccttgaataatggaaacggcaaacattaaacctgtgattacccataatgtactttaataataaaaaacatggcagccaggtgcagtagagtgcacctgtggtcaggaggctgaagtgggaagattgcttcaacctgtgagtttgagtcccgcctggtcaacagcgagaccccatgtgtctgtctgtctctctctttttttaaaggacagaggctaagctgtaaggttagcatggttctgcctgggctttgcttctgtgcttctgtgcaggctgagctgtaaggttagcatggttctgcctgggctttgcttctgcgcttctgtgcaggctgagctgtaaggttagcatggttctgcctgggctttgcttctgcgcttctgtgcaggctgagctgtaaggttagcatggttctgcctgggctttgcttctgcgcttctgtgctagcaggtgcccacaaaatgtctttttgaatttcttaatttttgggttctggatgcaattcgtgcacgccaagaaactacttgcttgtcagtattttaattctgtagtacatgtgtgtgaatatcagccagtacttacagtaggaggatgaacagaaaaactgagaagacctgtctttcaaaagatgggtttatccactttttaagggaaaaagtgacagtttggcatgggatttgaaaagtggaaattgtggaaaaattgagctgttgaagtcccacatataaccagatttaataaagcttcacatgtgaattagctccatatgtgtgtagaaggttgcttttatagcaggtccttaagtactccttttgaaattcctcctttttttttaagtcataccattacttctttggatatgaatgtcccaagtggtatctcctactgtagtatgaggaagaatggctgttaatgtattttttgaattttggtcttgtcttggcctggatcatatccagtcaccactatgcaacaaatgatgtgcactgggcaaggatatgatgggttatgaaagctgtatcttgtttgttttttcttttgcagtactccaagtggtctaaacaggaatgtcttgtaaaacctcaagactccctattgattattcccttacatatttatttacaatttatcagggtaattggtggtgccttatgaaaagtataactcgatttcttgatctttgagcatgttttgtgtttcttgtgttttctaaaagaatattagatatggttaattgcattacatctaaaagatttaaaaaattgtgtgtatgctcaggttccccacacccatacccaccctaacccctgtcatttacattggtggcaactttaaatggtaaccaagcaaaagtacattttgataatgagtattgataatcctgaggaaaactagtgagtatatgggagccacctttgacctgtgccaaagcagtttctaatttcatttgctaactataaaataaagaactgagccaaaataatttgatcagtggtgtgattagcctattatcattgctgagaatagtgtttttggagtgtgaagtgattcctgaagatttcacctgccttctgtttccagcaagaatccagtgatgaccaacacatttcctcacttttggttcttgagaagtttatccctttgcaacaaaccattaatagggaaaacaaggaaatgctttccctttctctttggcttcttaaagctcacaaccaattcagaccccaagttacttcagagaagcaaatggcaccttttccccattgccaaggatcccagcttatgcagatatgaaggacggatcatttctgaaaatgttaagactctgcttgcagtggacttggcctcagtttcatgaaatgtgtaactctgtatgtgtatgttaggaggagggttggttgaaagagcgggggcagggaggggaatctgattacctcttgggaaataattttcttgccaacaaaaagatacacttgaagtttcttaaggtggcaagtccattaaaaaaaaaaattgtgttggaccctcccagtttagatcaagtatttcttgggggtcttgctattgtggttgataccaataaatggaagatccagaatattttcatttaaagctcaaccattaattggaacatggtgaaacattgtacacattgtaaaagtagggaacagtacaaaagaatggaatcaaatactatattatgtgaataaactagagtgattttggaatttcactctcttc

SEQ ID NO: 367919 - DNA, 10979 bp, Homo sapiens
ccacaacccagcaaagaacataggctaggtacgaggccttcgtgttaattcggccgaggctcaatccgtacctctagtaaagaagagcttgtgcccctccccgaccccttaccaagggcgagctgcgtggagtcgttggactgggcagaactttggcgggcaaggagacaaacagccacactgtgctgccggggaagagaagaagaaggaaaggccagacacacaggcgtcgtgcggctgcggaaggattccgtttcctgcagggggcggagggatttgacagcacggtaacttccggaaaagtcctgaacctcagtggaaaagccttgcaagaaacaataacaaacgggaggaggaagcgattctggggtttctgtgttgaacggttcttgtccgcgaagatgcgcttcggcctctgtcaggggacttgaacgggcttagtgggcttcagccagcttttctccaccggttccccacggggaccccccccccccccggccgttgcaatggcgggcgtggggccggggggctacgcggcggagttcgtgccaccgccagagtgccccgtctttgagccgagttgggaggagttcacagatccgctcagctttatcggccgcatccggcctttggcggagaaaaccggcatctgcaaaattcggccgcccaaggactggcagcctccatttgcctgtgaagtaaaaagctttcgtttcactccaagagtccagcgcctgaatgaacttgaggcaatgaccagagtgagattggatttcttggatcaactagcaaaattttgggaacttcaaggatctactctgaagatccctgtggtagagagaaaaatcctggatctgtatgctttgagcaagattgttgccagcaaaggaggttttgaaatggtcaccaaagagaagaaatggtctaaagtgggtagtcgcttgggatatctgccaggaaaaggaactgggtctcttttgaagtcacattatgaaagaattctctacccatatgagcttttccagtctggtgtgagccttatgggtgtgcagatgcctaatttagatcttaaagaaaaagtggagcctgaggttctcagcactgatacccaaacttccccagagccaggcacaaggatgaacattctgccgaagagaacaagacgtgtgaagactcagtcagaatctggagatgtgagtagaaacacggaactgaagaaacttcagatttttggggctgggcccaaggttgtgggcttggcaatgggaacaaaagataaagaagatgaggtcacccgaagacgaaaagttaccaacaggtcagacgcatttaacatgcaaatgagacaacggaaaggcactctctctgttaactttgttgatctctatgtttgtatgttttgtggtcggggaaacaatgaagataaattgcttttgtgtgatggatgtgatgacagctatcatacattttgtctaattcctccactacctgatgtgcccaaaggagactggaggtgtcctaaatgtgtcgccgaggaatgtagcaaacctcgagaagcctttggatttgaacaagctgtacgagagtatacacttcagagctttggagagatggcagataattttaagtctgattattttaatatgccagtccatatggttcccacagaactagtagaaaaggaattttggcggctggtaagcagcattgaagaagatgttattgtggaatatggagcagatatctcctcaaaagactttggaagtggatttccggtgaaggatgggcggagaaagattctgccagaagaagaggaatatgcactttctggttggaatttgaataacatgcctgtcctggaacagtctgttcttgcacatattaatgtggacatctctggtatgaaagtgccgtggctctatgtgggaatgtgcttctcttctttttgctggcacattgaggatcactggagttattccatcaactacttgcactggggggagccaaagacatggtatggtgtgccatctcatgctgcagagcaactggaggaggtgatgagagagctggcccccgagttatttgaatcccagcctgatcttctgcatcagttagttaccatcatgaaccccaacgtgctaatggagcatggtgtgcctgtgtacaggaccaatcagtgtgctggcgagtttgttgtgacatttcctcgtgcctatcactctggatttaaccagggctacaactttgctgaagctgtgaacttctgtactgctgactggttgcccattggacgtcaatgtgtaaatcattaccgacgcctaaggcgccactgtgtcttttcacacgaggaactaattttcaagatggcagcagatccagaatgcttagatgtggggctggctgccatggtctgcaaagaattgactctcatgactgaagaagaaacacgattaagagagtctgttgtacagatgggtgtcctgatgtcagaagaagaagtgtttgaacttgttcctgatgatgagcggcagtgttcagcatgcagaaccacatgttttctctctgctctcacatgttcctgtaatcctgagcggcttgtatgtctctaccatccaactgatctgtgcccctgccccatgcagaagaaatgtcttagatatcgctacccattagaagacctcccttctctgctatatggtgtaaaagtcagggcacagtcctatgacacttgggtcagtcgtgttacagaagcattgtctgctaacttcaaccacaaaaaagatttgattgaattgcgagtaatgctggaagatgctgaggataggaaatacccagagaatgatctctttcgaaaactcagggatgctgtaaaagaagctgagacctgtgcttctgtggctcagctgcttctgagcaaaaagcagaaacacagacagagcccagatagtgggaggactcggaccaaactgacagtggaagaattgaaggcctttgtccaacaactttttagtcttccgtgtgtcatcagccaagctcggcaagtaaagaatctgctagatgatgtggaagagtttcatgaacgtgctcaggaggccatgatggatgaaaccccagattcttccaaactccagatgttgatagatatgggctctagtctctatgtggaactccctgaattaccacgactgaagcaagagctacaacaggctcggtggttggacgaagtaagactgaccttatcagatccgcaacaagtcactttggatgtcatgaagaagctgatagactctggggtagggttggcaccccaccatgctgtggagaaagcaatggctgaactacaggagctccttacagtctctgaacgatgggaagaaaaggctaaggtctgcctacaggcaagaccgaggcacagtgtggcaagtttagaaagcattgtgaatgaagccaagaacattccagcctttctacccaatgtgttgtccttgaaagaagccttacaaaaggctcgagaatggaccgctaaagtggaagctattcagagtggcagcaattacgcttatttggagcagcttgagagcttgtctgcgaaaggacgccctattcctgtgcgtcttgaagcactgccgcaagtggaatcacaggtagcagcagcacgggcatggagagaacggactgggcggacgtttcttaagaagaattctagccatacattgttacaggtgctgagcccccggaccgacattggtgtatatgggagtggcaaaaataggaggaaaaaagtaaaagaactaatagaaaaagaaaaagaaaaggatctggacctggagcctctgagtgatctggaggaaggattggaggaaaccagagatacagccatggtggtggcagttttcaaagaacgggagcaaaaagagattgaagccatgcattctctcagagcagccaacctagccaagatgacaatggtggaccgcatagaagaagtaaaattttgcatttgccgcaagacagccagtgggtttatgctacagtgtgagctctgcaaagactggttccataacagctgtgttcctcttcctaaatcaagttcccaaaaaaaaggatccagctggcaagctaaagaagtaaaattcctttgccctctttgtatgcggtctcgaaggcccaggctagagactattctgtcactcctggtatcccttcagaagttgcccgtacggttgcctgaaggagaggccctgcagtgtttgacagaacgtgctatgagttggcaagatagagcgcggcaggctctagccacagatgaactatcctctgccctggccaaactatctgtgttgagccagcgtatggtggaacaggcggctcgagaaaaaactgaaaagatcatcagtgcagaactccaaaaagcagctgccaatccagacttacagggacacttacctagtttccagcagtctgcttttaaccgggtggtgagcagtgtgtcatcttctcctcgacaaacaatggactatgatgatgaagaaacagactctgatgaagacattcgagagacatatggctacgacatgaaggacacagccagtgtgaagtcctctagtagtcttgaacccaatcttttttgtgatgaagagattcccatcaaatccgaggaggtggtgacccacatgtggacagcaccttcattttgtgcagagcatgcttattcttctgcttctaagagttgttctcaaggttctagcaccccaaggaaacaacctcggaagagccctttggtgccccgaagtttggaacctccagtgctggagttgtcacctggagctaaggcacaactggaagaacttatgatggttggagatctcctggaagtatctctggacgagactcaacacatatggcggattttgcaggccacacacccaccctctgaagacagattcttgcatatcatggaggatgacagcatggaagagaaaccactaaaagtgaaaggaaaggactcttcagagaagaaacggaaacggaagctagaaaaggtagagcaactttttggagaaggaaaacagaagtccaaggagttaaagaaaatggacaaacctagaaagaagaaattaaaattaggtgcagacaaatcaaaggagctgaataaactggccaagaaactagcaaaagaagaagagagaaagaaaaagaaggagaaggctgctgcagccaaagttgaacttgtgaaagagagcactgaaaagaaaagagagaaaaaggtgctggacatcccctcaaagtatgactggtcaggagcagaggagtctgatgatgagaatgctgtgtgcgcagcacagaactgccaaaggccctgcaaggacaaggtagactgggtacaatgtgatggtggctgtgatgagtggtttcatcaagtttgtgtgggtgtatctccagaaatggctgaaaatgaagattacatctgtataaactgtgcaaagaagcaggggccagttagcccaggtccagcaccacctccttccttcataatgagctacaaactaccaatggaggatcttaaagagaccagttagcagatgcttggttagtttgggacatggggggacatggaccacattgagaccttagtcatcaagtagagtggtttatatccacttggaatgttgcttccaaagatgaatggccttcagagaaagtccccttagtgctggcttcctctttgcatggactctgtgggttacattctctatcaacatatctatgcagagggtgtcttctttggtacaacagccaatatttcatgtctcctttgagtgtggtttactgcattaaggccagatgcttaattgagctctagggtggctggttagtattaatacattggtgtgctaacagggcatataggatgtggcttttgtccagctgatagtagttagaggcttacaacttaggagcagcaccaactgaaggtgctaattgcttggatctccttcattgggatagttggagagggattggagtaccactttccttccactgttacctggtacttaatgccctaaagatacaactaggagtaacagggccaaagttatttctgttagacgtcaaggaatggtatcacagtctattgacctcagcgatttgtgcttgtttgtgctagaagaacatcccaaataggagaacctctcacaagctggggcaggtcaccttatctttgtaagatgaggatatcatctagatcagaaatctgactagattggattctgaggagaagaacctactacaaggcaaggagccgttttttggctttgaaaagtcttgctgtcttgggtctacattttagggaagagcaggtacatggatccaggcttctgccaaaaaaaaaaagagaagaagatgacgatgatgaccagtcgtactatcttactgagccacagtgatgcatgcttttcggggaaaacttcattcacaagtattccagacaccaggcttcaggcatggccatgagcaagaccagcaaataacagctttttgccttgcagccctgaccccaatgtctgctgtttccaacactggtgatttctaactacggcccacagcagatgctgttgaataacaccatggcttcatcagaggatgtggggttgtagtacctctgggtgatgaagttgttttagtaaatccatttttaaaaaaaaaaaaggacttgtttttacttttttctaaatgtctctgactactgactgttctatacatagattatttttccttttttaatatacatatatgaatatataaatatatatatttactgttaccagcagcatatgacagagtttcaacatcaaaaatccatttgggggcttgctttttcttttttgctttaaaaaaaaaaatcccattccttctttgtagtacaaggagttagcactccctcctccatcccagcctgaccagatcttccattttgcttttgttcatatagataattatatgtcctttgtgtgttgggacttgtccctgtctgttgggaaacttggtctcactctagtctgtgctggctcttttttcttttgtgtgtgaatgtttgaaactatggtgctgtgtcctcttccctcctgttgtgttctctgttcttcttaaggtattaggtaagctgtatgtaaactcttattagaaggggactaatttttttttaaaggacaaaaaaaaaaatgactaaaaatagtgttttgtcatcactgtctggtgtctttattttggtttaaaaaaatctgtggtttgacttaaattcatcagttttccttttaaaggggggattggggtggacctagcaacagcttatagtttcctcttccctttttgccccagtctcttttaaagaactgtcttctagtaactagaagtgaaatgtactgtccagttacagtttgagtgggtatgagatttaactcaaaaggaatcttacaaaaaaaaagatgttttcttataaaatccaatttctgtaaatgttttctctgaagttcatactacctactttttattcattcttaatactgtataacattttgagtgttttgacttgttcagaggtttgttagtgttgctgtgcatatgtcttgaggtctcatctgaagtaagtttgtgtatgatcgaagatttcaatggatattgcaaggtaactaattaactgatttcataagttttcgttttgccaagctaacgattatcaattaagaatttcctctggttgatgttatacaagaaagcacaatattttttgcctgttgatcttctttgtaacagtcttcagatatttgtgggttaaaaattgaatgtaattttaagtgacagatgcctggaatacatttaaaatttttatttttccttcctaatcatccattaactattccactatcagtggagagtcatgaggatgctgagaaagtatgaatagcttcctgtcaccttctgacgttttgaaacttaaatatgtcttttcgttgatactgtgggattttctgtatttacttgacagtcatggaggatttggtatgacttgaccacaggtttagaccaaggctgagaagaacagaagggagaaattaatggcaaaacaaaaaatacacaaatctgcggttttggaattaatgaaacaagattcatctatttaaagaaatgttggtgttctaatacaaagcattattttcacttagagaaaattacttacttgctcccttctgtattgtaatattttgtattaagacatgatttaaaatgtctttctacccttatctcctctaaactgcaactgaagttgcaattcttcatcattagtattttaactctggcaaaggttatagaaagaaaaatggaaatatggtaggcctgtggtattcttaaaagctaagtcattagaactatgcagatccccaagtttaaaagtacaaatacagcaccagtagttagctttctagctgggggagaagacaggagatttttcttccacagatgtttattttgcttcctgataggtactgcagcaaagccatgttgatgtgtagatgcatgacttcctcactaagctgctgcacaccagctttgcctgcatgattcaaatttgtgcctcagtaaaattataaattattgcatgtcataccttgaataatggaaacggcaaacattaaacctgtgattacccataatgtactttaataataaaaaacatggcagccaggtgcagtagagtgcacctgtggtcaggaggctgaagtgggaagattgcttcaacctgtgagtttgagtcccgcctggtcaacagcgagaccccatgtgtctgtctgtctctctctttttttaaaggacagaggctaagctgtaaggttagcatggttctgcctgggctttgcttctgtgcttctgtgcaggctgagctgtaaggttagcatggttctgcctgggctttgcttctgcgcttctgtgcaggctgagctgtaaggttagcatggttctgcctgggctttgcttctgcgcttctgtgcaggctgagctgtaaggttagcatggttctgcctgggctttgcttctgcgcttctgtgctagcaggtgcccacaaaatgtctttttgaatttcttaatttttgggttctggatgcaattcgtgcacgccaagaaactacttgcttgtcagtattttaattctgtagtacatgtgtgtgaatatcagccagtacttacagtaggaggatgaacagaaaaactgagaagacctgtctttcaaaagatgggtttatccactttttaagggaaaaagtgacagtttggcatgggatttgaaaagtggaaattgtggaaaaattgagctgttgaagtcccacatataaccagatttaataaagcttcacatgtgaattagctccatatgtgtgtagaaggttgcttttatagcaggtccttaagtactccttttgaaattcctcctttttttttaagtcataccattacttctttggatatgaatgtcccaagtggtatctcctactgtagtatgaggaagaatggctgttaatgtattttttgaattttggtcttgtcttggcctggatcatatccagtcaccactatgcaacaaatgatgtgcactgggcaaggatatgatgggttatgaaagctgtatcttgtttgttttttcttttgcagtactccaagtggtctaaacaggaatgtcttgtaaaacctcaagactccctattgattattcccttacatatttatttacaatttatcagggtaattggtggtgccttatgaaaagtataactcgatttcttgatctttgagcatgttttgtgtttcttgtgttttctaaaagaatattagatatggttaattgcattacatctaaaagatttaaaaaattgtgtgtatgctcaggttccccacacccatacccaccctaacccctgtcatttacattggtggcaactttaaatggtaaccaagcaaaagtacattttgataatgagtattgataatcctgaggaaaactagtgagtatatgggagccacctttgacctgtgccaaagcagtttctaatttcatttgctaactataaaataaagaactgagccaaaataatttgatcagtggtgtgattagcctattatcattgctgagaatagtgtttttggagtgtgaagtgattcctgaagatttcacctgccttctgtttccagcaagaatccagtgatgaccaacacatttcctcacttttggttcttgagaagtttatccctttgcaacaaaccattaatagggaaaacaaggaaatgctttccctttctctttggcttcttaaagctcacaaccaattcagaccccaagttacttcagagaagcaaatggcaccttttccccattgccaaggatcccagcttatgcagatatgaaggacggatcatttctgaaaatgttaagactctgcttgcagtggacttggcctcagtttcatgaaatgtgtaactctgtatgtgtatgttaggaggagggttggttgaaagagcgggggcagggaggggaatctgattacctcttgggaaataattttcttgccaacaaaaagatacacttgaagtttcttaaggtggcaagtccattaaaaaaaaaaattgtgttggaccctcccagtttagatcaagtatttcttgggggtcttgctattgtggttgataccaataaatggaagatccagaatattttcatttaaagctcaaccattaattggaacatggtgaaacattgtacacattgtaaaagtagggaacagtacaaaagaatggaatcaaatactatattatgtgaataaactagagtgattttggaatttcactctcttcaccccttctcacttgtatgttctgtaaagtgtatttctactttggtaggaagaaagacttgatttaatatttca

SEQ ID NO: 367920 - DNA, 7513 bp, Homo sapiens
ggaagttatattaattcaagagatggaattacattcaaagaataatatttaataaaagaactaacactaaactttgtaaggtctttcaacagtatattgccaaaccccataagagaactcaaattgtgagaatctactttggtttttcagagtggcagcaattacgcttatttggagcagcttgagagcttgtctgcgaaaggacgccctattcctgtgcgtcttgaagcactgccgcaagtggaatcacaggtagcagcagcacgggcatggagagaacggactgggcggacgtttcttaagaagaattctagccatacattgttacaggtgctgagcccccggaccgacattggtgtatatgggagtggcaaaaataggaggaaaaaagtaaaagaactaatagaaaaagaaaaagaaaaggatctggacctggagcctctgagtgatctggaggaaggattggaggaaaccagagatacagccatggtggtggcagttttcaaagaacgggagcaaaaagagattgaagccatgcattctctcagagcagccaacctagccaagatgacaatggtggaccgcatagaagaagtaaaattttgcatttgccgcaagacagccagtgggtttatgctacagtgtgagctctgcaaagactggttccataacagctgtgttcctcttcctaaatcaagttcccaaaaaaaaggatccagctggcaagctaaagaagtaaaattcctttgccctctttgtatgcggtctcgaaggcccaggctagagactattctgtcactcctggtatcccttcagaagttgcccgtacggttgcctgaaggagaggccctgcagtgtttgacagaacgtgctatgagttggcaagatagagcgcggcaggctctagccacagatgaactatcctctgccctggccaaactatctgtgttgagccagcgtatggtggaacaggcggctcgagaaaaaactgaaaagatcatcagtgcagaactccaaaaagcagctgccaatccagacttacagggacacttacctagtttccagcagtctgcttttaaccgggtggtgagcagtgtgtcatcttctcctcgacaaacaatggactatgatgatgaagaaacagactctgatgaagacattcgagagacatatggctacgacatgaaggacacagccagtgtgaagtcctctagtagtcttgaacccaatcttttttgtgatgaagagattcccatcaaatccgaggaggtggtgacccacatgtggacagcaccttcattttgtgcagagcatgcttattcttctgcttctaagagttgttctcaaggttctagcaccccaaggaaacaacctcggaagagccctttggtgccccgaagtttggaacctccagtgctggagttgtcacctggagctaaggcacaactggaagaacttatgatggttggagatctcctggaagtatctctggacgagactcaacacatatggcggattttgcaggccacacacccaccctctgaagacagattcttgcatatcatggaggatgacagcatggaagagaaaccactaaaagtgaaaggaaaggactcttcagagaagaaacggaaacggaagctagaaaaggtagagcaactttttggagaaggaaaacagaagtccaaggagttaaagaaaatggacaaacctagaaagaagaaattaaaattaggtgcagacaaatcaaaggagctgaataaactggccaagaaactagcaaaagaagaagagagaaagaaaaagaaggagaaggctgctgcagccaaagttgaacttgtgaaagagagcactgaaaagaaaagagagaaaaaggtgctggacatcccctcaaagtatgactggtcaggagcagaggagtctgatgatgagaatgctgtgtgcgcagcacagaactgccaaaggccctgcaaggacaaggtagactgggtacaatgtgatggtggctgtgatgagtggtttcatcaagtttgtgtgggtgtatctccagaaatggctgaaaatgaagattacatctgtataaactgtgcaaagaagcaggggccagttagcccaggtccagcaccacctccttccttcataatgagctacaaactaccaatggaggatcttaaagagaccagttagcagatgcttggttagtttgggacatggggggacatggaccacattgagaccttagtcatcaagtagagtggtttatatccacttggaatgttgcttccaaagatgaatggccttcagagaaagtccccttagtgctggcttcctctttgcatggactctgtgggttacattctctatcaacatatctatgcagagggtgtcttctttggtacaacagccaatatttcatgtctcctttgagtgtggtttactgcattaaggccagatgcttaattgagctctagggtggctggttagtattaatacattggtgtgctaacagggcatataggatgtggcttttgtccagctgatagtagttagaggcttacaacttaggagcagcaccaactgaaggtgctaattgcttggatctccttcattgggatagttggagagggattggagtaccactttccttccactgttacctggtacttaatgccctaaagatacaactaggagtaacagggccaaagttatttctgttagacgtcaaggaatggtatcacagtctattgacctcagcgatttgtgcttgtttgtgctagaagaacatcccaaataggagaacctctcacaagctggggcaggtcaccttatctttgtaagatgaggatatcatctagatcagaaatctgactagattggattctgaggagaagaacctactacaaggcaaggagccgttttttggctttgaaaagtcttgctgtcttgggtctacattttagggaagagcaggtacatggatccaggcttctgccaaaaaaaaaaagagaagaagatgacgatgatgaccagtcgtactatcttactgagccacagtgatgcatgcttttcggggaaaacttcattcacaagtattccagacaccaggcttcaggcatggccatgagcaagaccagcaaataacagctttttgccttgcagccctgaccccaatgtctgctgtttccaacactggtgatttctaactacggcccacagcagatgctgttgaataacaccatggcttcatcagaggatgtggggttgtagtacctctgggtgatgaagttgttttagtaaatccatttttaaaaaaaaaaaaggacttgtttttacttttttctaaatgtctctgactactgactgttctatacatagattatttttccttttttaatatacatatatgaatatataaatatatatatttactgttaccagcagcatatgacagagtttcaacatcaaaaatccatttgggggcttgctttttcttttttgctttaaaaaaaaaaatcccattccttctttgtagtacaaggagttagcactccctcctccatcccagcctgaccagatcttccattttgcttttgttcatatagataattatatgtcctttgtgtgttgggacttgtccctgtctgttgggaaacttggtctcactctagtctgtgctggctcttttttcttttgtgtgtgaatgtttgaaactatggtgctgtgtcctcttccctcctgttgtgttctctgttcttcttaaggtattaggtaagctgtatgtaaactcttattagaaggggactaatttttttttaaaggacaaaaaaaaaaatgactaaaaatagtgttttgtcatcactgtctggtgtctttattttggtttaaaaaaatctgtggtttgacttaaattcatcagttttccttttaaaggggggattggggtggacctagcaacagcttatagtttcctcttccctttttgccccagtctcttttaaagaactgtcttctagtaactagaagtgaaatgtactgtccagttacagtttgagtgggtatgagatttaactcaaaaggaatcttacaaaaaaaaagatgttttcttataaaatccaatttctgtaaatgttttctctgaagttcatactacctactttttattcattcttaatactgtataacattttgagtgttttgacttgttcagaggtttgttagtgttgctgtgcatatgtcttgaggtctcatctgaagtaagtttgtgtatgatcgaagatttcaatggatattgcaaggtaactaattaactgatttcataagttttcgttttgccaagctaacgattatcaattaagaatttcctctggttgatgttatacaagaaagcacaatattttttgcctgttgatcttctttgtaacagtcttcagatatttgtgggttaaaaattgaatgtaattttaagtgacagatgcctggaatacatttaaaatttttatttttccttcctaatcatccattaactattccactatcagtggagagtcatgaggatgctgagaaagtatgaatagcttcctgtcaccttctgacgttttgaaacttaaatatgtcttttcgttgatactgtgggattttctgtatttacttgacagtcatggaggatttggtatgacttgaccacaggtttagaccaaggctgagaagaacagaagggagaaattaatggcaaaacaaaaaatacacaaatctgcggttttggaattaatgaaacaagattcatctatttaaagaaatgttggtgttctaatacaaagcattattttcacttagagaaaattacttacttgctcccttctgtattgtaatattttgtattaagacatgatttaaaatgtctttctacccttatctcctctaaactgcaactgaagttgcaattcttcatcattagtattttaactctggcaaaggttatagaaagaaaaatggaaatatggtaggcctgtggtattcttaaaagctaagtcattagaactatgcagatccccaagtttaaaagtacaaatacagcaccagtagttagctttctagctgggggagaagacaggagatttttcttccacagatgtttattttgcttcctgataggtactgcagcaaagccatgttgatgtgtagatgcatgacttcctcactaagctgctgcacaccagctttgcctgcatgattcaaatttgtgcctcagtaaaattataaattattgcatgtcataccttgaataatggaaacggcaaacattaaacctgtgattacccataatgtactttaataataaaaaacatggcagccaggtgcagtagagtgcacctgtggtcaggaggctgaagtgggaagattgcttcaacctgtgagtttgagtcccgcctggtcaacagcgagaccccatgtgtctgtctgtctctctctttttttaaaggacagaggctaagctgtaaggttagcatggttctgcctgggctttgcttctgtgcttctgtgcaggctgagctgtaaggttagcatggttctgcctgggctttgcttctgcgcttctgtgcaggctgagctgtaaggttagcatggttctgcctgggctttgcttctgcgcttctgtgcaggctgagctgtaaggttagcatggttctgcctgggctttgcttctgcgcttctgtgctagcaggtgcccacaaaatgtctttttgaatttcttaatttttgggttctggatgcaattcgtgcacgccaagaaactacttgcttgtcagtattttaattctgtagtacatgtgtgtgaatatcagccagtacttacagtaggaggatgaacagaaaaactgagaagacctgtctttcaaaagatgggtttatccactttttaagggaaaaagtgacagtttggcatgggatttgaaaagtggaaattgtggaaaaattgagctgttgaagtcccacatataaccagatttaataaagcttcacatgtgaattagctccatatgtgtgtagaaggttgcttttatagcaggtccttaagtactccttttgaaattcctcctttttttttaagtcataccattacttctttggatatgaatgtcccaagtggtatctcctactgtagtatgaggaagaatggctgttaatgtattttttgaattttggtcttgtcttggcctggatcatatccagtcaccactatgcaacaaatgatgtgcactgggcaaggatatgatgggttatgaaagctgtatcttgtttgttttttcttttgcagtactccaagtggtctaaacaggaatgtcttgtaaaacctcaagactccctattgattattcccttacatatttatttacaatttatcagggtaattggtggtgccttatgaaaagtataactcgatttcttgatctttgagcatgttttgtgtttcttgtgttttctaaaagaatattagatatggttaattgcattacatctaaaagatttaaaaaattgtgtgtatgctcaggttccccacacccatacccaccctaacccctgtcatttacattggtggcaactttaaatggtaaccaagcaaaagtacattttgataatgagtattgataatcctgaggaaaactagtgagtatatgggagccacctttgacctgtgccaaagcagtttctaatttcatttgctaactataaaataaagaactgagccaaaataatttgatcagtggtgtgattagcctattatcattgctgagaatagtgtttttggagtgtgaagtgattcctgaagatttcacctgccttctgtttccagcaagaatccagtgatgaccaacacatttcctcacttttggttcttgagaagtttatccctttgcaacaaaccattaatagggaaaacaaggaaatgctttccctttctctttggcttcttaaagctcacaaccaattcagaccccaagttacttcagagaagcaaatggcaccttttccccattgccaaggatcccagcttatgcagatatgaaggacggatcatttctgaaaatgttaagactctgcttgcagtggacttggcctcagtttcatgaaatgtgtaactctgtatgtgtatgttaggaggagggttggttgaaagagcgggggcagggaggggaatctgattacctcttgggaaataattttcttgccaacaaaaagatacacttgaagtttcttaaggtggcaagtccattaaaaaaaaaaattgtgttggaccctcccagtttagatcaagtatttcttgggggtcttgctattgtggttgataccaataaatggaagatccagaatattttcatttaaagctcaaccattaattggaacatggtgaaacattgtacacattgtaaaagtagggaacagtacaaaagaatggaatcaaatactatattatgtgaataaactagagtgattttggaatttcactctcttc

SEQ ID NO: 367921 - DNA, 6144 bp, Homo sapiens
agacgtatttggtcaagctgttctagagtatcccagttaatccggaaatcgagttgtcacctggagctaaggcacaactggaagaacttatgatggttggagatctcctggaagtatctctggacgagactcaacacatatggcggattttgcaggccacacacccaccctctgaagacagattcttgcatatcatggaggatgacagcatggaagagaaaccactaaaagtgaaaggaaaggactcttcagagaagaaacggaaacggaagctagaaaaggtagagcaactttttggagaaggaaaacagaagtccaaggagttaaagaaaatggacaaacctagaaagaagaaattaaaattaggtgcagacaaatcaaaggagctgaataaactggccaagaaactagcaaaagaagaagagagaaagaaaaagaaggagaaggctgctgcagccaaagttgaacttgtgaaagagagcactgaaaagaaaagagagaaaaaggtgctggacatcccctcaaagtatgactggtcaggagcagaggagtctgatgatgagaatgctgtgtgcgcagcacagaactgccaaaggccctgcaaggacaaggtagactgggtacaatgtgatggtggctgtgatgagtggtttcatcaagtttgtgtgggtgtatctccagaaatggctgaaaatgaagattacatctgtataaactgtgcaaagaagcaggggccagttagcccaggtccagcaccacctccttccttcataatgagctacaaactaccaatggaggatcttaaagagaccagttagcagatgcttggttagtttgggacatggggggacatggaccacattgagaccttagtcatcaagtagagtggtttatatccacttggaatgttgcttccaaagatgaatggccttcagagaaagtccccttagtgctggcttcctctttgcatggactctgtgggttacattctctatcaacatatctatgcagagggtgtcttctttggtacaacagccaatatttcatgtctcctttgagtgtggtttactgcattaaggccagatgcttaattgagctctagggtggctggttagtattaatacattggtgtgctaacagggcatataggatgtggcttttgtccagctgatagtagttagaggcttacaacttaggagcagcaccaactgaaggtgctaattgcttggatctccttcattgggatagttggagagggattggagtaccactttccttccactgttacctggtacttaatgccctaaagatacaactaggagtaacagggccaaagttatttctgttagacgtcaaggaatggtatcacagtctattgacctcagcgatttgtgcttgtttgtgctagaagaacatcccaaataggagaacctctcacaagctggggcaggtcaccttatctttgtaagatgaggatatcatctagatcagaaatctgactagattggattctgaggagaagaacctactacaaggcaaggagccgttttttggctttgaaaagtcttgctgtcttgggtctacattttagggaagagcaggtacatggatccaggcttctgccaaaaaaaaaaagagaagaagatgacgatgatgaccagtcgtactatcttactgagccacagtgatgcatgcttttcggggaaaacttcattcacaagtattccagacaccaggcttcaggcatggccatgagcaagaccagcaaataacagctttttgccttgcagccctgaccccaatgtctgctgtttccaacactggtgatttctaactacggcccacagcagatgctgttgaataacaccatggcttcatcagaggatgtggggttgtagtacctctgggtgatgaagttgttttagtaaatccatttttaaaaaaaaaaaaggacttgtttttacttttttctaaatgtctctgactactgactgttctatacatagattatttttccttttttaatatacatatatgaatatataaatatatatatttactgttaccagcagcatatgacagagtttcaacatcaaaaatccatttgggggcttgctttttcttttttgctttaaaaaaaaaaatcccattccttctttgtagtacaaggagttagcactccctcctccatcccagcctgaccagatcttccattttgcttttgttcatatagataattatatgtcctttgtgtgttgggacttgtccctgtctgttgggaaacttggtctcactctagtctgtgctggctcttttttcttttgtgtgtgaatgtttgaaactatggtgctgtgtcctcttccctcctgttgtgttctctgttcttcttaaggtattaggtaagctgtatgtaaactcttattagaaggggactaatttttttttaaaggacaaaaaaaaaaatgactaaaaatagtgttttgtcatcactgtctggtgtctttattttggtttaaaaaaatctgtggtttgacttaaattcatcagttttccttttaaaggggggattggggtggacctagcaacagcttatagtttcctcttccctttttgccccagtctcttttaaagaactgtcttctagtaactagaagtgaaatgtactgtccagttacagtttgagtgggtatgagatttaactcaaaaggaatcttacaaaaaaaaagatgttttcttataaaatccaatttctgtaaatgttttctctgaagttcatactacctactttttattcattcttaatactgtataacattttgagtgttttgacttgttcagaggtttgttagtgttgctgtgcatatgtcttgaggtctcatctgaagtaagtttgtgtatgatcgaagatttcaatggatattgcaaggtaactaattaactgatttcataagttttcgttttgccaagctaacgattatcaattaagaatttcctctggttgatgttatacaagaaagcacaatattttttgcctgttgatcttctttgtaacagtcttcagatatttgtgggttaaaaattgaatgtaattttaagtgacagatgcctggaatacatttaaaatttttatttttccttcctaatcatccattaactattccactatcagtggagagtcatgaggatgctgagaaagtatgaatagcttcctgtcaccttctgacgttttgaaacttaaatatgtcttttcgttgatactgtgggattttctgtatttacttgacagtcatggaggatttggtatgacttgaccacaggtttagaccaaggctgagaagaacagaagggagaaattaatggcaaaacaaaaaatacacaaatctgcggttttggaattaatgaaacaagattcatctatttaaagaaatgttggtgttctaatacaaagcattattttcacttagagaaaattacttacttgctcccttctgtattgtaatattttgtattaagacatgatttaaaatgtctttctacccttatctcctctaaactgcaactgaagttgcaattcttcatcattagtattttaactctggcaaaggttatagaaagaaaaatggaaatatggtaggcctgtggtattcttaaaagctaagtcattagaactatgcagatccccaagtttaaaagtacaaatacagcaccagtagttagctttctagctgggggagaagacaggagatttttcttccacagatgtttattttgcttcctgataggtactgcagcaaagccatgttgatgtgtagatgcatgacttcctcactaagctgctgcacaccagctttgcctgcatgattcaaatttgtgcctcagtaaaattataaattattgcatgtcataccttgaataatggaaacggcaaacattaaacctgtgattacccataatgtactttaataataaaaaacatggcagccaggtgcagtagagtgcacctgtggtcaggaggctgaagtgggaagattgcttcaacctgtgagtttgagtcccgcctggtcaacagcgagaccccatgtgtctgtctgtctctctctttttttaaaggacagaggctaagctgtaaggttagcatggttctgcctgggctttgcttctgtgcttctgtgcaggctgagctgtaaggttagcatggttctgcctgggctttgcttctgcgcttctgtgcaggctgagctgtaaggttagcatggttctgcctgggctttgcttctgcgcttctgtgcaggctgagctgtaaggttagcatggttctgcctgggctttgcttctgcgcttctgtgctagcaggtgcccacaaaatgtctttttgaatttcttaatttttgggttctggatgcaattcgtgcacgccaagaaactacttgcttgtcagtattttaattctgtagtacatgtgtgtgaatatcagccagtacttacagtaggaggatgaacagaaaaactgagaagacctgtctttcaaaagatgggtttatccactttttaagggaaaaagtgacagtttggcatgggatttgaaaagtggaaattgtggaaaaattgagctgttgaagtcccacatataaccagatttaataaagcttcacatgtgaattagctccatatgtgtgtagaaggttgcttttatagcaggtccttaagtactccttttgaaattcctcctttttttttaagtcataccattacttctttggatatgaatgtcccaagtggtatctcctactgtagtatgaggaagaatggctgttaatgtattttttgaattttggtcttgtcttggcctggatcatatccagtcaccactatgcaacaaatgatgtgcactgggcaaggatatgatgggttatgaaagctgtatcttgtttgttttttcttttgcagtactccaagtggtctaaacaggaatgtcttgtaaaacctcaagactccctattgattattcccttacatatttatttacaatttatcagggtaattggtggtgccttatgaaaagtataactcgatttcttgatctttgagcatgttttgtgtttcttgtgttttctaaaagaatattagatatggttaattgcattacatctaaaagatttaaaaaattgtgtgtatgctcaggttccccacacccatacccaccctaacccctgtcatttacattggtggcaactttaaatggtaaccaagcaaaagtacattttgataatgagtattgataatcctgaggaaaactagtgagtatatgggagccacctttgacctgtgccaaagcagtttctaatttcatttgctaactataaaataaagaactgagccaaaataatttgatcagtggtgtgattagcctattatcattgctgagaatagtgtttttggagtgtgaagtgattcctgaagatttcacctgccttctgtttccagcaagaatccagtgatgaccaacacatttcctcacttttggttcttgagaagtttatccctttgcaacaaaccattaatagggaaaacaaggaaatgctttccctttctctttggcttcttaaagctcacaaccaattcagaccccaagttacttcagagaagcaaatggcaccttttccccattgccaaggatcccagcttatgcagatatgaaggacggatcatttctgaaaatgttaagactctgcttgcagtggacttggcctcagtttcatgaaatgtgtaactctgtatgtgtatgttaggaggagggttggttgaaagagcgggggcagggaggggaatctgattacctcttgggaaataattttcttgccaacaaaaagatacacttgaagtttcttaaggtggcaagtccattaaaaaaaaaaattgtgttggaccctcccagtttagatcaagtatttcttgggggtcttgctattgtggttgataccaataaatggaagatccagaatattttcatttaaagctcaaccattaattggaacatggtgaaacattgtacacattgtaaaagtagggaacagtacaaaagaatggaatcaaatactatattatgtgaataaactagagtgattttggaatttcactctcttc

SEQ ID NO: 367922 - DNA, 6346 bp, Homo sapiens
  misc_feature (12)..(12): n is a, c, g, or t
  misc_feature (19)..(19): n is a, c, g, or t
agttcgacggangactctncaaaaatcgctttctatacaccctttcttgtgaagcttctggaacacacactctttcaaccaagaaagaagtatgagatccagaaaagagtttccaaaacagagaaggataaagataacaataaaaagaaaagtgtacgatgcttagagagaaccaatataaaattaagtgcagacaaatcaaaggagctgaataaactggccaagaaactagcaaaagaagaagagagaaagaaaaagaaggagaaggctgctgcagccaaagttgaacttatgatggttggagatctcctggaagtatctctggacgagactcaacacatatggcggattttgcaggccacacacccaccctctgaagacagattcttgcatatcatggaggatgacagcatggaagagaaaccactaaaagtgaaaggaaaggactcttcagagaagaaacggaaacggaagctagaaaaggtagagcaactttttggagaaggaaaacagaagtccaaggagttaaagaaaatggacaaacctagaaagaagaaattaaaattaggtgcagacaaatcaaaggagctgaataaactggccaagaaactagcaaaagaagaagagagaaagaaaaagaaggagaaggctgctgcagccaaagttgaacttgtgaaagagagcactgaaaagaaaagagagaaaaaggtgctggacatcccctcaaagtatgactggtcaggagcagaggagtctgatgatgagaatgctgtgtgcgcagcacagaactgccaaaggccctgcaaggacaaggtagactgggtacaatgtgatggtggctgtgatgagtggtttcatcaagtttgtgtgggtgtatctccagaaatggctgaaaatgaagattacatctgtataaactgtgcaaagaagcaggggccagttagcccaggtccagcaccacctccttccttcataatgagctacaaactaccaatggaggatcttaaagagaccagttagcagatgcttggttagtttgggacatggggggacatggaccacattgagaccttagtcatcaagtagagtggtttatatccacttggaatgttgcttccaaagatgaatggccttcagagaaagtccccttagtgctggcttcctctttgcatggactctgtgggttacattctctatcaacatatctatgcagagggtgtcttctttggtacaacagccaatatttcatgtctcctttgagtgtggtttactgcattaaggccagatgcttaattgagctctagggtggctggttagtattaatacattggtgtgctaacagggcatataggatgtggcttttgtccagctgatagtagttagaggcttacaacttaggagcagcaccaactgaaggtgctaattgcttggatctccttcattgggatagttggagagggattggagtaccactttccttccactgttacctggtacttaatgccctaaagatacaactaggagtaacagggccaaagttatttctgttagacgtcaaggaatggtatcacagtctattgacctcagcgatttgtgcttgtttgtgctagaagaacatcccaaataggagaacctctcacaagctggggcaggtcaccttatctttgtaagatgaggatatcatctagatcagaaatctgactagattggattctgaggagaagaacctactacaaggcaaggagccgttttttggctttgaaaagtcttgctgtcttgggtctacattttagggaagagcaggtacatggatccaggcttctgccaaaaaaaaaaagagaagaagatgacgatgatgaccagtcgtactatcttactgagccacagtgatgcatgcttttcggggaaaacttcattcacaagtattccagacaccaggcttcaggcatggccatgagcaagaccagcaaataacagctttttgccttgcagccctgaccccaatgtctgctgtttccaacactggtgatttctaactacggcccacagcagatgctgttgaataacaccatggcttcatcagaggatgtggggttgtagtacctctgggtgatgaagttgttttagtaaatccatttttaaaaaaaaaaaaggacttgtttttacttttttctaaatgtctctgactactgactgttctatacatagattatttttccttttttaatatacatatatgaatatataaatatatatatttactgttaccagcagcatatgacagagtttcaacatcaaaaatccatttgggggcttgctttttcttttttgctttaaaaaaaaaaatcccattccttctttgtagtacaaggagttagcactccctcctccatcccagcctgaccagatcttccattttgcttttgttcatatagataattatatgtcctttgtgtgttgggacttgtccctgtctgttgggaaacttggtctcactctagtctgtgctggctcttttttcttttgtgtgtgaatgtttgaaactatggtgctgtgtcctcttccctcctgttgtgttctctgttcttcttaaggtattaggtaagctgtatgtaaactcttattagaaggggactaatttttttttaaaggacaaaaaaaaaaatgactaaaaatagtgttttgtcatcactgtctggtgtctttattttggtttaaaaaaatctgtggtttgacttaaattcatcagttttccttttaaaggggggattggggtggacctagcaacagcttatagtttcctcttccctttttgccccagtctcttttaaagaactgtcttctagtaactagaagtgaaatgtactgtccagttacagtttgagtgggtatgagatttaactcaaaaggaatcttacaaaaaaaaagatgttttcttataaaatccaatttctgtaaatgttttctctgaagttcatactacctactttttattcattcttaatactgtataacattttgagtgttttgacttgttcagaggtttgttagtgttgctgtgcatatgtcttgaggtctcatctgaagtaagtttgtgtatgatcgaagatttcaatggatattgcaaggtaactaattaactgatttcataagttttcgttttgccaagctaacgattatcaattaagaatttcctctggttgatgttatacaagaaagcacaatattttttgcctgttgatcttctttgtaacagtcttcagatatttgtgggttaaaaattgaatgtaattttaagtgacagatgcctggaatacatttaaaatttttatttttccttcctaatcatccattaactattccactatcagtggagagtcatgaggatgctgagaaagtatgaatagcttcctgtcaccttctgacgttttgaaacttaaatatgtcttttcgttgatactgtgggattttctgtatttacttgacagtcatggaggatttggtatgacttgaccacaggtttagaccaaggctgagaagaacagaagggagaaattaatggcaaaacaaaaaatacacaaatctgcggttttggaattaatgaaacaagattcatctatttaaagaaatgttggtgttctaatacaaagcattattttcacttagagaaaattacttacttgctcccttctgtattgtaatattttgtattaagacatgatttaaaatgtctttctacccttatctcctctaaactgcaactgaagttgcaattcttcatcattagtattttaactctggcaaaggttatagaaagaaaaatggaaatatggtaggcctgtggtattcttaaaagctaagtcattagaactatgcagatccccaagtttaaaagtacaaatacagcaccagtagttagctttctagctgggggagaagacaggagatttttcttccacagatgtttattttgcttcctgataggtactgcagcaaagccatgttgatgtgtagatgcatgacttcctcactaagctgctgcacaccagctttgcctgcatgattcaaatttgtgcctcagtaaaattataaattattgcatgtcataccttgaataatggaaacggcaaacattaaacctgtgattacccataatgtactttaataataaaaaacatggcagccaggtgcagtagagtgcacctgtggtcaggaggctgaagtgggaagattgcttcaacctgtgagtttgagtcccgcctggtcaacagcgagaccccatgtgtctgtctgtctctctctttttttaaaggacagaggctaagctgtaaggttagcatggttctgcctgggctttgcttctgtgcttctgtgcaggctgagctgtaaggttagcatggttctgcctgggctttgcttctgcgcttctgtgcaggctgagctgtaaggttagcatggttctgcctgggctttgcttctgcgcttctgtgcaggctgagctgtaaggttagcatggttctgcctgggctttgcttctgcgcttctgtgctagcaggtgcccacaaaatgtctttttgaatttcttaatttttgggttctggatgcaattcgtgcacgccaagaaactacttgcttgtcagtattttaattctgtagtacatgtgtgtgaatatcagccagtacttacagtaggaggatgaacagaaaaactgagaagacctgtctttcaaaagatgggtttatccactttttaagggaaaaagtgacagtttggcatgggatttgaaaagtggaaattgtggaaaaattgagctgttgaagtcccacatataaccagatttaataaagcttcacatgtgaattagctccatatgtgtgtagaaggttgcttttatagcaggtccttaagtactccttttgaaattcctcctttttttttaagtcataccattacttctttggatatgaatgtcccaagtggtatctcctactgtagtatgaggaagaatggctgttaatgtattttttgaattttggtcttgtcttggcctggatcatatccagtcaccactatgcaacaaatgatgtgcactgggcaaggatatgatgggttatgaaagctgtatcttgtttgttttttcttttgcagtactccaagtggtctaaacaggaatgtcttgtaaaacctcaagactccctattgattattcccttacatatttatttacaatttatcagggtaattggtggtgccttatgaaaagtataactcgatttcttgatctttgagcatgttttgtgtttcttgtgttttctaaaagaatattagatatggttaattgcattacatctaaaagatttaaaaaattgtgtgtatgctcaggttccccacacccatacccaccctaacccctgtcatttacattggtggcaactttaaatggtaaccaagcaaaagtacattttgataatgagtattgataatcctgaggaaaactagtgagtatatgggagccacctttgacctgtgccaaagcagtttctaatttcatttgctaactataaaataaagaactgagccaaaataatttgatcagtggtgtgattagcctattatcattgctgagaatagtgtttttggagtgtgaagtgattcctgaagatttcacctgccttctgtttccagcaagaatccagtgatgaccaacacatttcctcacttttggttcttgagaagtttatccctttgcaacaaaccattaatagggaaaacaaggaaatgctttccctttctctttggcttcttaaagctcacaaccaattcagaccccaagttacttcagagaagcaaatggcaccttttccccattgccaaggatcccagcttatgcagatatgaaggacggatcatttctgaaaatgttaagactctgcttgcagtggacttggcctcagtttcatgaaatgtgtaactctgtatgtgtatgttaggaggagggttggttgaaagagcgggggcagggaggggaatctgattacctcttgggaaataattttcttgccaacaaaaagatacacttgaagtttcttaaggtggcaagtccattaaaaaaaaaaattgtgttggaccctcccagtttagatcaagtatttcttgggggtcttgctattgtggttgataccaataaatggaagatccagaatattttcatttaaagctcaaccattaattggaacatggtgaaacattgtacacattgtaaaagtagggaacagtacaaaagaatggaatcaaatactatattatgtgaataaactagagtgattttggaatttcactctcttc

SEQ ID NO: 367923 - DNA, 6123 bp, Homo sapiens
ccaacagaaactatacccactaaacaaatctccatttcttcttcccttcagcctctggtaacctctgttcgactttctgtctctccgaatgtgtctattctaggtacctcatataagagagtaatactgttttttaactgtcttgctttaaaattgttcctaaatttatatttttgaaggatgacagcatggaagagaaaccactaaaagtgaaaggaaaggactcttcagagaagaaacggaaacggaagctagaaaaggtagagcaactttttggagaaggaaaacagaagtccaaggagttaaagaaaatggacaaacctagaaagaagaaattaaaattaggtgcagacaaatcaaaggagctgaataaactggccaagaaactagcaaaagaagaagagagaaagaaaaagaaggagaaggctgctgcagccaaagttgaacttgtgaaagagagcactgaaaagaaaagagagaaaaaggtgctggacatcccctcaaagtatgactggtcaggagcagaggagtctgatgatgagaatgctgtgtgcgcagcacagaactgccaaaggccctgcaaggacaaggtagactgggtacaatgtgatggtggctgtgatgagtggtttcatcaagtttgtgtgggtgtatctccagaaatggctgaaaatgaagattacatctgtataaactgtgcaaagaagcaggggccagttagcccaggtccagcaccacctccttccttcataatgagctacaaactaccaatggaggatcttaaagagaccagttagcagatgcttggttagtttgggacatggggggacatggaccacattgagaccttagtcatcaagtagagtggtttatatccacttggaatgttgcttccaaagatgaatggccttcagagaaagtccccttagtgctggcttcctctttgcatggactctgtgggttacattctctatcaacatatctatgcagagggtgtcttctttggtacaacagccaatatttcatgtctcctttgagtgtggtttactgcattaaggccagatgcttaattgagctctagggtggctggttagtattaatacattggtgtgctaacagggcatataggatgtggcttttgtccagctgatagtagttagaggcttacaacttaggagcagcaccaactgaaggtgctaattgcttggatctccttcattgggatagttggagagggattggagtaccactttccttccactgttacctggtacttaatgccctaaagatacaactaggagtaacagggccaaagttatttctgttagacgtcaaggaatggtatcacagtctattgacctcagcgatttgtgcttgtttgtgctagaagaacatcccaaataggagaacctctcacaagctggggcaggtcaccttatctttgtaagatgaggatatcatctagatcagaaatctgactagattggattctgaggagaagaacctactacaaggcaaggagccgttttttggctttgaaaagtcttgctgtcttgggtctacattttagggaagagcaggtacatggatccaggcttctgccaaaaaaaaaaagagaagaagatgacgatgatgaccagtcgtactatcttactgagccacagtgatgcatgcttttcggggaaaacttcattcacaagtattccagacaccaggcttcaggcatggccatgagcaagaccagcaaataacagctttttgccttgcagccctgaccccaatgtctgctgtttccaacactggtgatttctaactacggcccacagcagatgctgttgaataacaccatggcttcatcagaggatgtggggttgtagtacctctgggtgatgaagttgttttagtaaatccatttttaaaaaaaaaaaaggacttgtttttacttttttctaaatgtctctgactactgactgttctatacatagattatttttccttttttaatatacatatatgaatatataaatatatatatttactgttaccagcagcatatgacagagtttcaacatcaaaaatccatttgggggcttgctttttcttttttgctttaaaaaaaaaaatcccattccttctttgtagtacaaggagttagcactccctcctccatcccagcctgaccagatcttccattttgcttttgttcatatagataattatatgtcctttgtgtgttgggacttgtccctgtctgttgggaaacttggtctcactctagtctgtgctggctcttttttcttttgtgtgtgaatgtttgaaactatggtgctgtgtcctcttccctcctgttgtgttctctgttcttcttaaggtattaggtaagctgtatgtaaactcttattagaaggggactaatttttttttaaaggacaaaaaaaaaaatgactaaaaatagtgttttgtcatcactgtctggtgtctttattttggtttaaaaaaatctgtggtttgacttaaattcatcagttttccttttaaaggggggattggggtggacctagcaacagcttatagtttcctcttccctttttgccccagtctcttttaaagaactgtcttctagtaactagaagtgaaatgtactgtccagttacagtttgagtgggtatgagatttaactcaaaaggaatcttacaaaaaaaaagatgttttcttataaaatccaatttctgtaaatgttttctctgaagttcatactacctactttttattcattcttaatactgtataacattttgagtgttttgacttgttcagaggtttgttagtgttgctgtgcatatgtcttgaggtctcatctgaagtaagtttgtgtatgatcgaagatttcaatggatattgcaaggtaactaattaactgatttcataagttttcgttttgccaagctaacgattatcaattaagaatttcctctggttgatgttatacaagaaagcacaatattttttgcctgttgatcttctttgtaacagtcttcagatatttgtgggttaaaaattgaatgtaattttaagtgacagatgcctggaatacatttaaaatttttatttttccttcctaatcatccattaactattccactatcagtggagagtcatgaggatgctgagaaagtatgaatagcttcctgtcaccttctgacgttttgaaacttaaatatgtcttttcgttgatactgtgggattttctgtatttacttgacagtcatggaggatttggtatgacttgaccacaggtttagaccaaggctgagaagaacagaagggagaaattaatggcaaaacaaaaaatacacaaatctgcggttttggaattaatgaaacaagattcatctatttaaagaaatgttggtgttctaatacaaagcattattttcacttagagaaaattacttacttgctcccttctgtattgtaatattttgtattaagacatgatttaaaatgtctttctacccttatctcctctaaactgcaactgaagttgcaattcttcatcattagtattttaactctggcaaaggttatagaaagaaaaatggaaatatggtaggcctgtggtattcttaaaagctaagtcattagaactatgcagatccccaagtttaaaagtacaaatacagcaccagtagttagctttctagctgggggagaagacaggagatttttcttccacagatgtttattttgcttcctgataggtactgcagcaaagccatgttgatgtgtagatgcatgacttcctcactaagctgctgcacaccagctttgcctgcatgattcaaatttgtgcctcagtaaaattataaattattgcatgtcataccttgaataatggaaacggcaaacattaaacctgtgattacccataatgtactttaataataaaaaacatggcagccaggtgcagtagagtgcacctgtggtcaggaggctgaagtgggaagattgcttcaacctgtgagtttgagtcccgcctggtcaacagcgagaccccatgtgtctgtctgtctctctctttttttaaaggacagaggctaagctgtaaggttagcatggttctgcctgggctttgcttctgtgcttctgtgcaggctgagctgtaaggttagcatggttctgcctgggctttgcttctgcgcttctgtgcaggctgagctgtaaggttagcatggttctgcctgggctttgcttctgcgcttctgtgcaggctgagctgtaaggttagcatggttctgcctgggctttgcttctgcgcttctgtgctagcaggtgcccacaaaatgtctttttgaatttcttaatttttgggttctggatgcaattcgtgcacgccaagaaactacttgcttgtcagtattttaattctgtagtacatgtgtgtgaatatcagccagtacttacagtaggaggatgaacagaaaaactgagaagacctgtctttcaaaagatgggtttatccactttttaagggaaaaagtgacagtttggcatgggatttgaaaagtggaaattgtggaaaaattgagctgttgaagtcccacatataaccagatttaataaagcttcacatgtgaattagctccatatgtgtgtagaaggttgcttttatagcaggtccttaagtactccttttgaaattcctcctttttttttaagtcataccattacttctttggatatgaatgtcccaagtggtatctcctactgtagtatgaggaagaatggctgttaatgtattttttgaattttggtcttgtcttggcctggatcatatccagtcaccactatgcaacaaatgatgtgcactgggcaaggatatgatgggttatgaaagctgtatcttgtttgttttttcttttgcagtactccaagtggtctaaacaggaatgtcttgtaaaacctcaagactccctattgattattcccttacatatttatttacaatttatcagggtaattggtggtgccttatgaaaagtataactcgatttcttgatctttgagcatgttttgtgtttcttgtgttttctaaaagaatattagatatggttaattgcattacatctaaaagatttaaaaaattgtgtgtatgctcaggttccccacacccatacccaccctaacccctgtcatttacattggtggcaactttaaatggtaaccaagcaaaagtacattttgataatgagtattgataatcctgaggaaaactagtgagtatatgggagccacctttgacctgtgccaaagcagtttctaatttcatttgctaactataaaataaagaactgagccaaaataatttgatcagtggtgtgattagcctattatcattgctgagaatagtgtttttggagtgtgaagtgattcctgaagatttcacctgccttctgtttccagcaagaatccagtgatgaccaacacatttcctcacttttggttcttgagaagtttatccctttgcaacaaaccattaatagggaaaacaaggaaatgctttccctttctctttggcttcttaaagctcacaaccaattcagaccccaagttacttcagagaagcaaatggcaccttttccccattgccaaggatcccagcttatgcagatatgaaggacggatcatttctgaaaatgttaagactctgcttgcagtggacttggcctcagtttcatgaaatgtgtaactctgtatgtgtatgttaggaggagggttggttgaaagagcgggggcagggaggggaatctgattacctcttgggaaataattttcttgccaacaaaaagatacacttgaagtttcttaaggtggcaagtccattaaaaaaaaaaattgtgttggaccctcccagtttagatcaagtatttcttgggggtcttgctattgtggttgataccaataaatggaagatccagaatattttcatttaaagctcaaccattaattggaacatggtgaaacattgtacacattgtaaaagtagggaacagtacaaaagaatggaatcaaatactatattatgtgaataaactagagtgattttggaatttcactctcttc

SEQ ID NO: 367924 - DNA, 7369 bp, Homo sapiens
tggtctctgattagtttgctacaataggaacattttggtgagtttttttattgcacagacttcagaagctaaacaatcaattacagaacaaaaatcagtttaggaaggtattgttaagttgctctgaatttacaggaagtgatatcacagagggccagcaatgatcggatttagaatatatgagaatcacttgggagctgattaaaaatgtaagcttctggcttgtactccccagatattctgagttcatagggtgatgggtcccagctacattttaaacaaacacaatagatgattctgatgccagtggtctacacactttgaaaagcagtgctgccgacagttgtatcaaggtgcagaacgttttgtgtagtgtagggtaatgagtagagccatgagaccatgactggaaagtgcctccagtatcctgggcagtgaattaggtgttttgccatacattatttcattggatcctctcggtaatcttgtaattaatgtcatctccattttcagatgaggaaattgagtcactcaggttaaatgacttgcctgaaatgatacacactggaactcagagcttctgagttgagtaatcttgatgttaacacaatattgtctcttaagatctagaactttagcataggaacaaaacaagtagaatatcattttgacaaattatttttcccaccccttattacaagcctaaaactactgacgtgactactgtggttttgacagttttttataggacatggaaactaattttgaaaactactcagttgctatgaatgaaactcatttacctagccaaaacctccttcatctgttctttctcttaagttgtatagaggtacttcttggatccctttctattccttactttgatatctggtaaagctcatggttttaagtggcttcttaacgttaccaatgaaatgaccaaccttggtattgaggtgaggaagagtagctcttttcatcttaaatgttcttgtctgccatgacattagctgtaaaaactaccacaatcagccttcaaatataaaagccaaaagtcactttattgttaactcttaagtccaaggcttaaagtcaccaaactacaatcccttcctagcctcctgtaatcacagtattgtcagaagggtcaaagtttgacacctgccactgacctatcagtttttcagattttaattttaaaccccagagtgatctattgacctgtgtctttgactgttataattggttaatttgtaagatttgacatctgatatttgctaactttttatagggagttgtatttgtaacggaagaagagaagaataaaaaatattagttttaaaagtggcctatgtgactgcttttctaaaaaggtatttaatgctcttagtactttggcttatctctttgaaataaagctaatacacaggattgccttcacattgttgtactcttcctttcttgattgataattgcattgtcttagagcctagaaattgttaatattagctaaaactacttggctgctctattagaagttccctttttgtcaaatttttctcaaacatgtttctgcctcacaaggagccccaggtattcatgaggtaatggagtacctaagaggcctaattttgtggacacactatggtgaaatataattttggggtattaacttctcagcttctttctttaaaaaataaccccataagaagtcattgcctatctagacatcccagttgtttgctattgtttaagccaagaaagctctttggtttgcttttattctaggcttaatgtttatgtaacctaaacattccccaatcttgtttcctacaggtagactgggtacaatgtgatggtggctgtgatgagtggtttcatcaagtttgtgtgggtgtatctccagaaatggctgaaaatgaagattacatctgtataaactgtgcaaagaagcaggggccagttagcccaggtccagcaccacctccttccttcataatgagctacaaactaccaatggaggatcttaaagagaccagttagcagatgcttggttagtttgggacatggggggacatggaccacattgagaccttagtcatcaagtagagtggtttatatccacttggaatgttgcttccaaagatgaatggccttcagagaaagtccccttagtgctggcttcctctttgcatggactctgtgggttacattctctatcaacatatctatgcagagggtgtcttctttggtacaacagccaatatttcatgtctcctttgagtgtggtttactgcattaaggccagatgcttaattgagctctagggtggctggttagtattaatacattggtgtgctaacagggcatataggatgtggcttttgtccagctgatagtagttagaggcttacaacttaggagcagcaccaactgaaggtgctaattgcttggatctccttcattgggatagttggagagggattggagtaccactttccttccactgttacctggtacttaatgccctaaagatacaactaggagtaacagggccaaagttatttctgttagacgtcaaggaatggtatcacagtctattgacctcagcgatttgtgcttgtttgtgctagaagaacatcccaaataggagaacctctcacaagctggggcaggtcaccttatctttgtaagatgaggatatcatctagatcagaaatctgactagattggattctgaggagaagaacctactacaaggcaaggagccgttttttggctttgaaaagtcttgctgtcttgggtctacattttagggaagagcaggtacatggatccaggcttctgccaaaaaaaaaaagagaagaagatgacgatgatgaccagtcgtactatcttactgagccacagtgatgcatgcttttcggggaaaacttcattcacaagtattccagacaccaggcttcaggcatggccatgagcaagaccagcaaataacagctttttgccttgcagccctgaccccaatgtctgctgtttccaacactggtgatttctaactacggcccacagcagatgctgttgaataacaccatggcttcatcagaggatgtggggttgtagtacctctgggtgatgaagttgttttagtaaatccatttttaaaaaaaaaaaaggacttgtttttacttttttctaaatgtctctgactactgactgttctatacatagattatttttccttttttaatatacatatatgaatatataaatatatatatttactgttaccagcagcatatgacagagtttcaacatcaaaaatccatttgggggcttgctttttcttttttgctttaaaaaaaaaaatcccattccttctttgtagtacaaggagttagcactccctcctccatcccagcctgaccagatcttccattttgcttttgttcatatagataattatatgtcctttgtgtgttgggacttgtccctgtctgttgggaaacttggtctcactctagtctgtgctggctcttttttcttttgtgtgtgaatgtttgaaactatggtgctgtgtcctcttccctcctgttgtgttctctgttcttcttaaggtattaggtaagctgtatgtaaactcttattagaaggggactaatttttttttaaaggacaaaaaaaaaaatgactaaaaatagtgttttgtcatcactgtctggtgtctttattttggtttaaaaaaatctgtggtttgacttaaattcatcagttttccttttaaaggggggattggggtggacctagcaacagcttatagtttcctcttccctttttgccccagtctcttttaaagaactgtcttctagtaactagaagtgaaatgtactgtccagttacagtttgagtgggtatgagatttaactcaaaaggaatcttacaaaaaaaaagatgttttcttataaaatccaatttctgtaaatgttttctctgaagttcatactacctactttttattcattcttaatactgtataacattttgagtgttttgacttgttcagaggtttgttagtgttgctgtgcatatgtcttgaggtctcatctgaagtaagtttgtgtatgatcgaagatttcaatggatattgcaaggtaactaattaactgatttcataagttttcgttttgccaagctaacgattatcaattaagaatttcctctggttgatgttatacaagaaagcacaatattttttgcctgttgatcttctttgtaacagtcttcagatatttgtgggttaaaaattgaatgtaattttaagtgacagatgcctggaatacatttaaaatttttatttttccttcctaatcatccattaactattccactatcagtggagagtcatgaggatgctgagaaagtatgaatagcttcctgtcaccttctgacgttttgaaacttaaatatgtcttttcgttgatactgtgggattttctgtatttacttgacagtcatggaggatttggtatgacttgaccacaggtttagaccaaggctgagaagaacagaagggagaaattaatggcaaaacaaaaaatacacaaatctgcggttttggaattaatgaaacaagattcatctatttaaagaaatgttggtgttctaatacaaagcattattttcacttagagaaaattacttacttgctcccttctgtattgtaatattttgtattaagacatgatttaaaatgtctttctacccttatctcctctaaactgcaactgaagttgcaattcttcatcattagtattttaactctggcaaaggttatagaaagaaaaatggaaatatggtaggcctgtggtattcttaaaagctaagtcattagaactatgcagatccccaagtttaaaagtacaaatacagcaccagtagttagctttctagctgggggagaagacaggagatttttcttccacagatgtttattttgcttcctgataggtactgcagcaaagccatgttgatgtgtagatgcatgacttcctcactaagctgctgcacaccagctttgcctgcatgattcaaatttgtgcctcagtaaaattataaattattgcatgtcataccttgaataatggaaacggcaaacattaaacctgtgattacccataatgtactttaataataaaaaacatggcagccaggtgcagtagagtgcacctgtggtcaggaggctgaagtgggaagattgcttcaacctgtgagtttgagtcccgcctggtcaacagcgagaccccatgtgtctgtctgtctctctctttttttaaaggacagaggctaagctgtaaggttagcatggttctgcctgggctttgcttctgtgcttctgtgcaggctgagctgtaaggttagcatggttctgcctgggctttgcttctgcgcttctgtgcaggctgagctgtaaggttagcatggttctgcctgggctttgcttctgcgcttctgtgcaggctgagctgtaaggttagcatggttctgcctgggctttgcttctgcgcttctgtgctagcaggtgcccacaaaatgtctttttgaatttcttaatttttgggttctggatgcaattcgtgcacgccaagaaactacttgcttgtcagtattttaattctgtagtacatgtgtgtgaatatcagccagtacttacagtaggaggatgaacagaaaaactgagaagacctgtctttcaaaagatgggtttatccactttttaagggaaaaagtgacagtttggcatgggatttgaaaagtggaaattgtggaaaaattgagctgttgaagtcccacatataaccagatttaataaagcttcacatgtgaattagctccatatgtgtgtagaaggttgcttttatagcaggtccttaagtactccttttgaaattcctcctttttttttaagtcataccattacttctttggatatgaatgtcccaagtggtatctcctactgtagtatgaggaagaatggctgttaatgtattttttgaattttggtcttgtcttggcctggatcatatccagtcaccactatgcaacaaatgatgtgcactgggcaaggatatgatgggttatgaaagctgtatcttgtttgttttttcttttgcagtactccaagtggtctaaacaggaatgtcttgtaaaacctcaagactccctattgattattcccttacatatttatttacaatttatcagggtaattggtggtgccttatgaaaagtataactcgatttcttgatctttgagcatgttttgtgtttcttgtgttttctaaaagaatattagatatggttaattgcattacatctaaaagatttaaaaaattgtgtgtatgctcaggttccccacacccatacccaccctaacccctgtcatttacattggtggcaactttaaatggtaaccaagcaaaagtacattttgataatgagtattgataatcctgaggaaaactagtgagtatatgggagccacctttgacctgtgccaaagcagtttctaatttcatttgctaactataaaataaagaactgagccaaaataatttgatcagtggtgtgattagcctattatcattgctgagaatagtgtttttggagtgtgaagtgattcctgaagatttcacctgccttctgtttccagcaagaatccagtgatgaccaacacatttcctcacttttggttcttgagaagtttatccctttgcaacaaaccattaatagggaaaacaaggaaatgctttccctttctctttggcttcttaaagctcacaaccaattcagaccccaagttacttcagagaagcaaatggcaccttttccccattgccaaggatcccagcttatgcagatatgaaggacggatcatttctgaaaatgttaagactctgcttgcagtggacttggcctcagtttcatgaaatgtgtaactctgtatgtgtatgttaggaggagggttggttgaaagagcgggggcagggaggggaatctgattacctcttgggaaataattttcttgccaacaaaaagatacacttgaagtttcttaaggtggcaagtccattaaaaaaaaaaattgtgttggaccctcccagtttagatcaagtatttcttgggggtcttgctattgtggttgataccaataaatggaagatccagaatattttcatttaaagctcaaccattaattggaacatggtgaaacattgtacacattgtaaaagtagggaacagtacaaaagaatggaatcaaatactatattatgtgaataaactagagtgattttggaatttcactctcttc

SEQ ID NO: 367925 - DNA, 6214 bp, Homo sapiens
ccacaacccagcaaagaacataggctaggtacgaggccttcgtgttaattcggccgaggctcaatccgtacctctagtaaagaagagcttgtgcccctccccgaccccttaccaagggcgagctgcgtggagtcgttggactgggcagaactttggcgggcaaggagacaaacagccacactgtgctgccggggaagagaagaagaaggaaaggccagacacacaggcgtcgtgcggctgcggaaggattccgtttcctgcagggggcggagggatttgacagcacggtaacttccggaaaagtcctgaacctcagtggaaaagccttgcaagaaacaataacaaacgggaggaggaagcgattctggggtttctgtgttgaacggttcttgtccgcgaagatgcgcttcggcctctgtcaggggacttgaacgggcttagtgggcttcagccagcttttctccaccggttccccacggggaccccccccccccccggccgttgcaatggcgggcgtggggccggggggctacgcggcggagttcgtgccaccgccagagtgccccgtctttgagccgagttgggaggagttcacagatccgctcagctttatcggccgcatccggcctttggcggagaaaaccggcatctgcaaaattcggccgcccaaggactggcagcctccatttgcctgtgaagtaaaaagctttcgtttcactccaagagtccagcgcctgaatgaacttgaggcaatgaccagagtgagattggatttcttggatcaactagcaaaattttgggaacttcaaggatctactctgaagatccctgtggtagagagaaaaatcctggatctgtatgctttgagcaagattgttgccagcaaaggaggttttgaaatggtcaccaaagagaagaaatggtctaaagtgggtagtcgcttgggatatctgccaggaaaaggaactgggtctcttttgaagtcacattatgaaagaattctctacccatatgagcttttccagtctggtgtgagccttatgggtgtgcagatgcctaatttagatcttaaagaaaaagtggagcctgaggttctcagcactgatacccaaacttccccagagccaggcacaaggatgaacattctgccgaagagaacaagacgtgtgaagactcagtcagaatctggagatgtgagtagaaacacggaactgaagaaacttcagatttttggggctgggcccaaggttgtgggcttggcaatgggaacaaaagataaagaagatgaggtcacccgaagacgaaaagttaccaacaggtcagacgcatttaacatgcaaatgagacaacggaaaggcactctctctgttaactttgttgatctctatgtttgtatgttttgtggtcggggaaacaatgaagataaattgcttttgtgtgatggatgtgatgacagctatcatacattttgtctaattcctccactacctgatgtgcccaaaggagactggaggtgtcctaaatgtgtcgccgaggaatgtagcaaacctcgagaagcctttggatttgaacaagctgtacgagagtatacacttcagagctttggagagatggcagataattttaagtctgattattttaatatgccagtccatatggttcccacagaactagtagaaaaggaattttggcggctggtaagcagcattgaagaagatgttattgtggaatatggagcagatatctcctcaaaagactttggaagtggatttccggtgaaggatgggcggagaaagattctgccagaagaagaggaatatgcactttctggttggaatttgaataacatgcctgtcctggaacagtctgttcttgcacatattaatgtggacatctctggtatgaaagtgccgtggctctatgtgggaatgtgcttctcttctttttgctggcacattgaggatcactggagttattccatcaactacttgcactggggggagccaaagacatggtatggtgtgccatctcatgctgcagagcaactggaggaggtgatgagagagctggcccccgagttatttgaatcccagcctgatcttctgcatcagttagttaccatcatgaaccccaacgtgctaatggagcatggtgtgcctgtgtacaggaccaatcagtgtgctggcgagtttgttgtgacatttcctcgtgcctatcactctggatttaaccagggctacaactttgctgaagctgtgaacttctgtactgctgactggttgcccattggacgtcaatgtgtaaatcattaccgacgcctaaggcgccactgtgtcttttcacacgaggaactaattttcaagatggcagcagatccagaatgcttagatgtggggctggctgccatggtctgcaaagaattgactctcatgactgaagaagaaacacgattaagagagtctgttgtacagatgggtgtcctgatgtcagaagaagaagtgtttgaacttgttcctgatgatgagcggcagtgttcagcatgcagaaccacatgttttctctctgctctcacatgttcctgtaatcctgagcggcttgtatgtctctaccatccaactgatctgtgcccctgccccatgcagaagaaatgtcttagatatcgctacccattagaagacctcccttctctgctatatggtgtaaaagtcagggcacagtcctatgacacttgggtcagtcgtgttacagaagcattgtctgctaacttcaaccacaaaaaagatttgattgaattgcgagtaatgctggaagatgctgaggataggaaatacccagagaatgatctctttcgaaaactcagggatgctgtaaaagaagctgagacctgtgcttctgtggctcagctgcttctgagcaaaaagcagaaacacagacagagcccagatagtgggaggactcggaccaaactgacagtggaagaattgaaggcctttgtccaacaactttttagtcttccgtgtgtcatcagccaagctcggcaagtaaagaatctgctagatgatgtggaagagtttcatgaacgtgctcaggaggccatgatggatgaaaccccagattcttccaaactccagatgttgatagatatgggctctagtctctatgtggaactccctgaattaccacgactgaagcaagagctacaacaggctcggtggttggacgaagtaagactgaccttatcagatccgcaacaagtcactttggatgtcatgaagaagctgatagactctggggtagggttggcaccccaccatgctgtggagaaagcaatggctgaactacaggagctccttacagtctctgaacgatgggaagaaaaggctaaggtctgcctacaggcaagaccgaggcacagtgtggcaagtttagaaagcattgtgaatgaagccaagaacattccagcctttctacccaatgtgttgtccttgaaagaagccttacaaaaggctcgagaatggaccgctaaagtggaagctattcagagtggcagcaattacgcttatttggagcagcttgagagcttgtctgcgaaaggacgccctattcctgtgcgtcttgaagcactgccgcaagtggaatcacaggtagcagcagcacgggcatggagagaacggactgggcggacgtttcttaagaagaattctagccatacattgttacaggtgctgagcccccggaccgacattggtgtatatgggagtggcaaaaataggaggaaaaaagtaaaagaactaatagaaaaagaaaaagaaaaggatctggacctggagcctctgagtgatctggaggaaggattggaggaaaccagagatacagccatggtggtggcagttttcaaagaacgggagcaaaaagagattgaagccatgcattctctcagagcagccaacctagccaagatgacaatggtggaccgcatagaagaagtaaaattttgcatttgccgcaagacagccagtgggtttatgctacagtgtgagctctgcaaagactggttccataacagctgtgttcctcttcctaaatcaagttcccaaaaaaaaggatccagctggcaagctaaagaagtaaaattcctttgccctctttgtatgcggtctcgaaggcccaggctagagactattctgtcactcctggtatcccttcagaagttgcccgtacggttgcctgaaggagaggccctgcagtgtttgacagaacgtgctatgagttggcaagatagagcgcggcaggctctagccacagatgaactatcctctgccctggccaaactatctgtgttgagccagcgtatggtggaacaggcggctcgagaaaaaactgaaaagatcatcagtgcagaactccaaaaagcagctgccaatccagacttacagggacacttacctagtttccagcagtctgcttttaaccgggtggtgagcagtgtgtcatcttctcctcgacaaacaatggactatgatgatgaagaaacagactctgatgaagacattcgagagacatatggctacgacatgaaggacacagccagtgtgaagtcctctagtagtcttgaacccaatcttttttgtgatgaagagattcccatcaaatccgaggaggtggtgacccacatgtggacagcaccttcattttgtgcagagcatgcttattcttctgcttctaagagttgttctcaaggttctagcaccccaaggaaacaacctcggaagagccctttggtgccccgaagtttggaacctccagtgctggagttgtcacctggagctaaggcacaactggaagaacttatgatggttggagatctcctggaagtatctctggacgagactcaacacatatggcggattttgcaggccacacacccaccctctgaagacagattcttgcatatcatggaggatgacagcatggaagagaaaccactaaaagtgaaaggaaaggactcttcagagaagaaacggaaacggaagctagaaaaggtagagcaactttttggagaaggaaaacagaagtccaaggagttaaagaaaatggacaaacctagaaagaagaaattaaaattaggtgcagacaaatcaaaggagctgaataaactggccaagaaactagcaaaagaagaagagagaaagaaaaagaaggagaaggctgctgcagccaaagttgaacttgtgaaagagagcactgaaaagaaaagagagaaaaaggtgctggacatcccctcaaagtatgactggtcaggagcagaggagtctgatgatgagaatgctgtgtgcgcagcacagaactgccaaaggccctgcaaggacaaggtgagttccaactgtttatagtcaagcatgagaggtcaaggagcaacagttgtggagacacatgtttgatatcaatgtgtagtatgtttttggttctaggatttggacttccaacataatgtcttttgtacaatttctataaactgttttgaataatgaggctcttagtgtgcctagtagaagtgttgtatttcaaaaatcatatacttaatgaacataatgagacaggagcagagagaagctatgtgacattccctggcaaacagtgcatttcatatgcagtgggcataacaagtttcagaataatcttgtgccttccctataaggtgactcagagaactaaataccttgtcggatagtcacaatggcctgaaaaaaatcctgggccagtattgtaagagctgtggcaaattgcattaagatggtattccaaagacttgaaacttttagtccatatcttacactcagagctgtgggcaccctcctaaatggaatatgattttcttcaaatcttttgcaacaaataattcaaacctataaatgcattattttaggccaggcaaggtgtggctcacgcctgtaatcccagcactttgggaggccgaggtgggcggatcacctgaggtgaggagttcgagaccagcctagccaacatggtaaaaccccatctctactaaaaatacaaaaaatgagcagggtgtggtggcggacacctgtaatctcagctacttgggaggttgtggcaggggaatcgcttgaacccaggaggcagaggttggagtaagccaggatggctccattgtgctccagcctgggccacaagagcaaaactctgtctcaaa

SEQ ID NO: 367926 - DNA, 4885 bp, Homo sapiens
  misc_feature (4770)..(4771): n is a, c, g, or t
  misc_feature (4775)..(4775): n is a, c, g, or t
  misc_feature (4861)..(4861): n is a, c, g, or t
ccacaacccagcaaagaacataggctaggtacgaggccttcgtgttaattcggccgaggctcaatccgtacctctagtaaagaagagcttgtgcccctccccgaccccttaccaagggcgagctgcgtggagtcgttggactgggcagaactttggcgggcaaggagacaaacagccacactgtgctgccggggaagagaagaagaaggaaaggccagacacacaggcgtcgtgcggctgcggaaggattccgtttcctgcagggggcggagggatttgacagcacggtaacttccggaaaagtcctgaacctcagtggaaaagccttgcaagaaacaataacaaacgggaggaggaagcgattctggggtttctgtgttgaacggttcttgtccgcgaagatgcgcttcggcctctgtcaggggacttgaacgggcttagtgggcttcagccagcttttctccaccggttccccacggggaccccccccccccccggccgttgcaatggcgggcgtggggccggggggctacgcggcggagttcgtgccaccgccagagtgccccgtctttgagccgagttgggaggagttcacagatccgctcagctttatcggccgcatccggcctttggcggagaaaaccggcatctgcaaaattcggccgcccaaggactggcagcctccatttgcctgtgaagtaaaaagctttcgtttcactccaagagtccagcgcctgaatgaacttgaggcaatgaccagagtgagattggatttcttggatcaactagcaaaattttgggaacttcaaggatctactctgaagatccctgtggtagagagaaaaatcctggatctgtatgctttgagcaagattgttgccagcaaaggaggttttgaaatggtcaccaaagagaagaaatggtctaaagtgggtagtcgcttgggatatctgccaggaaaaggaactgggtctcttttgaagtcacattatgaaagaattctctacccatatgagcttttccagtctggtgtgagccttatgggtgtgcagatgcctaatttagatcttaaagaaaaagtggagcctgaggttctcagcactgatacccaaacttccccagagccaggcacaaggatgaacattctgccgaagagaacaagacgtgtgaagactcagtcagaatctggagatgtgagtagaaacacggaactgaagaaacttcagatttttggggctgggcccaaggttgtgggcttggcaatgggaacaaaagataaagaagatgaggtcacccgaagacgaaaagttaccaacaggtcagacgcatttaacatgcaaatgagacaacggaaaggcactctctctgttaactttgttgatctctatgtttgtatgttttgtggtcggggaaacaatgaagataaattgcttttgtgtgatggatgtgatgacagctatcatacattttgtctaattcctccactacctgatgtgcccaaaggagactggaggtgtcctaaatgtgtcgccgaggaatgtagcaaacctcgagaagcctttggatttgaacaagctgtacgagagtatacacttcagagctttggagagatggcagataattttaagtctgattattttaatatgccagtccatatggttcccacagaactagtagaaaaggaattttggcggctggtaagcagcattgaagaagatgttattgtggaatatggagcagatatctcctcaaaagactttggaagtggatttccggtgaaggatgggcggagaaagattctgccagaagaagaggaatatgcactttctggttggaatttgaataacatgcctgtcctggaacagtctgttcttgcacatattaatgtggacatctctggtatgaaagtgccgtggctctatgtgggaatgtgcttctcttctttttgctggcacattgaggatcactggagttattccatcaactacttgcactggggggagccaaagacatggtatggtgtgccatctcatgctgcagagcaactggaggaggtgatgagagagctggcccccgagttatttgaatcccagcctgatcttctgcatcagttagttaccatcatgaaccccaacgtgctaatggagcatggtgtgcctgtgtacaggaccaatcagtgtgctggcgagtttgttgtgacatttcctcgtgcctatcactctggatttaaccagggctacaactttgctgaagctgtgaacttctgtactgctgactggttgcccattggacgtcaatgtgtaaatcattaccgacgcctaaggcgccactgtgtcttttcacacgaggaactaattttcaagatggcagcagatccagaatgcttagatgtggggctggctgccatggtctgcaaagaattgactctcatgactgaagaagaaacacgattaagagagtctgttgtacagatgggtgtcctgatgtcagaagaagaagtgtttgaacttgttcctgatgatgagcggcagtgttcagcatgcagaaccacatgttttctctctgctctcacatgttcctgtaatcctgagcggcttgtatgtctctaccatccaactgatctgtgcccctgccccatgcagaagaaatgtcttagatatcgctacccattagaagacctcccttctctgctatatggtgtaaaagtcagggcacagtcctatgacacttgggtcagtcgtgttacagaagcattgtctgctaacttcaaccacaaaaaagatttgattgaattgcgagtaatgctggaagatgctgaggataggaaatacccagagaatgatctctttcgaaaactcagggatgctgtaaaagaagctgagacctgtgcttctgtggctcagctgcttctgagcaaaaagcagaaacacagacagagcccagatagtgggaggactcggaccaaactgacagtggaagaattgaaggcctttgtccaacaactttttagtcttccgtgtgtcatcagccaagctcggcaagtaaagaatctgctagatgatgtggaagagtttcatgaacgtgctcaggaggccatgatggatgaaaccccagattcttccaaactccagatgttgatagatatgggctctagtctctatgtggaactccctgaattaccacgactgaagcaagagctacaacaggctcggtggttggacgaagtaagactgaccttatcagatccgcaacaagtcactttggatgtcatgaagaagctgatagactctggggtagggttggcaccccaccatgctgtggagaaagcaatggctgaactacaggagctccttacagtctctgaacgatgggaagaaaaggctaaggtctgcctacaggcaagaccgaggcacagtgtggcaagtttagaaagcattgtgaatgaagccaagaacattccagcctttctacccaatgtgttgtccttgaaagaagccttacaaaaggctcgagaatggaccgctaaagtggaagctattcagagtggcagcaattacgcttatttggagcagcttgagagcttgtctgcgaaaggacgccctattcctgtgcgtcttgaagcactgccgcaagtggaatcacaggtagcagcagcacgggcatggagagaacggactgggcggacgtttcttaagaagaattctagccatacattgttacaggtgctgagcccccggaccgacattggtgtatatgggagtggcaaaaataggaggaaaaaagtaaaagaactaatagaaaaagaaaaagaaaaggatctggacctggagcctctgagtgatctggaggaaggattggaggaaaccagagatacagccatggtggtggcagttttcaaagaacgggagcaaaaagagattgaagccatgcattctctcagagcagccaacctagccaagatgacaatggtggaccgcatagaagaagtaaaattttgcatttgccgcaagacagccagtgggtttatgctacagtgtgagctctgcaaagactggttccataacagctgtgttcctcttcctaaatcaagttcccaaaaaaaaggatccagctggcaagctaaagaagtaaaattcctttgccctctttgtatgcggtctcgaaggcccaggctagagactattctgtcactcctggtatcccttcagaagttgcccgtacggttgcctgaaggagaggccctgcagtgtttgacagaacgtgctatgagttggcaagatagagcgcggcaggctctagccacagatgaactatcctctgccctggccaaactatctgtgttgagccagcgtatggtggaacaggcggctcgagaaaaaactgaaaagatcatcagtgcagaactccaaaaagcagctgccaatccagacttacagggacacttacctagtttccagcagtctgcttttaaccgggtggtgagcagtgtgtcatcttctcctcgacaaacaatggactatgatgatgaagaaacagactctgatgaagacattcgagagacatatggctacgacatgaaggacacagccagtgtgaagtcctctagtagtcttgaacccaatcttttttgtgatgaagagattcccatcaaatccgaggaggtggtgacccacatgtggacagcaccttcattttgtgcagagcatgcttattcttctgcttctaagagttgttctcaagtctagcaacccaaggaaacaactcggaaanncctnggtgccaagttgaacccgggggtggccggacaggcacggaaattaggggggcccgggttttcggactactcttggttgtggccccnctggaaattttttgggggggaccc

SEQ ID NO: 367927 - DNA, 2578 bp, Homo sapiens
ccacaacccagcaaagaacataggctaggtacgaggccttcgtgttaattcggccgaggctcaatccgtacctctagtaaagaagagcttgtgcccctccccgaccccttaccaagggcgagctgcgtggagtcgttggactgggcagaactttggcgggcaaggagacaaacagccacactgtgctgccggggaagagaagaagaaggaaaggccagacacacaggcgtcgtgcggctgcggaaggattccgtttcctgcagggggcggagggatttgacagcacggtaacttccggaaaagtcctgaacctcagtggaaaagccttgcaagaaacaataacaaacgggaggaggaagcgattctggggtttctgtgttgaacggttcttgtccgcgaagatgcgcttcggcctctgtcaggggacttgaacgggcttagtgggcttcagccagcttttctccaccggttccccacggggaccccccccccccccggccgttgcaatggcgggcgtggggccggggggctacgcggcggagttcgtgccaccgccagagtgccccgtctttgagccgagttgggaggagttcacagatccgctcagctttatcggccgcatccggcctttggcggagaaaaccggcatctgcaaaattcggccgcccaaggactggcagcctccatttgcctgtgaagtaaaaagctttcgtttcactccaagagtccagcgcctgaatgaacttgaggcaatgaccagagtgagattggatttcttggatcaactagcaaaattttgggaacttcaaggatctactctgaagatccctgtggtagagagaaaaatcctggatctgtatgctttgagcaagattgttgccagcaaaggaggttttgaaatggtcaccaaagagaagaaatggtctaaagtgggtagtcgcttgggatatctgccaggaaaaggaactgggtctcttttgaagtcacattatgaaagaattctctacccatatgagcttttccagtctggtgtgagccttatgggtgtgcagatgcctaatttagatcttaaagaaaaagtggagcctgaggttctcagcactgatacccaaacttccccagagccaggcacaaggatgaacattctgccgaagagaacaagacgtgtgaagactcagtcagaatctggagatgtgagtagaaacacggaactgaagaaacttcagatttttggggctgggcccaaggttgtgggcttggcaatgggaacaaaagataaagaagatgaggtcacccgaagacgaaaagttaccaacaggtcagacgcatttaacatgcaaatgagacaacggaaaggcactctctctgttaactttgttgatctctatgtttgtatgttttgtggtcggggaaacaatgaagataaattgcttttgtgtgatggatgtgatgacagctatcatacattttgtctaattcctccactacctgatgtgcccaaaggagactggaggtgtcctaaatgtgtcgccgaggaatgtagcaaacctcgagaagcctttggatttgaacaagctgtacgagagtatacacttcagagctttggagagatggcagataattttaagtctgattattttaatatgccagtccatatggttcccacagaactagtagaaaaggaattttggcggctggtaagcagcattgaagaagatgttattgtggaatatggagcagatatctcctcaaaagactttggaagtggatttccggtgaaggatgggcggagaaagattctgccagaagaagaggaatatgcactttctggttggaatttgaataacatgcctgtcctggaacagtctgttcttgcacatattaatgtggacatctctggtatgaaagtgccgtggctctatgtgggaatgtgcttctcttctttttgctggcacattgaggatcactggagttattccatcaactacttgcactggggggagccaaagacatggtatggtgtgccatctcatgctgcagagcaactggaggaggtgatgagagagctggcccccgagttatttgaatcccagcctgatcttctgcatcagttagttaccatcatgaaccccaacgtgctaatggagcatggtgtgcctgtgagtcttttggtgtcttccttcagttgtttgtttgtttgtttgttttttcttttttctttttttttgaaacagggtcttgctctgttgcccaggctggagtgcagcggcacgatgattgctcattgcagcctcagcctgctcagctcaagcagttctcctgcctcagcctaatgagtagctgggactataggagcacaccaccacccccggctaattgttgtattttttgtagagacgaagccttattgtgttgcccaggttggtctcgaactcctgagctcaagcagtcttcccaactcggcctcccaaagtgttgggattacaggtgtgagccactgcacccagccagtatttttaatttaaagttattttagcttttgattagatagaatcacaacatatgctttgttttgtaa

SEQ ID NO: 367928 - DNA, 1164 bp, Homo sapiens
gatttaaagtcttctgtgtttagcagtcgtaaaacattaatgattttgcttcagactcggttaatggaacataaacagatctttgacacttctttgtgagggagaaaatgctagagagggtggcttggttccccacacccatacccaccctaacccctgtcatttacattggtggcaactttaaatggtaaccaagcaaaagtacattttgataatgagtattgataatcctgaggaaaactagtgagtatatgggagccacctttgacctgtgccaaagcagtttctaatttcatttgctaactataaaataaagaactgagccaaaataatttgatcagtggtgtgattagcctattatcattgctgagaatagtgtttttggagtgtgaagtgattcctgaagatttcacctgccttctgtttccagcaagaatccagtgatgaccaacacatttcctcacttttggttcttgagaagtttatccctttgcaacaaaccattaatagggaaaacaaggaaatgctttccctttctctttggcttcttaaagctcacaaccaattcagaccccaagttacttcagagaagcaaatggcaccttttccccattgccaaggatcccagcttatgcagatatgaaggacggatcatttctgaaaatgttaagactctgcttgcagtggacttggcctcagtttcatgaaatgtgtaactctgtatgtgtatgttaggaggagggttggttgaaagagcgggggcagggaggggaatctgattacctcttgggaaataattttcttgccaacaaaaagatacacttgaagtttcttaaggtggcaagtccattaaaaaaaaaaattgtgttggaccctcccagtttagatcaagtatttcttgggggtcttgctattgtggttgataccaataaatggaagatccagaatattttcatttaaagctcaaccattaattggaacatggtgaaacattgtacacattgtaaaagtagggaacagtacaaaagaatggaatcaaatactatattatgtgaataaactagagtgattttggaatttcactctcttcaccccttctcacttgtatgttctgtaaagtgtatttctactttggtaggaagaaagacttgatttaatatttca

SEQ ID NO: 367929 - DNA, 368 bp, Homo sapiens
atgttttctctctgctctcacatgttcctgtaatcctgagcggcttgtatgtctctaccatccaactgatctgtgcccctgccccatgcagaagaaatgtcttaggtatccaaaagtattttgtaaaacttccattacctttttttaaaaccaagttttaatgttatttttacttattcccttactttactcctttactctggacttctaaacttcactgtctacttctaggcttgaagaccagtcccttaaagttggccctaaacctggcagctgaaattagtttatcagttgatttcacatgttccttgtctccctgaattaagaagtgtgggctggtttgattttctctttatgtgaactaagat

SEQ ID NO: 367930 - DNA, 10141 bp, Homo sapiens
ccacaacccagcaaagaacataggctaggtacgaggccttcgtgttaattcggccgaggctcaatccgtacctctagtaaagaagagcttgtgcccctccccgaccccttaccaagggcgagctgcgtggagtcgttggactgggcagaactttggcgggcaaggagacaaacagccacactgtgctgccggggaagagaagaagaaggaaaggccagacacacaggcgtcgtgcggctgcggaaggattccgtttcctgcagggggcggagggatttgacagcacggtaacttccggaaaagtcctgaacctcagtggaaaagccttgcaagaaacaataacaaacgggaggaggaagcgattctggggtttctgtgttgaacggttcttgtccgcgaagatgcgcttcggcctctgtcaggggacttgaacgggcttagtgggcttcagccagcttttctccaccggttccccacggggaccccccccccccccggccgttgcaatggcgggcgtggggccggggggctacgcggcggagttcgtgccaccgccagagtgccccgtctttgagccgagttgggaggagttcacagatccgctcagctttatcggccgcatccggcctttggcggagaaaaccggcatctgcaaaattcggccgcccaaggactggcagcctccatttgcctgtgaagtaaaaagctttcgtttcactccaagagtccagcgcctgaatgaacttgaggcaatgaccagagtgagattggatttcttggatcaactagcaaaattttgggaacttcaaggatctactctgaagatccctgtggtagagagaaaaatcctggatctgtatgctttgagcaagattgttgccagcaaaggaggttttgaaatggtcaccaaagagaagaaatggtctaaagtgggtagtcgcttgggatatctgccaggaaaaggaactgggtctcttttgaagtcacattatgaaagaattctctacccatatgagcttttccagtctggtgtgagccttatgggtgtgcagatgcctaatttagatcttaaagaaaaagtggagcctgaggttctcagcactgatacccaaacttccccagagccaggcacaaggatgaacattctgccgaagagaacaagacgtgtgaagactcagtcagaatctggagatgtgagtagaaacacggaactgaagaaacttcagatttttggggctgggcccaaggttgtgggcttggcaatgggaacaaaagataaagaagatgaggtcacccgaagacgaaaagttaccaacaggtcagacgcatttaacatgcaaatgagacaacggaaaggcactctctctgttaactttgttgatctctatgtttgtatgttttgtggtcggggaaacaatgaagataaattgcttttgtgtgatggatgtgatgacagctatcatacattttgtctaattcctccactacctgatgtgcccaaaggagactggaggtgtcctaaatgtgtcgccgaggaatgtagcaaacctcgagaagcctttggatttgaacaagctgtacgagagtatacacttcagagctttggagagatggcagataattttaagtctgattattttaatatgccagtccatatggttcccacagaactagtagaaaaggaattttggcggctggtaagcagcattgaagaagatgttattgtggaatatggagcagatatctcctcaaaagactttggaagtggatttccggtgaaggatgggcggagaaagattctgccagaagaagaggaatatgcactttctggttggaatttgaataacatgcctgtcctggaacagtctgttcttgcacatattaatgtggacatctctggtatgaaagtgccgtggctctatgtgggaatgtgcttctcttctttttgctggcacattgaggatcactggagttattccatcaactacttgcactggggggagccaaagacatggtatggtgtgccatctcatgctgcagagcaactggaggaggtgatgagagagctggcccccgagttatttgaatcccagcctgatcttctgcatcagttagttaccatcatgaaccccaacgtgctaatggagcatggtgtgcctgtgtacaggaccaatcagtgtgctggcgagtttgttgtgacatttcctcgtgcctatcactctggatttaaccagggctacaactttgctgaagctgtgaacttctgtactgctgactggttgcccattggacgtcaatgtgtaaatcattaccgacgcctaaggcgccactgtgtcttttcacacgaggaactaattttcaagatggcagcagatccagaatgcttagatgtggggctggctgccatggtctgcaaagaattgactctcatgactgaagaagaaacacgattaagagagtctgttgtacagatgggtgtcctgatgtcagaagaagaagtgtttgaacttgttcctgatgatgagcggcagtgttcagcatgcagaaccacatgttttctctctgctctcacatgttcctgtaatcctgagcggcttgtatgtctctaccatccaactgatctgtgcccctgccccatgcagaagaaatgtcttagatatcgctacccattagaagacctcccttctctgctatatggtgtaaaagtcagggcacagtcctatgacacttgggtcagtcgtgttacagaagcattgtctgctaacttcaaccacaaaaaagatttgattgaattgcgagtaatgctggaagatgctgaggataggaaatacccagagaatgatctctttcgaaaactcagggatgctgtaaaagaagctgagacctgtgcttctgtggctcagctgcttctgagcaaaaagcagaaacacagacagagcccagatagtgggaggactcggaccaaactgacagtggaagaattgaaggcctttgtccaacaactttttagtcttccgtgtgtcatcagccaagctcggcaagtaaagaatctgctagatgatgtggaagagtttcatgaacgtgctcaggaggccatgatggatgaaaccccagattcttccaaactccagatgttgatagatatgggctctagtctctatgtggaactccctgaattaccacgactgaagcaagagctacaacaggctcggtggttggacgaagtaagactgaccttatcagatccgcaacaagtcactttggatgtcatgaagaagctgatagactctggggtagggttggcaccccaccatgctgtggagaaagcaatggctgaactacaggagctccttacagtctctgaacgatgggaagaaaaggctaaggtctgcctacaggcaagaccgaggcacagtgtggcaagtttagaaagcattgtgaatgaagccaagaacattccagcctttctacccaatgtgttgtccttgaaagaagccttacaaaaggctcgagaatggaccgctaaagtggaagctattcagagtggcagcaattacgcttatttggagcagcttgagagcttgtctgcgaaaggacgccctattcctgtgcgtcttgaagcactgccgcaagtggaatcacaggtagcagcagcacgggcatggagagaacggactgggcggacgtttcttaagaagaattctagccatacattgttacaggtgctgagcccccggaccgacattggtgtatatgggagtggcaaaaataggaggaaaaaagtaaaagaactaatagaaaaagaaaaagaaaaggatctggacctggagcctctgagtgatctggaggaaggattggaggaaaccagagatacagccatggtggtggcagttttcaaagaacgggagcaaaaagagattgaagccatgcattctctcagagcagccaacctagccaagatgacaatggtggaccgcatagaagaagtaaaattttgcatttgccgcaagacagccagtgggtttatgctacagtgtgagctctgcaaagactggttccataacagctgtgttcctcttcctaaatcaagttcccaaaaaaaaggatccagctggcaagctaaagaagtaaaattcctttgccctctttgtatgcggtctcgaaggcccaggctagagactattctgtcactcctggtatcccttcagaagttgcccgtacggttgcctgaaggagaggccctgcagtgtttgacagaacgtgctatgagttggcaagatagagcgcggcaggctctagccacagatgaactatcctctgccctggccaaactatctgtgttgagccagcgtatggtggaacaggcggctcgagaaaaaactgaaaagatcatcagtgcagaactccaaaaagcagctgccaatccagacttacagggacacttacctagtttccagcagtctgcttttaaccgggtggtgagcagtgtgtcatcttctcctcgacaaacaatggactatgatgatgaagaaacagactctgatgaagacattcgagagacatatggctacgacatgaaggacacagccagtgtgaagtcctctagtagtcttgaacccaatcttttttgtgatgaagagattcccatcaaatccgaggaggtggtgacccacatgtggacagcaccttcattttgtgcagagcatgcttattcttctgcttctaagagttgttctcaaggttctagcaccccaaggaaacaacctcggaagagccctttggtgccccgaagtttggaacctccagtgctggagttgtcacctggagctaaggcacaactggaagaacttatgatggttggagatctcctggaagtatctctggacgagactcaacacatatggcggattttgcaggccacacacccaccctctgaagacagattcttgcatatcatggaggatgacagcatggaagagaaaccactaaaagtgaaaggaaaggactcttcagagaagaaacggaaacggaagctagaaaaggtagagcaactttttggagaaggaaaacagaagtccaaggagttaaagaaaatggacaaacctagaaagaagaaattaaaattaggtgcagacaaatcaaaggagctgaataaactggccaagaaactagcaaaagaagaagagagaaagaaaaagaaggagaaggctgctgcagccaaagttgaacttgtgaaagagagcactgaaaagaaaagagagaaaaaggtgctggacatcccctcaaagtatgactggtcaggagcagaggagtctgatgatgagaatgctgtgtgcgcagcacagaactgccaaaggccctgcaaggacaaggtagactgggtacaatgtgatggtggctgtgatgagtggtttcatcaagtttgtgtgggtgtatctccagaaatggctgaaaatgaagattacatctgtataaactgtgcaaagaagcaggggccagttagcccaggtccagcaccacctccttccttcataatgagctacaaactaccaatggaggatcttaaagagaccagttagcagatgcttggttagtttgggacatggggggacatggaccacattgagaccttagtcatcaagtagagtggtttatatccacttggaatgttgcttccaaagatgaatggccttcagagaaagtccccttagtgctggcttcctctttgcatggactctgtgggttacattctctatcaacatatctatgcagagggtgtcttctttggtacaacagccaatatttcatgtctcctttgagtgtggtttactgcattaaggccagatgcttaattgagctctagggtggctggttagtattaatacattggtgtgctaacagggcatataggatgtggcttttgtccagctgatagtagttagaggcttacaacttaggagcagcaccaactgaaggtgctaattgcttggatctccttcattgggatagttggagagggattggagtaccactttccttccactgttacctggtacttaatgccctaaagatacaactaggagtaacagggccaaagttatttctgttagacgtcaaggaatggtatcacagtctattgacctcagcgatttgtgcttgtttgtgctagaagaacatcccaaataggagaacctctcacaagctggggcaggtcaccttatctttgtaagatgaggatatcatctagatcagaaatctgactagattggattctgaggagaagaacctactacaaggcaaggagccgttttttggctttgaaaagtcttgctgtcttgggtctacattttagggaagagcaggtacatggatccaggcttctgccaaaaaaaaaaagagaagaagatgacgatgatgaccagtcgtactatcttactgagccacagtgatgcatgcttttcggggaaaacttcattcacaagtattccagacaccaggcttcaggcatggccatgagcaagaccagcaaataacagctttttgccttgcagccctgaccccaatgtctgctgtttccaacactggtgatttctaactacggcccacagcagatgctgttgaataacaccatggcttcatcagaggatgtggggttgtagtacctctgggtgatgaagttgttttagtaaatccatttttaaaaaaaaaaaaggacttgtttttacttttttctaaatgtctctgactactgactgttctatacatagattatttttccttttttaatatacatatatgaatatataaatatatatatttactgttaccagcagcatatgacagagtttcaacatcaaaaatccatttgggggcttgctttttcttttttgctttaaaaaaaaaaatcccattccttctttgtagtacaaggagttagcactccctcctccatcccagcctgaccagatcttccattttgcttttgttcatatagataattatatgtcctttgtgtgttgggacttgtccctgtctgttgggaaacttggtctcactctagtctgtgctggctcttttttcttttgtgtgtgaatgtttgaaactatggtgctgtgtcctcttccctcctgttgtgttctctgttcttcttaaggtattaggtaagctgtatgtaaactcttattagaaggggactaatttttttttaaaggacaaaaaaaaaaatgactaaaaatagtgttttgtcatcactgtctggtgtctttattttggtttaaaaaaatctgtggtttgacttaaattcatcagttttccttttaaaggggggattggggtggacctagcaacagcttatagtttcctcttccctttttgccccagtctcttttaaagaactgtcttctagtaactagaagtgaaatgtactgtccagttacagtttgagtgggtatgagatttaactcaaaaggaatcttacaaaaaaaaagatgttttcttataaaatccaatttctgtaaatgttttctctgaagttcatactacctactttttattcattcttaatactgtataacattttgagtgttttgacttgttcagaggtttgttagtgttgctgtgcatatgtcttgaggtctcatctgaagtaagtttgtgtatgatcgaagatttcaatggatattgcaaggtaactaattaactgatttcataagttttcgttttgccaagctaacgattatcaattaagaatttcctctggttgatgttatacaagaaagcacaatattttttgcctgttgatcttctttgtaacagtcttcagatatttgtgggttaaaaattgaatgtaattttaagtgacagatgcctggaatacatttaaaatttttatttttccttcctaatcatccattaactattccactatcagtggagagtcatgaggatgctgagaaagtatgaatagcttcctgtcaccttctgacgttttgaaacttaaatatgtcttttcgttgatactgtgggattttctgtatttacttgacagtcatggaggatttggtatgacttgaccacaggtttagaccaaggctgagaagaacagaagggagaaattaatggcaaaacaaaaaatacacaaatctgcggttttggaattaatgaaacaagattcatctatttaaagaaatgttggtgttctaatacaaagcattattttcacttagagaaaattacttacttgctcccttctgtattgtaatattttgtattaagacatgatttaaaatgtctttctacccttatctcctctaaactgcaactgaagttgcaattcttcatcattagtattttaactctggcaaaggttatagaaagaaaaatggaaatatggtaggcctgtggtattcttaaaagctaagtcattagaactatgcagatccccaagtttaaaagtacaaatacagcaccagtagttagctttctagctgggggagaagacaggagatttttcttccacagatgtttattttgcttcctgataggtactgcagcaaagccatgttgatgtgtagatgcatgacttcctcactaagctgctgcacaccagctttgcctgcatgattcaaatttgtgcctcagtaaaattataaattattgcatgtcataccttgaataatggaaacggcaaacattaaacctgtgattacccataatgtactttaataataaaaaacatggcagccaggtgcagtagagtgcacctgtggtcaggaggctgaagtgggaagattgcttcaacctgtgagtttgagtcccgcctggtcaacagcgagaccccatgtgtctgtctgtctctctctttttttaaaggacagaggctaagctgtaaggttagcatggttctgcctgggctttgcttctgtgcttctgtgcaggctgagctgtaaggttagcatggttctgcctgggctttgcttctgcgcttctgtgcaggctgagctgtaaggttagcatggttctgcctgggctttgcttctgcgcttctgtgcaggctgagctgtaaggttagcatggttctgcctgggctttgcttctgcgcttctgtgctagcaggtgcccacaaaatgtctttttgaatttcttaatttttgggttctggatgcaattcgtgcacgccaagaaactacttgcttgtcagtattttaattctgtagtacatgtgtgtgaatatcagccagtacttacagtaggaggatgaacagaaaaactgagaagacctgtctttcaaaagatgggtttatccactttttaagggaaaaagtgacagtttggcatgggatttgaaaagtggaaattgtggaaaaattgagctgttgaagtcccacatataaccagatttaataaagcttcacatgtgaattagctccatatgtgtgtagaaggttgcttttatagcaggtccttaagtactccttttgaaattcctcctttttttttaagtcataccattacttctttggatatgaatgtcccaagtggtatctcctactgtagtatgaggaagaatggctgttaatgtattttttgaattttggtcttgtcttggcctggatcatatccagtcaccactatgcaacaaatgatgtgcactgggcaaggatatgatgggttatgaaagctgtatcttgtttgttttttcttttgcagtactccaagtggtctaaacaggaatgtcttgtaaaacctcaagactccctattgattattcccttacatatttatttacaatttatcagggtaattggtggtgccttatgaaaagtataactcgatttcttgatctttgagcatgttttgtgtttcttgtgttttctaaaagaatattagatatggttaattgcattacatctaaaagatttaaaaaattgtgtgtatgctcaggttccccacacccatacccaccctaacccctgtcatttacattggtggcaactttaaatggtaaccaagcaaaagtacattttgataatgagtattgataatcctgaggaaaactagtgagtatatgggagccacctttgacctgtgccaaagcagtttctaatttcatttgctaactataaaataaagaactgagcca

SEQ ID NO: 367931 - DNA, 3087 bp, Homo sapiens
ccacaacccagcaaagaacataggctaggtacgaggccttcgtgttaattcggccgaggctcaatccgtacctctagtaaagaagagcttgtgcccctccccgaccccttaccaagggcgagctgcgtggagtcgttggactgggcagaactttggcgggcaaggagacaaacagccacactgtgctgccggggaagagaagaagaaggaaaggccagacacacaggcgtcgtgcggctgcggaaggattccgtttcctgcagggggcggagggatttgacagcacggtaacttccggaaaagtcctgaacctcagtggaaaagccttgcaagaaacaataacaaacgggaggaggaagcgattctggggtttctgtgttgaacggttcttgtccgcgaagatgcgcttcggcctctgtcaggggacttgaacgggcttagtgggcttcagccagcttttctccaccggttccccacggggaccccccccccccccggccgttgcaatggcgggcgtggggccggggggctacgcggcggagttcgtgccaccgccagagtgccccgtctttgagccgagttgggaggagttcacagatccgctcagctttatcggccgcatccggcctttggcggagaaaaccggcatctgcaaaattcggccgcccaaggactggcagcctccatttgcctgtgaagtaaaaagctttcgtttcactccaagagtccagcgcctgaatgaacttgaggcaatgaccagagtgagattggatttcttggatcaactagcaaaattttgggaacttcaaggatctactctgaagatccctgtggtagagagaaaaatcctggatctgtatgctttgagcaagattgttgccagcaaaggaggttttgaaatggtcaccaaagagaagaaatggtctaaagtgggtagtcgcttgggatatctgccaggaaaaggaactgggtctcttttgaagtcacattatgaaagaattctctacccatatgagcttttccagtctggtgtgagccttatgggtgtgcagatgcctaatttagatcttaaagaaaaagtggagcctgaggttctcagcactgatacccaaacttccccagagccaggcacaaggatgaacattctgccgaagagaacaagacgtgtgaagactcagtcagaatctggagatgtgagtagaaacacggaactgaagaaacttcagatttttggggctgggcccaaggttgtgggcttggcaatgggaacaaaagataaagaagatgaggtcacccgaagacgaaaagttaccaacaggtcagacgcatttaacatgcaaatgagacaacggaaaggcactctctctgttaactttgttgatctctatgtttgtatgttttgtggtcggggaaacaatgaagataaattgcttttgtgtgatggatgtgatgacagctatcatacattttgtctaattcctccactacctgatgtgcccaaaggagactggaggtgtcctaaatgtgtcgccgaggaatgtagcaaacctcgagaagcctttggatttgaacaagctgtacgagagtatacacttcagagctttggagagatggcagataattttaagtctgattattttaatatgccagtccatatggttcccacagaactagtagaaaaggaattttggcggctggtaagcagcattgaagaagatgttattgtggaatatggagcagatatctcctcaaaagactttggaagtggatttccggtgaaggatgggcggagaaagattctgccagaagaagaggaatatgcactttctggttggaatttgaataacatgcctgtcctggaacagtctgttcttgcacatattaatgtggacatctctggtatgaaagtgccgtggctctatgtgggaatgtgcttctcttctttttgctggcacattgaggatcactggagttattccatcaactacttgcactggggggagccaaagacatggtatggtgtgccatctcatgctgcagagcaactggaggaggtgatgagagagctggcccccgagttatttgaatcccagcctgatcttctgcatcagttagttaccatcatgaaccccaacgtgctaatggagcatggtgtgcctgtgtacaggaccaatcagtgtgctggcgagtttgttgtgacatttcctcgtgcctatcactctggatttaaccagggctacaactttgctgaagctgtgaacttctgtactgctgactggttgcccattggacgtcaatgtgtaaatcattaccgacgcctaaggcgccactgtgtcttttcacacgaggaactaattttcaagatggcagcagatccagaatgcttagatgtggggctggctgccatggtctgcaaagaattgactctcatgactgaagaagaaacacgattaagagagtctgttgtacagatgggtgtcctgatgtcagaagaagaagtgtttgaacttgttcctgatgatgagcggcagtgttcagcatgcagaaccacatgttttctctctgctctcacatgttcctgtaatcctgagcggcttgtatgtctctaccatccaactgatctgtgcccctgccccatgcagaagaaatgtcttagatatcgctacccattagaagacctcccttctctgctatatggtgtaaaagtcagggcacagtcctatgacacttgggtcagtcgtgttacagaagcattgtctgctaacttcaaccacaaaaaagatttgattgaattgcgagtaatgctggaagatgctgaggataggaaatacccagagaatgatctctttcgaaaactcagggatgctgtaaaagaagctgagacctgtgcttctgtggctcagctgcttctgagcaaaaagcagaaacacaggtaaacctaagaagagtttaattctccagtgttttcctgtttctttcagagtaaaaaccaaaattttatccggcctgtgaagccgtacattatctttgacctcttgttgccatgtctcttgcttccccagtaatgctccagttttatctcctact

SEQ ID NO: 367932 - DNA, 2224 bp, Homo sapiens
ccacaacccagcaaagaacataggctaggtacgaggccttcgtgttaattcggccgaggctcaatccgtacctctagtaaagaagagcttgtgcccctccccgaccccttaccaagggcgagctgcgtggagtcgttggactgggcagaactttggcgggcaaggagacaaacagccacactgtgctgccggggaagagaagaagaaggaaaggccagacacacaggcgtcgtgcggctgcggaaggattccgtttcctgcagggggcggagggatttgacagcacggtaacttccggaaaagtcctgaacctcagtggaaaagccttgcaagaaacaataacaaacgggaggaggaagcgattctggggtttctgtgttgaacggttcttgtccgcgaagatgcgcttcggcctctgtcaggggacttgaacgggcttagtgggcttcagccagcttttctccaccggttccccacggggaccccccccccccccggccgttgcaatggcgggcgtggggccggggggctacgcggcggagttcgtgccaccgccagagtgccccgtctttgagccgagttgggaggagttcacagatccgctcagctttatcggccgcatccggcctttggcggagaaaaccggcatctgcaaaattcggccgcccaaggactggcagcctccatttgcctgtgaagtaaaaagctttcgtttcactccaagagtccagcgcctgaatgaacttgaggcaatgaccagagtgagattggatttcttggatcaactagcaaaattttgggaacttcaaggatctactctgaagatccctgtggtagagagaaaaatcctggatctgtatgctttgagcaagattgttgccagcaaaggaggttttgaaatggtcaccaaagagaagaaatggtctaaagtgggtagtcgcttgggatatctgccaggaaaaggaactgggtctcttttgaagtcacattatgaaagaattctctacccatatgagcttttccagtctggtgtgagccttatgggtgtgcagatgcctaatttagatcttaaagaaaaagtggagcctgaggttctcagcactgatacccaaacttccccagagccaggcacaaggatgaacattctgccgaagagaacaagacgtgtgaagactcagtcagaatctggagatgtgagtagaaacacggaactgaagaaacttcagatttttggggctgggcccaaggttgtgggcttggcaatgggaacaaaagataaagaagatgaggtcacccgaagacgaaaagttaccaacaggtcagacgcatttaacatgcaaatgagacaacggaaaggcactctctctgttaactttgttgatctctatgtttgtatgttttgtggtcggggaaacaatgaagataaattgcttttgtgtgatggatgtgatgacagctatcatacattttgtctaattcctccactacctgatgtgcccaaaggagactggaggtgtcctaaatgtgtcgccgaggaatgtagcaaacctcgagaagcctttggatttgaacaagctgtacgagagtatacacttcagagctttggagagatggcagataattttaagtctgattattttaatatgccagtccatatggttcccacagaactagtagaaaaggaattttggcggctggtaagcagcattgaagaagatgttattgtggaatatggagcagatatctcctcaaaagactttggaagtggatttccggtgaaggatgggcggagaaagattctgccagaagaagaggaatatgcactttctggttggaatttgaataacatgcctgtcctggaacagtctgttcttgcacatattaatgtggacatctctggtatgaaagtgccgtggctctatgtgggaatgtgcttctcttctttttgctggcacattgaggatcactggagttattccatcaactacttgcactgaggtcccgggtttgcctacctgggcgtatgagcgagactccatctccaaaaaaaaaacccaaaaaacagtgcttgttgttcttttgttgttattgttaaaggatcattatctcattatcaacaacattggcaggtaattgagcaactgtttgtctccttgtcatgtggagatagaaaatggcctacgaggttgacaggtgctggagcagcgtcaggaagagagacgac

SEQ ID NO: 367933 - DNA, 1354 bp, Homo sapiens
gcggccgcccgcgagcggggcggtgccacgtacggctccggaagaagcgacggaatctgctagggcacaagagagacgggcgctcgcgctctcgcagtcctcttccgtcagtgtcttttgcttcgactcccggcggagcgcgcaacgtggagtgacgtgcaggggccaagtgcaacccaggcagccacggctgtttcggagctcaggactctaaaatggcagagcagctttctccaggaaaggcggtggatcaggtgtgcaccttccttttcaaaaagcctgggcggaaaggggctgctggacgcagaaagcgcccggcctgcgacccagagcccggagaaagcggcagcagtagcgacgaaggctgcactgtggttcgaccggaaaagaagcgggtgacccacaatccaatgatacagaagacccgtgacagtggtaaacagaaggcggcttacggcgacttgagcagcgaagaggaagaggaaaatgagcccgagagtctcggcgtggtttataaatccacccgttcggcgaaacccgtgggaccagaggatatgggagcgacagctgtctatgagctggacacagagaaagagcgcgatgcacaagccatctttgagcgcagccagaagatccaggaggagctgaggggcaaggaggatgacaagatctatcggggaatcaacaattatcagaaatacatgaagcccaaggatacgtctatgggcaatgcctcttccgggatggtgaggaagggccccatccgagcgcccgagcatctacgtgccaccgtgcgctgggattaccagcccgacatctgtaaggactacaaagagactggcttctgcggcttcggagacagctgcaaattcctccatgaccgttcagattacaagcatgggtggcagatcgaacgtgagcttgatgagggtcgctatggtgtctatgaggatgaaaactatgaagtgggaagcgatgatgaggaaataccattcaagtgtttcatctgtcgccagagcttccaaaacccagttgtcaccaagtgcaggcattatttctgcgagagctgtgcactgcagcatttccgcaccaccccgcgctgctatgtctgtgaccagcagaccaatggcgtcttcaatccagcgaaagaattgattgctaaactagagaagcatcgagctacaggagagggtggtgcttccgacttgccagaagaccccgatgaggatgcaattcccattacttaggtttcccataattcttaaatttaaaaaataaacgttttgttcttttggaagtcttacttcgtgtccttcctttgtagagaaagtgacagagcaggcgggtggtgaag

SEQ ID NO: 367934 - DNA, 1222 bp, Homo sapiens
  misc_feature (1193)..(1193): n is a, c, g, or t
  misc_feature (1195)..(1195): n is a, c, g, or t
gcggccgcccgcgagcggggcggtgccacgtacggctccggaagaagcgacggaatctgctagggcacaagagagacgggcgctcgcgctctcgcagtcctcttccgtcagtgtcttttgcttcgactcccggcggagcgcgcaacgtggagtgacgtgcaggggccaagtgcaacccaggcagccacggctgtttcggagctcaggactctaaaatggcagagcagctttctccaggaaaggcggtggatcaggtgtgcaccttccttttcaaaaagcctgggcggaaaggggctgctggacgcagaaagcgcccggcctgcgacccagagcccggagaaagcggcagcagtagcgacgaaggctgcactgtggttcgaccggaaaagaagcgggtgacccacaatccaatgatacagaagacccgtgacagtggtaaacagaaggcggcttacggcgacttgagcagcgaagaggaagaggaaaatgagcccgagagtctcggcgtggtttataaatccacccgttcggcgaaacccgtgggaccagaggatatgggagcgacagctgtctatgagctggacacagagaaagagcgcgatgcacaagccatctttgagcgcagccagaagatccaggaggagctgaggggcaaggaggatgacaagatctatcggggaatcaacaattatcagaaatacatgaagcccaaggatacgtctatgggcaatgcctcttccgggatggtgaggaagggccccatccgagcgcccgagcatctacgtgccaccgtgcgctgggattaccagcccgacatctgtaaggactacaaagagactggcttctgcggcttcggagacagctgcaaattcctccatgaccgttcagattacaagcatgggtggcagatcgaacgtgagcttgatgagggtcgctatggtgtctatgaggatgaaaactatgaagtgggaagcgatgatgaggaaataccattcaagtgtttcatctgtcgccagagcttccaaaacccagttgtcaccaagtgcaggcattatttctgcgagagctgtgcactgcagcatttccgcaccaccccgcgctgctatgtctgtgaccagcagaccaatggcgtcttcaatccagcgaaagaattgattgctaaactagagaagcatcgagctacaggagagcancngcagtagggtatactctagatctgacc

SEQ ID NO: 367935 - DNA, 1300 bp, Homo sapiens
gcggccgcccgcgagcggggcggtgccacgtacggctccggaagaagcgacggaatctgctagggcacaagagagacgggcgctcgcgctctcgcagtcctcttccgtcagtgtcttttgcttcgactcccggcggagcgcgcaacgtggagtgacgtgcaggggccaagtgcaacccaggcagccacggctgtttcggagctcaggactctaaaatggcagagcagctttctccaggaaaggcggtggatcaggtgtgcaccttccttttcaaaaagcctgggcggaaaggggctgctggacgcagaaagcgcccggcctgcgacccagagcccggagaaagcggcagcagtagcgacgaaggctgcactgtggttcgaccggaaaagaagcgggtgacccacaatccaatgatacagaagacccgtgacagtggtaaacagaaggcggcttacggcgacttgagcagcgaagaggaagaggaaaatgagcccgagagtctcggcgtggtttataaatccacccgttcggcgaaacccgtgggaccagaggatatgggagcgacagctgtctatgagctggacacagagaaagagcgcgatgcacaagccatctttgagcgcagccagaagatccaggaggagctgaggggcaaggaggatgacaagatctatcggggaatcaacaattatcagaaatacatgaagcccaaggatacgtctatgggcaatgcctcttccgggatggtgaggaagggccccatccgagcgcccgagcatctacgtgccaccgtgcgctgggattaccagcccgacatctgtaaggactacaaagagactggcttctgcggcttcggagacagctgcaaattcctccatgaccgttcagattacaagcatgggtggcagatcgaacgtgagcttgatgagggtcgctatggtgtctatgaggatgaaaactatgaagtgggaagcgatgatgaggaaataccattcaagtgtttcatctgtcgccagagcttccaaaacccagttgtcaccaagtgcaggcattatttctgcgagagctgtgcactgcagcatttccgcaccaccccgcgctgctatgtctgtgaccagcagaccaatggcgtcttcaatccagcgaaagaattgattgctaaactagagaagcatcgagctacaggagagggtggtgcttccgacttgccagaagaccccgatgaggatgcaattcccattacttaggtttcccataattcttaaatttaaaaaataaacgttttgttcttttggaagtc

SEQ ID NO: 367936 - DNA, 725 bp, Homo sapiens
gcggccgcccgcgagcggggcggtgccacgtacggctccggaagaagcgacggaatctgctagggcacaagagagacgggcgctcgcgctctcgcagtcctcttccgtcagtgtcttttgcttcgactcccggcggagcgcgcaacgtggagtgacgtgcaggggccaagtgcaacccaggcagccacggctgtttcggagctcaggactctaaaatggcagagcagctttctccaggaaaggcggtggatcaggtgtgcaccttccttttcaaaaagcctgggcggaaaggggctgctggacgcagaaagcgcccggcctgcgacccagagcccggagaaagcggcagcagtagcgacgaaggctgcactgtggttcgaccggaaaagaagcgggtgacccacaatccaatgatacagaagacccgtgacagtggtaaacagaaggcggcttacggcgacttgagcagcgaagaggaagaggaaaatgagcccgagagtctcggcgtggtttataaatccacccgttcggcgaaacccgtgggaccagaggatatgggagcgacagctgtctatgagctggacacagagaaagagcgcgatgcacaagccatctttgagcgcagccagaagatccaggcaggtttgtccagtcagaaccagtcaaggattccaggctgtatacatcataatacatgctaatacgaatgttactgagtttacact

SEQ ID NO: 367937 - DNA, 1139 bp, Homo sapiens
ggaggcgggaggaggacccggaatgaagacgaaggcgctcaccattaaatcgtacggctcgcactgccccctgcccgcagtccagcgtcttcaaccgtttctgcggcagctctggaggccgcggctttggctcagggaaagccatgctcccaggactccttccttgcagccttaaatcggtctgtacggaaaattccgcgccttagaaacccacgcttgggtgtaaccttattattgttcttcctgacctacttcctgtttatcacttccgggttcatcattttggcatttcggtgatcgggttggaactattgaagcccgctttcaggttcttttccccattttccctttgaaaggaagacttctggcttctcctaaatctccgttctctgggtaaggggagtccaagcctctgtcatgaggaacggaaatgcgagggcctcgggtgttactctaaaatccgccctcagcttgcacgccggaagctgcgattcctgcagcggaagaggcgtgatctggccttcgactcgctatgtccactaacaatatgtcggacccacggaggccgaacaaagtgctgaggtacaagcccccgccgagcgaatgtaacccggccttggacgacccgacgccggactacatgaacctgctgggcatgatcttcagcatgtgcggcctcatgcttaagctgaagtggtgtgcttgggtcgctgtctactgctccttcatcagctttgccaactctcggagctcggaggacacgaagcaaatgatgagtagcttcatgctgtccatctctgccgtggtgatgtcctatctgcagaatcctcagcccatgacgcccccatggtgataccagcctagaagggtcacattttggaccctgtctatccactaggcctgggctttggctgctaaacctgctgccttcagctgccatcctggacttccctgaatgaggccgtctcggtgcccccagctggatagagggaacctggccctttcctagggaacaccctaggcttacccctcctgcctcccttcccctgcctgctgctgggggagatgctgtccatgtttctaggggtattcatttgctttctcgttgaaacctgttgttaataaagtttttcactctg

SEQ ID NO: 367938 - DNA, 543 bp, Homo sapiens
  misc_feature (8)..(8): n is a, c, g, or t
  misc_feature (14)..(14): n is a, c, g, or t
  misc_feature (43)..(43): n is a, c, g, or t
cgacaagntgagtnagcccgcggcgatgtaccgcttgcgacgngcgctaatgactgctggcatgatctcagcatgtgcggctcatgcttaagctgaagtggtgtgcttgggtcgctgtctactgctccttcatcagctttgccaactctcggagctcggaggacacgaagcaaatgatgagtagcttcatgctgtccatctctgccgtggtgatgtcctatctgcagaatcctcagcccatgacgcccccatggtgataccagcctagaagggtcacattttggaccctgtctatccactaggcctgggctttggctgctaaacctgctgccttcagctgccatcctggacttccctgaatgaggccgtctcggtgcccccagctggatagagggaacctggccctttcctagggaacaccctaggcttacccctcctgcctcccttcccctgcctgctgctgggggagatgctgtccatgtttctaggggtattcatttgctttctcgttgaaacctgttgttaataaagtttttcactctg

SEQ ID NO: 367939 - DNA, 522 bp, Homo sapiens
  misc_feature (11)..(11): n is a, c, g, or t
cgccccgcgangaaccggctgagaccgacgcggataatgactgtggcatgacagcatgtcggctatgttaactgaagtggtgtgcttgggtcgctgtctactgctccttcatcagctttgccaactctcggagctcggaggacacgaagcaaatgatgagtagcttcatgctgtccatctctgccgtggtgatgtcctatctgcagaatcctcagcccatgacgcccccatggtgataccagcctagaagggtcacattttggaccctgtctatccactaggcctgggctttggctgctaaacctgctgccttcagctgccatcctggacttccctgaatgaggccgtctcggtgcccccagctggatagagggaacctggccctttcctagggaacaccctaggcttacccctcctgcctcccttcccctgcctgctgctgggggagatgctgtccatgtttctaggggtattcatttgctttctcgttgaaacctgttgttaataaagtttttcactctg

SEQ ID NO: 367940 - DNA, 1196 bp, Homo sapiens
ggaggcgggaggaggacccggaatgaagacgaaggcgctcaccattaaatcgtacggctcgcactgccccctgcccgcagtccagcgtcttcaaccgtttctgcggcagctctggaggccgcggctttggctcagggaaagccatgctcccaggactccttccttgcagccttaaatcggtctgtacggaaaattccgcgccttagaaacccacgcttgggtgtaaccttattattgttcttcctgacctacttcctgtttatcacttccgggttcatcattttggcatttcggtgatcgggttggaactattgaagcccgctttcaggttcttttccccattttccctttgaaaggaagacttctggcttctcctaaatctccgttctctgggtaaggggagtccaagcctctgtcatgaggaacggaaatgcgagggcctcgggtgttactctaaaatccgccctcagcttgcacgccggaagctgcgattcctgcagcggaagaggcgtgatctggccttcgactcgctatgtccactaacaatatgtcggacccacggaggccgaacaaagtgctgaggtacaagcccccgccgagcgaatgtaacccggccttggacgacccgacgccggactacatgaacctgctgggcatgatcttcagcatgtgcggcctcatgcttaagctgaagtggtgtgcttgggtcgctgtctactgctccttcatcagctttgccaactctcggagctcggaggacacgaagcaaatgatgagtagcttcatgctgtccatctctgccgtggtgatgtcctatctgcagaatcctcagcccatgacgcccccatggtgataccagcctagaagggtcacattttggaccctgtctatccactaggcctgggctttggctgctaaacctgctgccttcagctgccatcctggacttccctgaatgaggccgtctcggtgcccccagctggatagagggaacctggccctttcctagggaacaccctaggcttacccctcctgcctcccttcccctgcctgctgctgggggagatgctgtccatgtttctaggggtattcatttgctttctcgttgaaacctgttgttaataaagtttttcactctgaaaaaaaaaattcactttctactttatcttcattgtggccccctttgccgttgattt

SEQ ID NO: 367941 - DNA, 1355 bp, Homo sapiens
  misc_feature (1142)..(1142): n is a, c, g, or t
  misc_feature (1150)..(1150): n is a, c, g, or t
  misc_feature (1162)..(1162): n is a, c, g, or t
ggaggcgggaggaggacccggaatgaagacgaaggcgctcaccattaaatcgtacggctcgcactgccccctgcccgcagtccagcgtcttcaaccgtttctgcggcagctctggaggccgcggctttggctcagggaaagccatgctcccaggactccttccttgcagccttaaatcggtctgtacggaaaattccgcgccttagaaacccacgcttgggtgtaaccttattattgttcttcctgacctacttcctgtttatcacttccgggttcatcattttggcatttcggtgatcgggttggaactattgaagcccgctttcaggttcttttccccattttccctttgaaaggaagacttctggcttctcctaaatctccgttctctgggtaaggggagtccaagcctctgtcatgaggaacggaaatgcgagggcctcgggtgttactctaaaatccgccctcagcttgcacgccggaagctgcgattcctgcagcggaagaggcgtgatctggccttcgactcgctatgtccactaacaatatgtcggacccacggaggccgaacaaagtgctgaggtacaagcccccgccgagcgaatgtaacccggccttggacgacccgacgccggactacatgaacctgctgggcatgatcttcagcatgtgcggcctcatgcttaagctgaagtggtgtgcttgggtcgctgtctactgctccttcatcagctttgccaactctcggagctcggaggacacgaagcaaatgatgagtagcttcatgctgtccatctctgccgtggtgatgtcctatctgcagaatcctcagcccatgacgcccccatggtgataccagcctagaagggtcacattttggaccctgtctatccactaggcctgggctttggctgctaaacctgctgccttcagctgccatcctggacttccctgaatgaggccgtctcggtgcccccagctggatagagggaacctggccctttcctagggaacaccctaggcttacccctcctgcctcccttcccctgcctgctgctgggggagatgctgtccatgtttctaggggtattcatttgctttctcgttgaaacctgttgttaataaagtttttcactctgtancaaaaaanacaaagagcaanaaagcagttgggggggggccgccggaaaagtttttaaaacattcgttggggcggcgggcccaagtgttatgaacttggccaagggctccaaggacccggcaaggaatggggggttccccaaaaaacgcggggaccgggtttgacaaccaaggggtggggcaggcttcacgggcgacaaccccgcgacgcaggg

SEQ ID NO: 367942 - DNA, 1277 bp, Homo sapiens
ggaggcgggaggaggacccggaatgaagacgaaggcgctcaccattaaatcgtacggctcgcactgccccctgcccgcagtccagcgtcttcaaccgtttctgcggcagctctggaggccgcggctttggctcagggaaagccatgctcccaggactccttccttgcagccttaaatcggtctgtacggaaaattccgcgccttagaaacccacgcttgggtgtaaccttattattgttcttcctgacctacttcctgtttatcacttccgggttcatcattttggcatttcggtgatcgggttggaactattgaagcccgctttcaggttcttttccccattttccctttgaaaggaagacttctggcttctcctaaatctccgttctctgggtaaggggagtccaagcctctgtcatgaggaacggaaatgcgagggcctcgggtgttactctaaaatccgccctcagcttgcacgccggaagctgcgattcctgcagcggaagaggcgtgatctggccttcgactcgctatgtccactaacaatatgtcggacccacggaggccgaacaaagtgctgaggtacaagcccccgccgagcgaatgtaacccggccttggacgacccgacgccggactacatgaacctgctgggcatgatcttcagcatgtgcggcctcatgcttaagctgaagtggtgtgcttgggtcgctgtctactgctccttcatcagctttgccaactctcggagctcggaggacacgaagcaaatgatgagtagcttcatgctgtccatctctgccgtggtgatgtcctatctgcagaatcctcagcccatgacgcccccatggtgataccagcctagaagggtcacattttggaccctgtctatccactaggcctgggctttggctgctaaacctgctgccttcagctgccatcctggacttccctgaatgaggccgtctcggtgcccccagctggatagagggaacctggccctttcctagggaacaccctaggcttacccctcctgcctcccttcccctgcctgctgctgggggagatgctgtccatgtttctaggggtattcatttgctttctcgacacaagcgtctgagatgttagtgttagttagttttgttgtgagtgttaggaaaagggcatacaggactaggaagcagataaggaaaatgattatgagggcgtgatcatgaaaggtgataagctcttctatgataggggaagtagcgtcttggtagacccttttcctactcg

SEQ ID NO: 367943 - DNA, 125 bp, Homo sapiens
ctgcccacccacttacctttccctagcctgaagtggtgtgcttgggtcgctgtctactgctccttcatcagctttgccaactctcggagctcggaggacacgaagcaaatgatgagtagcttcat

SEQ ID NO: 367944 - DNA, 1327 bp, Homo sapiens
ggaggcgggaggaggacccggaatgaagacgaaggcgctcaccattaaatcgtacggctcgcactgccccctgcccgcagtccagcgtcttcaaccgtttctgcggcagctctggaggccgcggctttggctcagggaaagccatgctcccaggactccttccttgcagccttaaatcggtctgtacggaaaattccgcgccttagaaacccacgcttgggtgtaaccttattattgttcttcctgacctacttcctgtttatcacttccgggttcatcattttggcatttcggtgatcgggttggaactattgaagcccgctttcaggttcttttccccattttccctttgaaaggaagacttctggcttctcctaaatctccgttctctgggtaaggggagtccaagcctctgtcatgaggaacggaaatgcgagggcctcgggtgttactctaaaatccgccctcagcttgcacgccggaagctgcgattcctgcagcggaagaggcgtgatctggccttcgactcgctatgtccactaacaatatgtcggacccacggaggccgaacaaagtgctgaggtacaagcccccgccgagcgaatgtaacccggccttggacgacccgacgccggactacatgaacctgctgggcatgatcttcagcatgtgcggcctcatgcttaagctgaagtggtgtgcttgggtcgctgtctactgctccttcatcagctttgccaactctcggagctcggaggacacgaagcaaatgatgagtagcttcatgctgtccatctctgccgtggtgatgtcctatctgcagaatcctcagcccatgacgcccccatggtgataccagcctagaagggtcacattttggaccctgtctatccactaggcctgggctttggctgctaaacctgctgccttcagctgccatcctggacttccctgaatgaggccgtctcggtgcccccagctggatagagggaacctggccctttcctagggaacaccctaggcttacccctcctgcctcccttcccctgcctgctgctgggggagatgctgtccatgtttctaggggtattcatttgctttctcgttgaaacctgttgttaataaagtttttcactctgaaaaaaaaagaaaaaaaaacacaaacttttgggcgcccgggcccgaaaaagatttaaacaatcggtgggcggccccgggatatgacacggcaaccgtgtccagagcaccggcgacaggtgggttcccaaaaagccgggacgcggtcacaccagggtcgggcttcgggctcaaggcagctaccccgccg

SEQ ID NO: 367945 - DNA, 1033 bp, Homo sapiens
ggaggcgggaggaggacccggaatgaagacgaaggcgctcaccattaaatcgtacggctcgcactgccccctgcccgcagtccagcgtcttcaaccgtttctgcggcagctctggaggccgcggctttggctcagggaaagccatgctcccaggactccttccttgcagccttaaatcggtctgtacggaaaattccgcgccttagaaacccacgcttgggtgtaaccttattattgttcttcctgacctacttcctgtttatcacttccgggttcatcattttggcatttcggtgatcgggttggaactattgaagcccgctttcaggttcttttccccattttccctttgaaaggaagacttctggcttctcctaaatctccgttctctgggtaaggggagtccaagcctctgtcatgaggaacggaaatgcgagggcctcgggtgttactctaaaatccgccctcagcttgcacgccggaagctgcgattcctgcagcggaagaggcgtgatctggccttcgactcgctatgtccactaacaatatgtcggacccacggaggccgaacaaagtgctgagctgaagtggtgtgcttgggtcgctgtctactgctccttcatcagctttgccaactctcggagctcggaggacacgaagcaaatgatgagtagcttcatgctgtccatctctgccgtggtgatgtcctatctgcagaatcctcagcccatgacgcccccatggtgataccagcctagaagggtcacattttggaccctgtctatccactaggcctgggctttggctgctaaacctgctgccttcagctgccatcctggacttccctgaatgaggccgtctcggtgcccccagctggatagagggaacctggccctttcctagggaacaccctaggcttacccctcctgcctcccttcccctgcctgctgctgggggagatgctgtccatgtttctaggggtattcatttgctttctcgttgaaacctgttgttaataaagtttttcactctg

SEQ ID NO: 367946 - DNA, 1202 bp, Homo sapiens
ggaggcgggaggaggacccggaatgaagacgaaggcgctcaccattaaatcgtacggctcgcactgccccctgcccgcagtccagcgtcttcaaccgtttctgcggcagctctggaggccgcggctttggctcagggaaagccatgctcccaggactccttccttgcagccttaaatcggtctgtacggaaaattccgcgccttagaaacccacgcttgggtgtaaccttattattgttcttcctgacctacttcctgtttatcacttccgggttcatcattttggcatttcggtgatcgggttggaactattgaagcccgctttcaggttcttttccccattttccctttgaaaggaagacttctggcttctcctaaatctccgttctctgggtaaggggagtccaagcctctgtcatgaggaacggaaatgcgagggcctcgggtgttactctaaaatccgccctcagcttgcacgccggaagctgcgattcctgcagcggaagaggcgtgatctggccttcgactcgctatgtccactaacaatatgtcggacccacggaggccgaacaaagtgctgaggtacaagcccccgccgagcgaatgtaacccggccttggacgacccgacgccggactacatgaacctgctgggcatgatcttcagcatgtgcggcctcatgcttaagctgaagtggtgtgcttgggtcgctgtctactgctccttcatcagctttgccaactctcggagctcggaggacacgaagcaaatgatgagtagcttcatgctgtccatctctgccgtggtgatgtcctatctgcagaatcctcagcccatgacgcccccatggtgataccagcctagaagggtcacattttggaccctgtctatccactaggcctgggctttggctgctaaacctgctgccttcagctgccatcctggacttccctgaatgaggccgtctcggtgcccccagctggatagagggaacctggccctttcctagggaacaccctaggcttacccctcctgcctcccttcccctgcctgctgctgggggagatgctgtccatgtttctaggggtattcatttgctttctcgttgaaacctgttgttaataaagtttttcactctgaaaaaaaaaaaaggccgcgttttcaacgtctgactggaaaccctgccgttcccaactaatcgg

SEQ ID NO: 367947 - DNA, 1639 bp, Homo sapiens
  misc_feature (1161)..(1161): n is a, c, g, or t
ggaggcgggaggaggacccggaatgaagacgaaggcgctcaccattaaatcgtacggctcgcactgccccctgcccgcagtccagcgtcttcaaccgtttctgcggcagctctggaggccgcggctttggctcagggaaagccatgctcccaggactccttccttgcagccttaaatcggtctgtacggaaaattccgcgccttagaaacccacgcttgggtgtaaccttattattgttcttcctgacctacttcctgtttatcacttccgggttcatcattttggcatttcggtgatcgggttggaactattgaagcccgctttcaggttcttttccccattttccctttgaaaggaagacttctggcttctcctaaatctccgttctctgggtaaggggagtccaagcctctgtcatgaggaacggaaatgcgagggcctcgggtgttactctaaaatccgccctcagcttgcacgccggaagctgcgattcctgcagcggaagaggcgtgatctggccttcgactcgctatgtccactaacaatatgtcggacccacggaggccgaacaaagtgctgaggtacaagcccccgccgagcgaatgtaacccggccttggacgacccgacgccggactacatgaacctgctgggcatgatcttcagcatgtgcggcctcatgcttaagctgaagtggtgtgcttgggtcgctgtctactgctccttcatcagctttgccaactctcggagctcggaggacacgaagcaaatgatgagtagcttcatgctgtccatctctgccgtggtgatgtcctatctgcagaatcctcagcccatgacgcccccatggtgataccagcctagaagggtcacattttggaccctgtctatccactaggcctgggctttggctgctaaacctgctgccttcagctgccatcctggacttccctgaatgaggccgtctcggtgcccccagctggatagagggaacctggccctttcctagggaacaccctaggcttacccctcctgcctcccttcccctgcctgctgctgggggagatgctgtccatgtttctaggggtattcatttgctttctcgttgaaacctgttgttaataaagtttttcactctgaaaaaaaaaacaaaacaacaanacaacaaaaaaaacactcatcaaaataaaaaaacaacaatactaatcaccaaaactcacaactaaccatcacatctactcatccctcaataagactgagccgctcgacctctacccacaccaaaacacaccaccccccactcaacctacctacccagactcacaccagacacccgccgacacccatcaacaacccacttcctcatccctacaccattctctcctctccccactcctacttacaacatctcaccaccatacctacactcctgcctcctcactctcccatcttgtagtacacattcaaacacaaacagtcacacaacacacaatacctccacaacaacacactaaaagacaaaaacaaactcccctcacccatccactaccattcacaaacacacgaaccttacccatgtcttattcatcctcacactcactacaacatctccacaccaacacagataccactaataact

SEQ ID NO: 367948 - DNA, 1233 bp, Homo sapiens
ggaggcgggaggaggacccggaatgaagacgaaggcgctcaccattaaatcgtacggctcgcactgccccctgcccgcagtccagcgtcttcaaccgtttctgcggcagctctggaggccgcggctttggctcagggaaagccatgctcccaggactccttccttgcagccttaaatcggtctgtacggaaaattccgcgccttagaaacccacgcttgggtgtaaccttattattgttcttcctgacctacttcctgtttatcacttccgggttcatcattttggcatttcggtgatcgggttggaactattgaagcccgctttcaggttcttttccccattttccctttgaaaggaagacttctggcttctcctaaatctccgttctctgggtaaggggagtccaagcctctgtcatgaggaacggaaatgcgagggcctcgggtgttactctaaaatccgccctcagcttgcacgccggaagctgcgattcctgcagcggaagaggcgtgatctggccttcgactcgctatgtccactaacaatatgtcggacccacggaggccgaacaaagtgctgaggtacaagcccccgccgagcgaatgtaacccggccttggacgacccgacgccggactacatgaacctgctgggcatgatcttcagcatgtgcggcctcatgcttaagctgaagtggtgtgcttgggtcgctgtctactgctccttcatcagctttgccaactctcggagctcggaggacacgaagcaaatgatgagtagcttcatgtgagacttgccctacagaacaagtgactcttgagtaaggggtggggggaccccagcctggccatcctagactgacacctctctcctgtctcaggctgtccatctctgccgtggtgatgtcctatctgcagaatcctcagcccatgacgcccccatggtgataccagcctagaagggtcacattttggaccctgtctatccactaggcctgggctttggctgctaaacctgctgccttcagctgccatcctggacttccctgaatgaggccgtctcggtgcccccagctggatagagggaacctggccctttcctagggaacaccctaggcttacccctcctgcctcccttcccctgcctgctgctgggggagatgctgtccatgtttctaggggtattcatttgctttctcgttgaaacctgttgttaataaagtttttcactctg

SEQ ID NO: 367949 - DNA, 636 bp, Homo sapiens
tagaggaatgagtgtccaggcagagttcagaaggtaggaatgtccctcttgatagggctgaatcaagggattcctggctttagaaagggtctgctatctttgcaaaaatgtgcaagtatctgtagccagtgtaatgaaatcacttccaaatccagcctgttacctgacttttgtcattgttttcccaaaaatttgaggtatcattgaaacaggtcattttaaacaaatctattacggattctcagggttggaaataattcgatgattgcttagtcctcccccacccctagaacaccccagcacatctgaagatgagcgcctctccctgggtacctgcaagtgatcaccttggcctgcttgcataccttggctgataggaagcgcgccatccccaaggcagctcctgctgtggttggacagtgctgactgttagacagttcttccctatattgagccaaaatctgtcctgccacttgctggatcttggttgcagaccttcccattcacccagttatatatctttgctttcaaaatagtcaccttgagagaccagacatttttctgaaaacatcattactcagaattcagattcccctctgggatctgtcttcagaatcaaagttagctcttttctat

SEQ ID NO: 367950 - DNA, 290 bp, Homo sapiens
gcgtaattcaggaaagaactgtctaacagtcagcactgtccatccccaaggcagctcctgctgtggttggacagtgctgactgttagacagttcttccctatattgagccaaaatctgtcctgccacttgctggatcttggttgcagaccttcccattcacccagttatatatctttgctttcaaaatagtcaccttgagagaccagacatttttctgaaaacatcattactcagaattcagattcccctctgggatctgtcttcagaatcaaagttagctcttttctat

SEQ ID NO: 367951 - DNA, 643 bp, Homo sapiens
atacagacaactctgccacaagcccagccttcttaggaatttgtgtttatctcagtggtttctggttttctcttgtgtgtgagggctggaacacctcttatgaatggtccacggctttcactccttccattgataatgtttgctgcgaatgttttggtgaaatctttcaagaaccatggccatcccccttcttttaaagccaaaacagcaccagtgcctggcacgggttatgcagacggttggcatcatcccctgctaggatttactattatttggaaattaatgatggcttcgtcttttcaggagtggggaggggagctgtgattgacgaaacctctctttgaccatctgtttctttccttcaaggcactgcttttcacagccttaaaatttgagagaaattatgctaagtgatcacaaattttctttaaagttttacttcaaaggaaaacaaaagaaagcctttcaaaaagacgactagctctttttctggaggtcaatataccacagattataagccagaaaaaaaaaaaaaaggtaaaatgagatttttgcttggatttgtttttaattaagacctaaatcatgattctcttagaatggaatagaaagtgacagtagctctgagacctacttgatcaat

SEQ ID NO: 367952 - DNA, 439 bp, Homo sapiens
gcattgttttcgtcgttatctgtagaactgtcagtgagagactgacaaagacattgacacctgactgtaggctttattccaataatgttcagccaagtagggccccactagctgaaatcatgagaattaatgcatctctctggtgataggtctaacacaatttaggcttttttaaaacatgtcagttttatgtggtattactgaatttgcctcccagtgccctggtgcgaagattcttagctagaaggacaattggagtttacatttgaagatcaaattaccatttaactcttaggcaataatccattgtacttttgtcctgagttaaaattacagtgcttcagcagttataagctgtcctattttctctgcttttaaacacaagctttgtaacttaaaatatctgtttgtccttttgatcaaaatcatcacatatctc

SEQ ID NO: 367953 - DNA, 257 bp, Homo sapiens
aaaaatgttgacattttgatgcaaagtaagattcaatatgcttaatatgttaatattttaatgtaccaattctgatatctacaatattattttataggacaaccacacacttgtaagtaaagcttttatagaaagaaatgatttctgaatttcatcatcatatcaatcatcagcactgaccggctcagactaagtttcagcattaatgtagaaaacatagcatttgtacccatggtgcaagccgtgaggcctctgcc

SEQ ID NO: 367954 - DNA, 293 bp, Homo sapiens
ctttgaaatagaaatggagattttaacagatgaccacttacaatcaatttggtgacagagacattaactttgaactcccaattaagaaaaatgtcctctctccaaaacctgactcatagtgtaaaaaatgcactttgttggccaggcacggcggctcatgcttgtaatcccagcactttgggaggctgaggcgggcagatcatgaggtcaggagttcaagaccaacctggccaacaaggtgaaaccctatctctaatatgaatacaaaaattagccggtcctggtggcgtgtg

SEQ ID NO: 367955 - DNA, 376 bp, Homo sapiens
gtctgtaatttagctactagggaggctgaggcaggagaattgcttgaacccaggaggtggaagttgcagtgagccaggatcacgtcaccgcactccagcctgagcgacagagtgagactctgtctccaaaaacaacaacaacaacaacaacaacaaaacaaaaagaaattacgatacaatatggaagtattaaagagattacaatatgatgaagtaccaaatgagtggttctgagaagaaaaactgagcatgggctggtgttgtcaggaagacttcattgcagaagaagggcttgagctgggtcagttcataagcactttttatattcatttccaaatattttattattatatttataagcatgtgaaaaacatta

SEQ ID NO: 367956 - DNA, 527 bp, Homo sapiens
attttatctgagaccctgactctaaccctgtgccatggaaaaacaaacaaacaaacaaaaaactagcatggtgagagggggcagggttgaagacacagtaacatgtggctctcagaaggtggcatccccttctgcagtggcagtgtcacccctcccagcccggcccaggggcctggtgcacccaaagaggagcccgacattttctcagccagaatgaatcacaggcacattctgctgcggttctgagaggcatctggccagtgttatagacttttcatgtgtcctgttggttgtgatcctcacagcagcccttggagatgggctgaacatgagagacaaggaacaagagtacaaggagataagaagctcaaaaaacaacaaacaaaacccaaagctagcagaaggaaaggaacagtaatgattagagcagagataaacaaaaagagaattttaaacaacagagaaaatcagttaaaccaagagttggctgtttgagaagactaacaaaattgacagacctttaactt

SEQ ID NO: 367957 - DNA, 478 bp, Homo sapiens
gccattatgtggaatatttgtgagtaaactagtttttaccgtgaaattgtagaaagtactaaatcagaacttttgcttttttccatttgtgagcttgagccactcatttcatctcttttgtcctcttgttcttgatctataaaatcagaagattggatcaggttatctcttagagttccttgaaactccaaatgttcttatttttttacgtaggaattactggattgaataatggggttagaactgtgtgtatatatgtatatatctttgaaaactgggggtaaatcttttttcttttttgtttttggttttggtaaatttattattataagaacttagatcaggcggagtgcggtggctcacgcctgtaatcccgacactttgggaggccgaggtgggtggatcacctgaggtcggagcttgagaccagcctgaggaacatgaagaaaccctgtctctactaaaaatacaaatttag

SEQ ID NO: 367958 - DNA, 468 bp, Homo sapiens
ctaatgttttgtatttttagcagagacggggttactccgtgttagccaggatggtctcgatctcctgacctcgtgatccacctgccttggcctcccaaagtgctgggattctgtaatcccagtgagccaccgcgcctggcccatcagatgcttcaggtgactacagccagctccagaggttccaaagatcttaaagatgtcccagaaaagttctagagtactatcagatctcacactttgccttggaagctgtcattcccctccattggccccacaactgcagtataatcttcagtgacaggagaaaatcgaccttgtttgtacagaagtctcagcaggaataggcagatgcctgtttttgctgccaaggatggaggattggaatgggcccattatatattttgaggctttgaagaaaagtctcaggatatgttttcccattaaaatactgttataaacaattagatt

SEQ ID NO: 367959 - DNA, 595 bp, Homo sapiens
tgtgtgagacatggttctaaggaaacaataatgaataaaacaaagttcctgcctttatggagctcggcttttagcaggaagactaaagagaaccaatggtttcaactgggcgtacttttgcaccccatccttggaacatttggcaatgtctggagacattttttatcatggactagggaagaaggagaggagggagattctattggcatctaatctgcagaggccagagatgctgctgaccatctctacaatgcacaagacaggtccccacaactatgaattatctatccaaaccaaaatatcagtagtgggctaggtgtggtggctcacacctgcaatcccagcactttgggaggcggaggaaggcagattgcttgagcccaggagttcaagaccagcctgaacaatatggccaaatcctgtctttacaaaaaaatttaaaaaattagccaggtgtggtagcacatgcttgtagtcccaactactcgggatgctaaggcggaaggatagcatgagcctggaaggtagacgctacagtgagctgtgatcacaccaccactgcactctagcctgggtgacggtgagaccctgtctc

SEQ ID NO: 367960 - DNA, 461 bp, Homo sapiens
tattaaaagataattcactatttaaagataacaacttttcatgatgcttataacattatgaccacaatagcacaaaagatggaagggtaaatagaagcatgttgttgtaagatcttatacaagaagtggtgtaatattgtctgaatgtaggctgtggtagggtaaatatgcatatgcaaaacaagaagcaacagaacaaaacatgtccaaataagtgcagtaaaaaacctcaaataacaggaggtaaaatggaatactgaaaaagcaatcaaataattcaaaagaagtcaggaaaaagaaaaaaaggaacaatgaagaacaacaacaaaaaaagaaaaaatggaggctgggcaccagtggctcacacctgtaatcccagcactatgggaggctgaggtgggtggatcacctgaagtcaggagttcaagaccagtctggccaacatggtgaaaccccatctc

SEQ ID NO: 367961 - DNA, 2643 bp, Homo sapiens
  misc_feature (1)..(1): n is a, c, g, or t
  misc_feature (601)..(601): n is a, c, g, or t
  misc_feature (638)..(638): n is a, c, g, or t
naaaagacggaggagatccagttcgggctgacagtgagaggatgcagcccggtgtctgggcgggctcttaccggcgaagcggatcttcacgaggtcgagcggatgcagcgcaaggttggataagacgccgccgctcacgcccgctatcaggttctcataccggacgtggcggaataccgtgctccacgccgacgacccggacgccgactggccctggcccgtcataggctcggggcccgtcgacaccacggcgcccagggccgcggaggtgggacgcgatgcagtggccgccaccgtggcgacggtcgccccttgtgagcgcaaccccacctccgggaccaacgagaggactcttatgcccaaggcgcgtgagcgaagccggagactctagtactgagggggcaagaacggggcacagacactacgtcacgccggcggaaagcgcgatggaggggaggtcccagcctctcccgagtctccgccctgcctcgcccacaaatgctccagcccacggacgcggaagcgactgcacagctaaagaaccgccccttgctaacgtttgccggcaaaactacggagcggcgcaggatccagttgagcnagcaggccgccgctccgcgagtcacgtgactggaagnagtctgggaaaagcggaagtcgcctgtgggaggaggtggcggtgggcggaactcctagcggacacctcgtggagtccggccggaagagcaaccgagatgaaggtgaagatgctgagccggaatccggacaattatgtccgcgaaaccaagttggacttacagagagttccaagaaactatgatcctgctttacatccttttgaggtcccacgagaatatataagagctttaaatgctaccaaactggaacgagtatttgcaaaaccattccttgcttcgctggatggtcaccgtgatggagtcaattgcttggcaaagcatccagagaagctggctactgtcctttctggggcgtgtgatggagaggttagaatttggaatctaactcagcggaattgtatccgtacaatacaagcacatgaaggctttgtacgaggaatatgtactcgcttttgtgggacttcttttttcactgttggtgatgacaaaactgtgaagcagtggaaaatggatgggccaggctatggagacgaggaagagccattacatacaatattaggaaagacagtgtatactgggattgatcatcactggaaagaagctgtttttgccacatgtggacagcaagtagacatttgggatgaacaaagaactaatcctatatgttcaatgacctggggatttgacagtataagtagtgttaaatttaacccaattgagacatttctcttgggaagttgtgcatctgacaggaatatagtactgtacgatatgaggcaagctactcctttgaaaaaggttatcttagatatgagaacaaatacaatctgttggaaccctatggaagctttcatttttacagcagcaaatgaagattataacttatatacttttgatatgcgtgcactggacactcctgtaatggtccatatggatcatgtatctgcagtgcttgatgtggattactctcccactgggaaggagtttgtgtctgctagtttcgataaatctattcgaatctttcctgtagacaaaagtcgaagcagggaggtatatcatacaaagagaatgcaacatgttatctgtgtaaaatggacttctgacagcaagtatattatgtgtggatctgatgaaatgaacattcgcctgtggaaagctaatgcttctgaaaaattgggtgtgcttacatcacgagaaaaagcagccaaggattataaccagaaattgaaggagaaatttcagcattatcctcatataaaacgtatagctcgtcatcgacatctaccaaaatctatctatagccagattcaggaacagcgcatcatgaaagaagctcgtcgacgaaaggaagtgaatcgtattaaacacagcaagcctggatctgtgccacttgtgtcagagaagaagaaacacgtagtggcagttgtaaaataattggtattcctaacaatcctgatgtataattatttgttacttttgatttgagaactctacaaataaaagtgctgggactagattaattgcaaacattttagttatatgtgtagagctttattgttactccttttagctaccctgaaaaatgatccttaaaggtggcctagttggtaagactgttttatccttaatctgcattcttctttcattgtagaatacagtatttgcaactcattttttcttgtttttattacagatatacttactttctctttgatctattattgtagacactatacattcaaattgacatttaagaccaaacatctcttatgttatctttaatattactttgaataatgattgcaatgatgtttcttcctgtgattccacataacatttagaataatgatgtcaattttttacaactgaatttatttctagtgctttacttatatttggctttttgactcttttaaaacaatcagcctgcatttatataacttttataaataataatataatttgggtcaagttaagatattaaaagttcctttcagcattgaaa

SEQ ID NO: 367962 - DNA, 1002 bp, Homo sapiens
attcagtgcttgcagagctagtgttactaatataaccttgtaaagtgcagaattacattggcaattttggttgcatatcataaaagattaggttagggggaaaagggtgctttctagcttttttatactgaagcaaaacaacacactattcattaagataccaaaatgtgtattttcagcttacatcacgagaaaaagcagccaaggattataaccagaaattgaaggagaaatttcagcattatcctcatataaaacgtatagctcgtcatcgacatctaccaaaatctatctatagccagattcaggaacagcgcatcatgaaagaagctcgtcgacgaaaggaagtgaatcgtattaaacacagcaagcctggatctgtgccacttgtgtcagagaagaagaaacacgtagtggcagttgtaaaataattggtattcctaacaatcctgatgtataattatttgttacttttgatttgagaactctacaaataaaagtgctgggactagattaattgcaaacattttagttatatgtgtagagctttattgttactccttttagctaccctgaaaaatgatccttaaaggtggcctagttggtaagactgttttatccttaatctgcattcttctttcattgtagaatacagtatttgcaactcattttttcttgtttttattacagatatacttactttctctttgatctattattgtagacactatacattcaaattgacatttaagaccaaacatctcttatgttatctttaatattactttgaataatgattgcaatgatgtttcttcctgtgattccacataacatttagaataatgatgtcaattttttacaactgaatttatttctagtgctttacttatatttggctttttgactcttttaaaacaatcagcctgcatttatataacttttataaataataatataatttgggtcaagttaagatattaaaagttcctttcagcattgaaa

SEQ ID NO: 367963 - DNA, 5887 bp, Homo sapiens
  misc_feature (1)..(1): n is a, c, g, or t
  misc_feature (601)..(601): n is a, c, g, or t
  misc_feature (638)..(638): n is a, c, g, or t
  misc_feature (1473)..(1473): n is a, c, g, or t
  misc_feature (1750)..(1750): n is a, c, g, or t
  misc_feature (1841)..(1841): n is a, c, g, or t
  misc_feature (1848)..(1848): n is a, c, g, or t
  misc_feature (1926)..(1926): n is a, c, g, or t
  misc_feature (2813)..(2813): n is a, c, g, or t
naaaagacggaggagatccagttcgggctgacagtgagaggatgcagcccggtgtctgggcgggctcttaccggcgaagcggatcttcacgaggtcgagcggatgcagcgcaaggttggataagacgccgccgctcacgcccgctatcaggttctcataccggacgtggcggaataccgtgctccacgccgacgacccggacgccgactggccctggcccgtcataggctcggggcccgtcgacaccacggcgcccagggccgcggaggtgggacgcgatgcagtggccgccaccgtggcgacggtcgccccttgtgagcgcaaccccacctccgggaccaacgagaggactcttatgcccaaggcgcgtgagcgaagccggagactctagtactgagggggcaagaacggggcacagacactacgtcacgccggcggaaagcgcgatggaggggaggtcccagcctctcccgagtctccgccctgcctcgcccacaaatgctccagcccacggacgcggaagcgactgcacagctaaagaaccgccccttgctaacgtttgccggcaaaactacggagcggcgcaggatccagttgagcnagcaggccgccgctccgcgagtcacgtgactggaagnagtctgggaaaagcggaagtcgcctgtgggaggaggtggcggtgggcggaactcctagcggacacctcgtggagtccggccggaagagcaaccgagatgaaggtgaagatgctgagccggaatccggacaattatgtccgcgaaaccaagttggacttacagagagttccaagaaactatgatcctgctttacatccttttgaggtcccacgagaatatataagagctttaaatgctaccaaactggaacgagtatttgcaaaaccattccttgcttcgctggatggtcaccgtgatggagtcaattgcttggcaaagcatccagagaagctggctactgtcctttctggggcgtgtgatggagaggttggtgatgacaaaactgtgaagcagtggaaaatggatgggccaggctatggagacgaggaagagccattacatacaatattaggaaagacagtgtatactgggattgatcatcactggaaagaagctgtttttgccacatgtggacagcaagtagacatttgggatgaacaaagaactaatcctatatgttcaatgacctggggatttgacagtataagtagtgttaaatttaacccaattgaggtaatgtttttttttaagtatgttttacttattatggcttaataatttcagttctgtttagaaaacttttgaatgtatgatagaaacttctgaattttaatggtgttttggcattttgtcagttttcccgattgtaaatgagttctgatacctttgctcaaatcccaacatgtttcccagcagtttagtcccagatactagagttaagcattgttagaggagnggtgtgtgcatttgcccattggggtaaaatccaagtaaatatagtcttgttttaactttagttttactcatgccttcaacttcatgttccatagattatgtcattgtacatttaggaaaatgttaatttttctacctgccttggaggtcagaagaaggagcattggacatcattttgtctatttgtaattggtaaggtaccaatgcttcataaaaacatttgtgattattgttgaactgcatggtaattagttatagttatatttttctttgctcanaagtctgaattgtgattcccagttcctccaggcctaagggaagagttggagattggccactacatgtcgtctgtttaggtctgaatttagnaatggangctgtcctgaaggctaagctagcccttggactccagatctttctctgaactttttcttaatgcataacaatagatganctgattgtccagaagactcagtagggatatgtttttcctgttgaaagaaaaggcaatcatagcatatataagccaattttagcagttattgcgaggctaccattttaggtagtatgagagaaaaatcctaatatgcaagtgttatgctcttaaagacccaacctgataaaagataggaagtaaggttgagtcaaaatagtaaggtataaaaatagtttgtatgatatactggaaaatgagatgctgcagtgcgatgtgagcttggccttgaggaattactgagaagtcagaggacactcttcctgcaactaccacatgctcacacacacactttctagagacgctacaggtctagaataggttggcaaactagtctgtgagccacatgtggcccactgcctgtttttgtaaatagagctctgctagaagacagccatgttctcttgcgtacatattgtctgtagctgctttcgtgctatgatggcagagttaagtaattgccacagagaccatatggcccacaaaacctaaaatacttactctctggccctttacagaaaaagttttctgattcctggtctggagtgtctgtctctattatatctttctcactccatcctccatcttccttccttatgtttcccttggttgtagaagagagaagtggcatggaaaggcagctacctttgcagagcaggaccaagtgtaaaagttgataacatatgtgaacattttttaaaagtgctatccaaattcaagatggtgacggtattacgtactaaaaaaaaaacacaaaaaaacctaaacagacactggttcttactatttagaggaacaaaaaaatcttttgcttctctgctttggtgaacatctgtgtcagaagagcngatcaccaattctaaaatcgtaattattagggatgacctagtgaccatgtttttcaaacttgcctgtatagcagctgtatttgttcagctgtttttttttttaattgctattaaccttatgaacttagtggtaaaagtaaatggtgtgtgtgtctcttatcctgttttaaacttaatggaaagggcatgttgctgtgaacaaatggagtgtatttgtatttgtctcctctaatcattaataattaattttctcttaaaatattgaagcctagaattctggtaaagccaaaagtttatgctgatcattgggacgttttacagtgtgaaaggtggcatttggtctaggtagattgttttgctttgttcagatcaaagtctttctttttagaaatggaacctggtcagaccctgaggcgacataatgagaagccaagaaaggttgagggacctcactagggaagtctcagaaaagcagccattaagatagcaggctttcagaaagaactgagaggaaatcatgatcataacattagctttatgatgtgttatttgaattgcgtacagacagtaggaggagttagctggccatgcaactatttagtaaatagctcttcttgctgcccacatacttgcaataggaagtaattgtaggcagaagccaatagttgtgagtgtcaggaaccatgagtgaggaggaatgatgctacagagagagggtttcagggatccactggatgatagagggcttatttttacttaatgccaaggggttatgtgagtaccatgcacatttataattgacttacaaataaaataattagaaaaatcttcaaacagttggacaaaagacaggcctaatttatagagagttaacacgaagaaacatttactaataaaacaataaatttatatagctaggaaatactgtcatacagatattttaaatgacacttttaaatgacactacccagtgctgcccagttgcattaaaatggacatatcccacattgtagtgtatactggtacagctctttggaaaaataattagccctaaatatcaaaagccataaaattgttcataccttttgattcagtaatgtcatttgtgaaattttatcctaaggaaataattcaaaagaagaactacgtgggggggaaatgtttattgaagtattacttataatagtaaaaaacaggaaacaagtcttaagttgaagagtaggtaagtaaaatatgttttattacaaattagaacacagtaatatctgtacattaaaatacatgcatgggggccaggtgcggtggctcatgcctgtaatcccagcactttgggaggctgaggcaggtggctcacctgaggtcaggagtttgataccagcctgggcaacatggtgaaaccctgtctcttctaaaaatacaaaatattagcccggtgtggtggcgcacccctgtaatcccagctcctccacaggctgaggcatgagaattgcttgaacctgggaggtagaggttgcagtgagccaagattgcaccactgcactccagcctgggtgacagagcaagactctgtctctaaataaataaataaataaaatacaagcatgaggattttacagtgaaaatacttggtttaagttgctgagattatggatgatttattgtaccctcttaaaatggactttgttttttaacataaatattaagggcaattaaatcatttgtttactgaatggatgtggtttgctgccaggtctggctttgaactggtgattgttatacttgtttttagacatttctcttgggaagttgtgcatctgacaggaatatagtactgtacgatatgaggcaagctactcctttgaaaaaggttatcttagatatgagaacaaatacaatctgttggaaccctatggaagctttcatttttacagcagcaaatgaagattataacttatatacttttgatatgcgtgcactggacactcctgtaatggtccatatggatcatgtatctgcagtgcttgatgtggattactctcccactgggaaggagtttgtgtctgctagtttcgataaatctattcgaatctttcctgtagacaaaagtcgaagcagggaggtatatcatacaaagagaatgcaacatgttatctgtgtaaaatggacttctgacagcaagtatattatgtgtggatctgatgaaatgaacattcgcctgtggaaagctaatgcttctgaaaaattgggtgtgcttacatcacgagaaaaagcagccaaggattataaccagaaattgaaggagaaatttcagcattatcctcatataaaacgtatagctcgtcatcgacatctaccaaaatctatctatagccagattcaggaacagcgcatcatgaaagaagctcgtcgacgaaaggaagtgaatcgtattaaacacagcaagcctggatctgtgccacttgtgtcagagaagaagaaacacgtagtggcagttgtaaaataattggtattcctaacaatcctgatgtataattatttgttacttttgatttgagaactctacaaataaaagtgctgggactagattaattgcaaacattttagttatatgtgtagagctttattgttactccttttagctaccctgaaaaatgatccttaaaggtggcctagttggtaagactgttttatccttaatctgcattcttctttcattgtagaatacagtatttgcaactcattttttcttgtttttattacagatatacttactttctctttgatctattattgtagacactatacattcaaattgacatttaagaccaaacatctcttatgttatctttaatattactttgaataatgattgcaatgatgtttcttcctgtgattccacataacatttagaataatgatgtcaattttttacaactgaatttatttctagtgctttacttatatttggctttttgactcttttaaaacaatcagcctgcatttatataacttttataaataataatataatttgggtcaagttaagatattaaaagttcctttcagcattgaaa

SEQ ID NO: 367964 - DNA, 1428 bp, Homo sapiens
aaggattttaacttggagttggcaattaaaacacggatcatatctgatggcctaaaatactctttagctactggaaactggggtgatcaaaagaaagctcatcaagccagagctggagtatctcaggtgttaaaccgcctgacttttgcgtctactctttctcacctgcgtcgtttaaattctcctattggtagagacggcaagctactcctttgaaaaaggttatcttagatatgagaacaaatacaatctgttggaaccctatggaagctttcatttttacagcagcaaatgaagattataacttatatacttttgatatgcgtgcactggacactcctgtaatggtccatatggatcatgtatctgcagtgcttgatgtggattactctcccactgggaaggagtttgtgtctgctagtttcgataaatctattcgaatctttcctgtagacaaaagtcgaagcagggaggtatatcatacaaagagaatgcaacatgttatctgtgtaaaatggacttctgacagcaagtatattatgtgtggatctgatgaaatgaacattcgcctgtggaaagctaatgcttctgaaaaattgggtgtgcttacatcacgagaaaaagcagccaaggattataaccagaaattgaaggagaaatttcagcattatcctcatataaaacgtatagctcgtcatcgacatctaccaaaatctatctatagccagattcaggaacagcgcatcatgaaagaagctcgtcgacgaaaggaagtgaatcgtattaaacacagcaagcctggatctgtgccacttgtgtcagagaagaagaaacacgtagtggcagttgtaaaataattggtattcctaacaatcctgatgtataattatttgttacttttgatttgagaactctacaaataaaagtgctgggactagattaattgcaaacattttagttatatgtgtagagctttattgttactccttttagctaccctgaaaaatgatccttaaaggtggcctagttggtaagactgttttatccttaatctgcattcttctttcattgtagaatacagtatttgcaactcattttttcttgtttttattacagatatacttactttctctttgatctattattgtagacactatacattcaaattgacatttaagaccaaacatctcttatgttatctttaatattactttgaataatgattgcaatgatgtttcttcctgtgattccacataacatttagaataatgatgtcaattttttacaactgaatttatttctagtgctttacttatatttggctttttgactcttttaaaacaatcagcctgcatttatataacttttataaataataatataatttgggtcaagttaagatattaaaagttcctttcagcattgaaa

SEQ ID NO: 367965 - DNA, 5438 bp, Homo sapiens
  misc_feature (1)..(1): n is a, c, g, or t
  misc_feature (601)..(601): n is a, c, g, or t
  misc_feature (638)..(638): n is a, c, g, or t
  misc_feature (1473)..(1473): n is a, c, g, or t
  misc_feature (1750)..(1750): n is a, c, g, or t
  misc_feature (1841)..(1841): n is a, c, g, or t
  misc_feature (1848)..(1848): n is a, c, g, or t
  misc_feature (1926)..(1926): n is a, c, g, or t
  misc_feature (2813)..(2813): n is a, c, g, or t
naaaagacggaggagatccagttcgggctgacagtgagaggatgcagcccggtgtctgggcgggctcttaccggcgaagcggatcttcacgaggtcgagcggatgcagcgcaaggttggataagacgccgccgctcacgcccgctatcaggttctcataccggacgtggcggaataccgtgctccacgccgacgacccggacgccgactggccctggcccgtcataggctcggggcccgtcgacaccacggcgcccagggccgcggaggtgggacgcgatgcagtggccgccaccgtggcgacggtcgccccttgtgagcgcaaccccacctccgggaccaacgagaggactcttatgcccaaggcgcgtgagcgaagccggagactctagtactgagggggcaagaacggggcacagacactacgtcacgccggcggaaagcgcgatggaggggaggtcccagcctctcccgagtctccgccctgcctcgcccacaaatgctccagcccacggacgcggaagcgactgcacagctaaagaaccgccccttgctaacgtttgccggcaaaactacggagcggcgcaggatccagttgagcnagcaggccgccgctccgcgagtcacgtgactggaagnagtctgggaaaagcggaagtcgcctgtgggaggaggtggcggtgggcggaactcctagcggacacctcgtggagtccggccggaagagcaaccgagatgaaggtgaagatgctgagccggaatccggacaattatgtccgcgaaaccaagttggacttacagagagttccaagaaactatgatcctgctttacatccttttgaggtcccacgagaatatataagagctttaaatgctaccaaactggaacgagtatttgcaaaaccattccttgcttcgctggatggtcaccgtgatggagtcaattgcttggcaaagcatccagagaagctggctactgtcctttctggggcgtgtgatggagaggttggtgatgacaaaactgtgaagcagtggaaaatggatgggccaggctatggagacgaggaagagccattacatacaatattaggaaagacagtgtatactgggattgatcatcactggaaagaagctgtttttgccacatgtggacagcaagtagacatttgggatgaacaaagaactaatcctatatgttcaatgacctggggatttgacagtataagtagtgttaaatttaacccaattgaggtaatgtttttttttaagtatgttttacttattatggcttaataatttcagttctgtttagaaaacttttgaatgtatgatagaaacttctgaattttaatggtgttttggcattttgtcagttttcccgattgtaaatgagttctgatacctttgctcaaatcccaacatgtttcccagcagtttagtcccagatactagagttaagcattgttagaggagnggtgtgtgcatttgcccattggggtaaaatccaagtaaatatagtcttgttttaactttagttttactcatgccttcaacttcatgttccatagattatgtcattgtacatttaggaaaatgttaatttttctacctgccttggaggtcagaagaaggagcattggacatcattttgtctatttgtaattggtaaggtaccaatgcttcataaaaacatttgtgattattgttgaactgcatggtaattagttatagttatatttttctttgctcanaagtctgaattgtgattcccagttcctccaggcctaagggaagagttggagattggccactacatgtcgtctgtttaggtctgaatttagnaatggangctgtcctgaaggctaagctagcccttggactccagatctttctctgaactttttcttaatgcataacaatagatganctgattgtccagaagactcagtagggatatgtttttcctgttgaaagaaaaggcaatcatagcatatataagccaattttagcagttattgcgaggctaccattttaggtagtatgagagaaaaatcctaatatgcaagtgttatgctcttaaagacccaacctgataaaagataggaagtaaggttgagtcaaaatagtaaggtataaaaatagtttgtatgatatactggaaaatgagatgctgcagtgcgatgtgagcttggccttgaggaattactgagaagtcagaggacactcttcctgcaactaccacatgctcacacacacactttctagagacgctacaggtctagaataggttggcaaactagtctgtgagccacatgtggcccactgcctgtttttgtaaatagagctctgctagaagacagccatgttctcttgcgtacatattgtctgtagctgctttcgtgctatgatggcagagttaagtaattgccacagagaccatatggcccacaaaacctaaaatacttactctctggccctttacagaaaaagttttctgattcctggtctggagtgtctgtctctattatatctttctcactccatcctccatcttccttccttatgtttcccttggttgtagaagagagaagtggcatggaaaggcagctacctttgcagagcaggaccaagtgtaaaagttgataacatatgtgaacattttttaaaagtgctatccaaattcaagatggtgacggtattacgtactaaaaaaaaaacacaaaaaaacctaaacagacactggttcttactatttagaggaacaaaaaaatcttttgcttctctgctttggtgaacatctgtgtcagaagagcngatcaccaattctaaaatcgtaattattagggatgacctagtgaccatgtttttcaaacttgcctgtatagcagctgtatttgttcagctgtttttttttttaattgctattaaccttatgaacttagtggtaaaagtaaatggtgtgtgtgtctcttatcctgttttaaacttaatggaaagggcatgttgctgtgaacaaatggagtgtatttgtatttgtctcctctaatcattaataattaattttctcttaaaatattgaagcctagaattctggtaaagccaaaagtttatgctgatcattgggacgttttacagtgtgaaaggtggcatttggtctaggtagattgttttgctttgttcagatcaaagtctttctttttagaaatggaacctggtcagaccctgaggcgacataatgagaagccaagaaaggttgagggacctcactagggaagtctcagaaaagcagccattaagatagcaggctttcagaaagaactgagaggaaatcatgatcataacattagctttatgatgtgttatttgaattgcgtacagacagtaggaggagttagctggccatgcaactatttagtaaatagctcttcttgctgcccacatacttgcaataggaagtaattgtaggcagaagccaatagttgtgagtgtcaggaaccatgagtgaggaggaatgatgctacagagagagggtttcagggatccactggatgatagagggcttatttttacttaatgccaaggggttatgtgagtaccatgcacatttataattgacttacaaataaaataattagaaaaatcttcaaacagttggacaaaagacaggcctaatttatagagagttaacacgaagaaacatttactaataaaacaataaatttatatagctaggaaatactgtcatacagatattttaaatgacacttttaaatgacactacccagtgctgcccagttgcattaaaatggacatatcccacattgtagtgtatactggtacagctctttggaaaaataattagccctaaatatcaaaagccataaaattgttcataccttttgattcagtaatgtcatttgtgaaattttatcctaaggaaataattcaaaagaagaactacgtgggggggaaatgtttattgaagtattacttataatagtaaaaaacaggaaacaagtcttaagttgaagagtaggtaagtaaaatatgttttattacaaattagaacacagtaatatctgtacattaaaatacatgcatgggggccaggtgcggtggctcatgcctgtaatcccagcactttgggaggctgaggcaggtggctcacctgaggtcaggagtttgataccagcctgggcaacatggtgaaaccctgtctcttctaaaaatacaaaatattagcccggtgtggtggcgcacccctgtaatcccagctcctccacaggctgaggcatgagaattgcttgaacctgggaggtagaggttgcagtgagccaagattgcaccactgcactccagcctgggtgacagagcaagactctgtctctaaataaataaataaataaaatacaagcatgaggattttacagtgaaaatacttggtttaagttgctgagattatggatgatttattgtaccctcttaaaatggactttgttttttaacataaatattaagggcaattaaatcatttgtttactgaatggatgtggtttgctgccaggtctggctttgaactggtgattgttatacttgtttttagacatttctcttgggaagttgtgcatctgacaggaatatagtactgtacgatatgaggcaagctactcctttgaaaaaggttatcttagatatgagaacaaatacaatctgttggaaccctatggaagctttcatttttacagcagcaaatgaagattataacttatatacttttgatatgcgtgcactggacactcctgtaatggtccatatggatcatgtatctgcagtgcttgatgtggattactctcccactgggaaggagtttgtgtctgctagtttcgataaatctattcgaatctttcctgtagacaaaagtcgaagcagggaggtatatcatacaaagagaatgcaacatgttatctgtgtaaaatggacttctgacagcaagtatattatgtgtggatctgatgaaatgaacattcgcctgtggaaagctaatgcttctgaaaaattgggtgtgcttacatcacgagaaaaagcagccaaggattataaccagaaattgaaggagaaatttcagcattatcctcatataaaacgtatagctcgtcatcgacatctaccaaaatctatctatagccagattcaggaacagcgcatcatgaaagaagctcgtcgacgaaaggaagtgaatcgtattaaacacagcaagcctggatctgtgccacttgtgtcagagaagaagaaacacgtagtggcagttgtaaaataattggtattcctaacaatcctgatgtataattatttgttacttttgatttgagaactctacaaataaaagtgctggaaaaaaaagtcgacgcggccgcgaatttagtaatagtagtcgacccg

SEQ ID NO: 367966 - DNA, 1685 bp, Homo sapiens
gcagagtctcactctgtcacccacgctggagtacagtggcacaatcttggctcactacaatctctgcctcccaggttcaagtgattctcctgcctcagcctccctagtaactgggattacaggtgtgtgccaccacgcccaactaacttttgtaattttagtagagacaaggtttcaccatgttgggcaggctggtctaattaattaagctttttaaacaatttaaccaaaacaaaattctggcattagattcagcatatcaggaggtactctttgaagaccattgcatttctttctttttcagtaaaatgaaggggaaaaaaagtgtgttgacctgaattgatttgatatggggaagaggccttttaagatcaagtcctttctttttgttacaaagttaccttggttgaacatcatattttatttgcattttatgcttttagttattctgtgaacttttctgtacatctggttttgcttagtttgttcatatttatttctcttactagatagtaagttctctgagagcagaaatttgtttactaccccagcacttaacacggaaccttattagttgggttcaataaaaatacattgacaagaatttgagtttttattttatactcctataggactcagaaatagtatcctgatacttaataggcagtggttactcaaaatctgtaccaaaatccaaagggttttaacttaattcgttttctatagggaggtatatcatacaaagagaatgcaacatgttatctgtgtaaaatggacttctgacagcaagtatattatgtgtggatctgatgaaatgaacattcgcctgtggaaagctaatgcttctgaaaaattgggtgtgcttacatcacgagaaaaagcagccaaggattataaccagaaattgaaggagaaatttcagcattatcctcatataaaacgtatagctcgtcatcgacatctaccaaaatctatctatagccagattcaggaacagcgcatcatgaaagaagctcgtcgacgaaaggaagtgaatcgtattaaacacagcaagcctggatctgtgccacttgtgtcagagaagaagaaacacgtagtggcagttgtaaaataattggtattcctaacaatcctgatgtataattatttgttacttttgatttgagaactctacaaataaaagtgctgggactagattaattgcaaacattttagttatatgtgtagagctttattgttactccttttagctaccctgaaaaatgatccttaaaggtggcctagttggtaagactgttttatccttaatctgcattcttctttcattgtagaatacagtatttgcaactcattttttcttgtttttattacagatatacttactttctctttgatctattattgtagacactatacattcaaattgacatttaagaccaaacatctcttatgttatctttaatattactttgaataatgattgcaatgatgtttcttcctgtgattccacataacatttagaataatgatgtcaattttttacaactgaatttatttctagtgctttacttatatttggctttttgactcttttaaaacaatcagcctgcatttatataacttttataaataataatataatttgggtcaagttaagatattaaaagttcctttcagcattgaaa

SEQ ID NO: 367967 - DNA, 1030 bp, Homo sapiens
caacttaggctaggtacgaggccgggtgttaatctattcgaatctttcctgctagacaagtagtcgaagcaggaggtatatcatacaaagagaatgcaacatgttatctgtgtaaaatggacttctgacagcaagtatattatgtgtggatctgatgaaatgaacattcgcctgtggaaagctaatgcttctgaaaaattgggtgtgcttacatcacgagaaaaagcagccaaggattataaccagaaattgaaggagaaatttcagcattatcctcatataaaacgtatagctcgtcatcgacatctaccaaaatctatctatagccagattcaggaacagcgcatcatgaaagaagctcgtcgacgaaaggaagtgaatcgtattaaacacagcaagcctggatctgtgccacttgtgtcagagaagaagaaacacgtagtggcagttgtaaaataattggtattcctaacaatcctgatgtataattatttgttacttttgatttgagaactctacaaataaaagtgctgggactagattaattgcaaacattttagttatatgtgtagagctttattgttactccttttagctaccctgaaaaatgatccttaaaggtggcctagttggtaagactgttttatccttaatctgcattcttctttcattgtagaatacagtatttgcaactcattttttcttgtttttattacagatatacttactttctctttgatctattattgtagacactatacattcaaattgacatttaagaccaaacatctcttatgttatctttaatattactttgaataatgattgcaatgatgtttcttcctgtgattccacataacatttagaataatgatgtcaattttttacaactgaatttatttctagtgctttacttatatttggctttttgactcttttaaaacaatcagcctgcatttatataacttttataaataataatataatttgggtcaagttaagatattaaaagttcctttcagcattgaaa

SEQ ID NO: 367968 - DNA, 5995 bp, Homo sapiens
  misc_feature (1)..(1): n is a, c, g, or t
  misc_feature (601)..(601): n is a, c, g, or t
  misc_feature (638)..(638): n is a, c, g, or t
  misc_feature (1581)..(1581): n is a, c, g, or t
  misc_feature (1858)..(1858): n is a, c, g, or t
  misc_feature (1949)..(1949): n is a, c, g, or t
  misc_feature (1956)..(1956): n is a, c, g, or t
  misc_feature (2034)..(2034): n is a, c, g, or t
  misc_feature (2921)..(2921): n is a, c, g, or t
naaaagacggaggagatccagttcgggctgacagtgagaggatgcagcccggtgtctgggcgggctcttaccggcgaagcggatcttcacgaggtcgagcggatgcagcgcaaggttggataagacgccgccgctcacgcccgctatcaggttctcataccggacgtggcggaataccgtgctccacgccgacgacccggacgccgactggccctggcccgtcataggctcggggcccgtcgacaccacggcgcccagggccgcggaggtgggacgcgatgcagtggccgccaccgtggcgacggtcgccccttgtgagcgcaaccccacctccgggaccaacgagaggactcttatgcccaaggcgcgtgagcgaagccggagactctagtactgagggggcaagaacggggcacagacactacgtcacgccggcggaaagcgcgatggaggggaggtcccagcctctcccgagtctccgccctgcctcgcccacaaatgctccagcccacggacgcggaagcgactgcacagctaaagaaccgccccttgctaacgtttgccggcaaaactacggagcggcgcaggatccagttgagcnagcaggccgccgctccgcgagtcacgtgactggaagnagtctgggaaaagcggaagtcgcctgtgggaggaggtggcggtgggcggaactcctagcggacacctcgtggagtccggccggaagagcaaccgagatgaaggtgaagatgctgagccggaatccggacaattatgtccgcgaaaccaagttggacttacagagagttccaagaaactatgatcctgctttacatccttttgaggtcccacgagaatatataagagctttaaatgctaccaaactggaacgagtatttgcaaaaccattccttgcttcgctggatggtcaccgtgatggagtcaattgcttggcaaagcatccagagaagctggctactgtcctttctggggcgtgtgatggagaggttagaatttggaatctaactcagcggaattgtatccgtacaatacaagcacatgaaggctttgtacgaggaatatgtactcgcttttgtgggacttcttttttcactgttggtgatgacaaaactgtgaagcagtggaaaatggatgggccaggctatggagacgaggaagagccattacatacaatattaggaaagacagtgtatactgggattgatcatcactggaaagaagctgtttttgccacatgtggacagcaagtagacatttgggatgaacaaagaactaatcctatatgttcaatgacctggggatttgacagtataagtagtgttaaatttaacccaattgaggtaatgtttttttttaagtatgttttacttattatggcttaataatttcagttctgtttagaaaacttttgaatgtatgatagaaacttctgaattttaatggtgttttggcattttgtcagttttcccgattgtaaatgagttctgatacctttgctcaaatcccaacatgtttcccagcagtttagtcccagatactagagttaagcattgttagaggagnggtgtgtgcatttgcccattggggtaaaatccaagtaaatatagtcttgttttaactttagttttactcatgccttcaacttcatgttccatagattatgtcattgtacatttaggaaaatgttaatttttctacctgccttggaggtcagaagaaggagcattggacatcattttgtctatttgtaattggtaaggtaccaatgcttcataaaaacatttgtgattattgttgaactgcatggtaattagttatagttatatttttctttgctcanaagtctgaattgtgattcccagttcctccaggcctaagggaagagttggagattggccactacatgtcgtctgtttaggtctgaatttagnaatggangctgtcctgaaggctaagctagcccttggactccagatctttctctgaactttttcttaatgcataacaatagatganctgattgtccagaagactcagtagggatatgtttttcctgttgaaagaaaaggcaatcatagcatatataagccaattttagcagttattgcgaggctaccattttaggtagtatgagagaaaaatcctaatatgcaagtgttatgctcttaaagacccaacctgataaaagataggaagtaaggttgagtcaaaatagtaaggtataaaaatagtttgtatgatatactggaaaatgagatgctgcagtgcgatgtgagcttggccttgaggaattactgagaagtcagaggacactcttcctgcaactaccacatgctcacacacacactttctagagacgctacaggtctagaataggttggcaaactagtctgtgagccacatgtggcccactgcctgtttttgtaaatagagctctgctagaagacagccatgttctcttgcgtacatattgtctgtagctgctttcgtgctatgatggcagagttaagtaattgccacagagaccatatggcccacaaaacctaaaatacttactctctggccctttacagaaaaagttttctgattcctggtctggagtgtctgtctctattatatctttctcactccatcctccatcttccttccttatgtttcccttggttgtagaagagagaagtggcatggaaaggcagctacctttgcagagcaggaccaagtgtaaaagttgataacatatgtgaacattttttaaaagtgctatccaaattcaagatggtgacggtattacgtactaaaaaaaaaacacaaaaaaacctaaacagacactggttcttactatttagaggaacaaaaaaatcttttgcttctctgctttggtgaacatctgtgtcagaagagcngatcaccaattctaaaatcgtaattattagggatgacctagtgaccatgtttttcaaacttgcctgtatagcagctgtatttgttcagctgtttttttttttaattgctattaaccttatgaacttagtggtaaaagtaaatggtgtgtgtgtctcttatcctgttttaaacttaatggaaagggcatgttgctgtgaacaaatggagtgtatttgtatttgtctcctctaatcattaataattaattttctcttaaaatattgaagcctagaattctggtaaagccaaaagtttatgctgatcattgggacgttttacagtgtgaaaggtggcatttggtctaggtagattgttttgctttgttcagatcaaagtctttctttttagaaatggaacctggtcagaccctgaggcgacataatgagaagccaagaaaggttgagggacctcactagggaagtctcagaaaagcagccattaagatagcaggctttcagaaagaactgagaggaaatcatgatcataacattagctttatgatgtgttatttgaattgcgtacagacagtaggaggagttagctggccatgcaactatttagtaaatagctcttcttgctgcccacatacttgcaataggaagtaattgtaggcagaagccaatagttgtgagtgtcaggaaccatgagtgaggaggaatgatgctacagagagagggtttcagggatccactggatgatagagggcttatttttacttaatgccaaggggttatgtgagtaccatgcacatttataattgacttacaaataaaataattagaaaaatcttcaaacagttggacaaaagacaggcctaatttatagagagttaacacgaagaaacatttactaataaaacaataaatttatatagctaggaaatactgtcatacagatattttaaatgacacttttaaatgacactacccagtgctgcccagttgcattaaaatggacatatcccacattgtagtgtatactggtacagctctttggaaaaataattagccctaaatatcaaaagccataaaattgttcataccttttgattcagtaatgtcatttgtgaaattttatcctaaggaaataattcaaaagaagaactacgtgggggggaaatgtttattgaagtattacttataatagtaaaaaacaggaaacaagtcttaagttgaagagtaggtaagtaaaatatgttttattacaaattagaacacagtaatatctgtacattaaaatacatgcatgggggccaggtgcggtggctcatgcctgtaatcccagcactttgggaggctgaggcaggtggctcacctgaggtcaggagtttgataccagcctgggcaacatggtgaaaccctgtctcttctaaaaatacaaaatattagcccggtgtggtggcgcacccctgtaatcccagctcctccacaggctgaggcatgagaattgcttgaacctgggaggtagaggttgcagtgagccaagattgcaccactgcactccagcctgggtgacagagcaagactctgtctctaaataaataaataaataaaatacaagcatgaggattttacagtgaaaatacttggtttaagttgctgagattatggatgatttattgtaccctcttaaaatggactttgttttttaacataaatattaagggcaattaaatcatttgtttactgaatggatgtggtttgctgccaggtctggctttgaactggtgattgttatacttgtttttagacatttctcttgggaagttgtgcatctgacaggaatatagtactgtacgatatgaggcaagctactcctttgaaaaaggttatcttagatatgagaacaaatacaatctgttggaaccctatggaagctttcatttttacagcagcaaatgaagattataacttatatacttttgatatgcgtgcactggacactcctgtaatggtccatatggatcatgtatctgcagtgcttgatgtggattactctcccactgggaaggagtttgtgtctgctagtttcgataaatctattcgaatctttcctgtagacaaaagtcgaagcagggaggtatatcatacaaagagaatgcaacatgttatctgtgtaaaatggacttctgacagcaagtatattatgtgtggatctgatgaaatgaacattcgcctgtggaaagctaatgcttctgaaaaattgggtgtgcttacatcacgagaaaaagcagccaaggattataaccagaaattgaaggagaaatttcagcattatcctcatataaaacgtatagctcgtcatcgacatctaccaaaatctatctatagccagattcaggaacagcgcatcatgaaagaagctcgtcgacgaaaggaagtgaatcgtattaaacacagcaagcctggatctgtgccacttgtgtcagagaagaagaaacacgtagtggcagttgtaaaataattggtattcctaacaatcctgatgtataattatttgttacttttgatttgagaactctacaaataaaagtgctgggactagattaattgcaaacattttagttatatgtgtagagctttattgttactccttttagctaccctgaaaaatgatccttaaaggtggcctagttggtaagactgttttatccttaatctgcattcttctttcattgtagaatacagtatttgcaactcattttttcttgtttttattacagatatacttactttctctttgatctattattgtagacactatacattcaaattgacatttaagaccaaacatctcttatgttatctttaatattactttgaataatgattgcaatgatgtttcttcctgtgattccacataacatttagaataatgatgtcaattttttacaactgaatttatttctagtgctttacttatatttggctttttgactcttttaaaacaatcagcctgcatttatataacttttataaataataatataatttgggtcaagttaagatattaaaagttcctttcagcattgaaa

SEQ ID NO: 367969 - DNA, 5448 bp, Homo sapiens
  misc_feature (1)..(1): n is a, c, g, or t
  misc_feature (601)..(601): n is a, c, g, or t
  misc_feature (638)..(638): n is a, c, g, or t
  misc_feature (1473)..(1473): n is a, c, g, or t
  misc_feature (1750)..(1750): n is a, c, g, or t
  misc_feature (1841)..(1841): n is a, c, g, or t
  misc_feature (1848)..(1848): n is a, c, g, or t
  misc_feature (1926)..(1926): n is a, c, g, or t
  misc_feature (2813)..(2813): n is a, c, g, or t
naaaagacggaggagatccagttcgggctgacagtgagaggatgcagcccggtgtctgggcgggctcttaccggcgaagcggatcttcacgaggtcgagcggatgcagcgcaaggttggataagacgccgccgctcacgcccgctatcaggttctcataccggacgtggcggaataccgtgctccacgccgacgacccggacgccgactggccctggcccgtcataggctcggggcccgtcgacaccacggcgcccagggccgcggaggtgggacgcgatgcagtggccgccaccgtggcgacggtcgccccttgtgagcgcaaccccacctccgggaccaacgagaggactcttatgcccaaggcgcgtgagcgaagccggagactctagtactgagggggcaagaacggggcacagacactacgtcacgccggcggaaagcgcgatggaggggaggtcccagcctctcccgagtctccgccctgcctcgcccacaaatgctccagcccacggacgcggaagcgactgcacagctaaagaaccgccccttgctaacgtttgccggcaaaactacggagcggcgcaggatccagttgagcnagcaggccgccgctccgcgagtcacgtgactggaagnagtctgggaaaagcggaagtcgcctgtgggaggaggtggcggtgggcggaactcctagcggacacctcgtggagtccggccggaagagcaaccgagatgaaggtgaagatgctgagccggaatccggacaattatgtccgcgaaaccaagttggacttacagagagttccaagaaactatgatcctgctttacatccttttgaggtcccacgagaatatataagagctttaaatgctaccaaactggaacgagtatttgcaaaaccattccttgcttcgctggatggtcaccgtgatggagtcaattgcttggcaaagcatccagagaagctggctactgtcctttctggggcgtgtgatggagaggttggtgatgacaaaactgtgaagcagtggaaaatggatgggccaggctatggagacgaggaagagccattacatacaatattaggaaagacagtgtatactgggattgatcatcactggaaagaagctgtttttgccacatgtggacagcaagtagacatttgggatgaacaaagaactaatcctatatgttcaatgacctggggatttgacagtataagtagtgttaaatttaacccaattgaggtaatgtttttttttaagtatgttttacttattatggcttaataatttcagttctgtttagaaaacttttgaatgtatgatagaaacttctgaattttaatggtgttttggcattttgtcagttttcccgattgtaaatgagttctgatacctttgctcaaatcccaacatgtttcccagcagtttagtcccagatactagagttaagcattgttagaggagnggtgtgtgcatttgcccattggggtaaaatccaagtaaatatagtcttgttttaactttagttttactcatgccttcaacttcatgttccatagattatgtcattgtacatttaggaaaatgttaatttttctacctgccttggaggtcagaagaaggagcattggacatcattttgtctatttgtaattggtaaggtaccaatgcttcataaaaacatttgtgattattgttgaactgcatggtaattagttatagttatatttttctttgctcanaagtctgaattgtgattcccagttcctccaggcctaagggaagagttggagattggccactacatgtcgtctgtttaggtctgaatttagnaatggangctgtcctgaaggctaagctagcccttggactccagatctttctctgaactttttcttaatgcataacaatagatganctgattgtccagaagactcagtagggatatgtttttcctgttgaaagaaaaggcaatcatagcatatataagccaattttagcagttattgcgaggctaccattttaggtagtatgagagaaaaatcctaatatgcaagtgttatgctcttaaagacccaacctgataaaagataggaagtaaggttgagtcaaaatagtaaggtataaaaatagtttgtatgatatactggaaaatgagatgctgcagtgcgatgtgagcttggccttgaggaattactgagaagtcagaggacactcttcctgcaactaccacatgctcacacacacactttctagagacgctacaggtctagaataggttggcaaactagtctgtgagccacatgtggcccactgcctgtttttgtaaatagagctctgctagaagacagccatgttctcttgcgtacatattgtctgtagctgctttcgtgctatgatggcagagttaagtaattgccacagagaccatatggcccacaaaacctaaaatacttactctctggccctttacagaaaaagttttctgattcctggtctggagtgtctgtctctattatatctttctcactccatcctccatcttccttccttatgtttcccttggttgtagaagagagaagtggcatggaaaggcagctacctttgcagagcaggaccaagtgtaaaagttgataacatatgtgaacattttttaaaagtgctatccaaattcaagatggtgacggtattacgtactaaaaaaaaaacacaaaaaaacctaaacagacactggttcttactatttagaggaacaaaaaaatcttttgcttctctgctttggtgaacatctgtgtcagaagagcngatcaccaattctaaaatcgtaattattagggatgacctagtgaccatgtttttcaaacttgcctgtatagcagctgtatttgttcagctgtttttttttttaattgctattaaccttatgaacttagtggtaaaagtaaatggtgtgtgtgtctcttatcctgttttaaacttaatggaaagggcatgttgctgtgaacaaatggagtgtatttgtatttgtctcctctaatcattaataattaattttctcttaaaatattgaagcctagaattctggtaaagccaaaagtttatgctgatcattgggacgttttacagtgtgaaaggtggcatttggtctaggtagattgttttgctttgttcagatcaaagtctttctttttagaaatggaacctggtcagaccctgaggcgacataatgagaagccaagaaaggttgagggacctcactagggaagtctcagaaaagcagccattaagatagcaggctttcagaaagaactgagaggaaatcatgatcataacattagctttatgatgtgttatttgaattgcgtacagacagtaggaggagttagctggccatgcaactatttagtaaatagctcttcttgctgcccacatacttgcaataggaagtaattgtaggcagaagccaatagttgtgagtgtcaggaaccatgagtgaggaggaatgatgctacagagagagggtttcagggatccactggatgatagagggcttatttttacttaatgccaaggggttatgtgagtaccatgcacatttataattgacttacaaataaaataattagaaaaatcttcaaacagttggacaaaagacaggcctaatttatagagagttaacacgaagaaacatttactaataaaacaataaatttatatagctaggaaatactgtcatacagatattttaaatgacacttttaaatgacactacccagtgctgcccagttgcattaaaatggacatatcccacattgtagtgtatactggtacagctctttggaaaaataattagccctaaatatcaaaagccataaaattgttcataccttttgattcagtaatgtcatttgtgaaattttatcctaaggaaataattcaaaagaagaactacgtgggggggaaatgtttattgaagtattacttataatagtaaaaaacaggaaacaagtcttaagttgaagagtaggtaagtaaaatatgttttattacaaattagaacacagtaatatctgtacattaaaatacatgcatgggggccaggtgcggtggctcatgcctgtaatcccagcactttgggaggctgaggcaggtggctcacctgaggtcaggagtttgataccagcctgggcaacatggtgaaaccctgtctcttctaaaaatacaaaatattagcccggtgtggtggcgcacccctgtaatcccagctcctccacaggctgaggcatgagaattgcttgaacctgggaggtagaggttgcagtgagccaagattgcaccactgcactccagcctgggtgacagagcaagactctgtctctaaataaataaataaataaaatacaagcatgaggattttacagtgaaaatacttggtttaagttgctgagattatggatgatttattgtaccctcttaaaatggactttgttttttaacataaatattaagggcaattaaatcatttgtttactgaatggatgtggtttgctgccaggtctggctttgaactggtgattgttatacttgtttttagacatttctcttgggaagttgtgcatctgacaggaatatagtactgtacgatatgaggcaagctactcctttgaaaaaggttatcttagatatgagaacaaatacaatctgttggaaccctatggaagctttcatttttacagcagcaaatgaagattataacttatatacttttgatatgcgtgcactggacactcctgtaatggtccatatggatcatgtatctgcagtgcttgatgtggattactctcccactgggaaggagtttgtgtctgctagtttcgataaatctattcgaatctttcctgtagacaaaagtcgaagcagggaggtatatcatacaaagagaatgcaacatgttatctgtgtaaaatggacttctgacagcaagtatattatgtgtggatctgatgaaatgaacattcgcctgtggaaagctaatgcttctgaaaaattgggtgtgcttacatcacgagaaaaagcagccaaggattataaccagaaattgaaggagaaatttcagcattatcctcatataaaacgtatagctcgtcatcgacatctaccaaaatctatctatagccagattcaggaacagcgcatcatgaaagaagctcgtcgacgaaaggaagtgaatcgtattaaacacagcaagcctggatctgtgccacttgtgtcagagaagaagaaacacgtagtggcagttgtaaaataattggtattcctaacaatcctgatgtataattatttgttacttttgatttgagaactctacaaataaaagtgctggagcgtaagcggcaagtctccctttgccagtcggggttatgactatatgtgacaataa

SEQ ID NO: 367970 - DNA, 5686 bp, Homo sapiens
  misc_feature (1)..(1): n is a, c, g, or t
  misc_feature (601)..(601): n is a, c, g, or t
  misc_feature (638)..(638): n is a, c, g, or t
  misc_feature (1473)..(1473): n is a, c, g, or t
  misc_feature (1750)..(1750): n is a, c, g, or t
  misc_feature (1841)..(1841): n is a, c, g, or t
  misc_feature (1848)..(1848): n is a, c, g, or t
  misc_feature (1926)..(1926): n is a, c, g, or t
  misc_feature (2813)..(2813): n is a, c, g, or t
naaaagacggaggagatccagttcgggctgacagtgagaggatgcagcccggtgtctgggcgggctcttaccggcgaagcggatcttcacgaggtcgagcggatgcagcgcaaggttggataagacgccgccgctcacgcccgctatcaggttctcataccggacgtggcggaataccgtgctccacgccgacgacccggacgccgactggccctggcccgtcataggctcggggcccgtcgacaccacggcgcccagggccgcggaggtgggacgcgatgcagtggccgccaccgtggcgacggtcgccccttgtgagcgcaaccccacctccgggaccaacgagaggactcttatgcccaaggcgcgtgagcgaagccggagactctagtactgagggggcaagaacggggcacagacactacgtcacgccggcggaaagcgcgatggaggggaggtcccagcctctcccgagtctccgccctgcctcgcccacaaatgctccagcccacggacgcggaagcgactgcacagctaaagaaccgccccttgctaacgtttgccggcaaaactacggagcggcgcaggatccagttgagcnagcaggccgccgctccgcgagtcacgtgactggaagnagtctgggaaaagcggaagtcgcctgtgggaggaggtggcggtgggcggaactcctagcggacacctcgtggagtccggccggaagagcaaccgagatgaaggtgaagatgctgagccggaatccggacaattatgtccgcgaaaccaagttggacttacagagagttccaagaaactatgatcctgctttacatccttttgaggtcccacgagaatatataagagctttaaatgctaccaaactggaacgagtatttgcaaaaccattccttgcttcgctggatggtcaccgtgatggagtcaattgcttggcaaagcatccagagaagctggctactgtcctttctggggcgtgtgatggagaggttggtgatgacaaaactgtgaagcagtggaaaatggatgggccaggctatggagacgaggaagagccattacatacaatattaggaaagacagtgtatactgggattgatcatcactggaaagaagctgtttttgccacatgtggacagcaagtagacatttgggatgaacaaagaactaatcctatatgttcaatgacctggggatttgacagtataagtagtgttaaatttaacccaattgaggtaatgtttttttttaagtatgttttacttattatggcttaataatttcagttctgtttagaaaacttttgaatgtatgatagaaacttctgaattttaatggtgttttggcattttgtcagttttcccgattgtaaatgagttctgatacctttgctcaaatcccaacatgtttcccagcagtttagtcccagatactagagttaagcattgttagaggagnggtgtgtgcatttgcccattggggtaaaatccaagtaaatatagtcttgttttaactttagttttactcatgccttcaacttcatgttccatagattatgtcattgtacatttaggaaaatgttaatttttctacctgccttggaggtcagaagaaggagcattggacatcattttgtctatttgtaattggtaaggtaccaatgcttcataaaaacatttgtgattattgttgaactgcatggtaattagttatagttatatttttctttgctcanaagtctgaattgtgattcccagttcctccaggcctaagggaagagttggagattggccactacatgtcgtctgtttaggtctgaatttagnaatggangctgtcctgaaggctaagctagcccttggactccagatctttctctgaactttttcttaatgcataacaatagatganctgattgtccagaagactcagtagggatatgtttttcctgttgaaagaaaaggcaatcatagcatatataagccaattttagcagttattgcgaggctaccattttaggtagtatgagagaaaaatcctaatatgcaagtgttatgctcttaaagacccaacctgataaaagataggaagtaaggttgagtcaaaatagtaaggtataaaaatagtttgtatgatatactggaaaatgagatgctgcagtgcgatgtgagcttggccttgaggaattactgagaagtcagaggacactcttcctgcaactaccacatgctcacacacacactttctagagacgctacaggtctagaataggttggcaaactagtctgtgagccacatgtggcccactgcctgtttttgtaaatagagctctgctagaagacagccatgttctcttgcgtacatattgtctgtagctgctttcgtgctatgatggcagagttaagtaattgccacagagaccatatggcccacaaaacctaaaatacttactctctggccctttacagaaaaagttttctgattcctggtctggagtgtctgtctctattatatctttctcactccatcctccatcttccttccttatgtttcccttggttgtagaagagagaagtggcatggaaaggcagctacctttgcagagcaggaccaagtgtaaaagttgataacatatgtgaacattttttaaaagtgctatccaaattcaagatggtgacggtattacgtactaaaaaaaaaacacaaaaaaacctaaacagacactggttcttactatttagaggaacaaaaaaatcttttgcttctctgctttggtgaacatctgtgtcagaagagcngatcaccaattctaaaatcgtaattattagggatgacctagtgaccatgtttttcaaacttgcctgtatagcagctgtatttgttcagctgtttttttttttaattgctattaaccttatgaacttagtggtaaaagtaaatggtgtgtgtgtctcttatcctgttttaaacttaatggaaagggcatgttgctgtgaacaaatggagtgtatttgtatttgtctcctctaatcattaataattaattttctcttaaaatattgaagcctagaattctggtaaagccaaaagtttatgctgatcattgggacgttttacagtgtgaaaggtggcatttggtctaggtagattgttttgctttgttcagatcaaagtctttctttttagaaatggaacctggtcagaccctgaggcgacataatgagaagccaagaaaggttgagggacctcactagggaagtctcagaaaagcagccattaagatagcaggctttcagaaagaactgagaggaaatcatgatcataacattagctttatgatgtgttatttgaattgcgtacagacagtaggaggagttagctggccatgcaactatttagtaaatagctcttcttgctgcccacatacttgcaataggaagtaattgtaggcagaagccaatagttgtgagtgtcaggaaccatgagtgaggaggaatgatgctacagagagagggtttcagggatccactggatgatagagggcttatttttacttaatgccaaggggttatgtgagtaccatgcacatttataattgacttacaaataaaataattagaaaaatcttcaaacagttggacaaaagacaggcctaatttatagagagttaacacgaagaaacatttactaataaaacaataaatttatatagctaggaaatactgtcatacagatattttaaatgacacttttaaatgacactacccagtgctgcccagttgcattaaaatggacatatcccacattgtagtgtatactggtacagctctttggaaaaataattagccctaaatatcaaaagccataaaattgttcataccttttgattcagtaatgtcatttgtgaaattttatcctaaggaaataattcaaaagaagaactacgtgggggggaaatgtttattgaagtattacttataatagtaaaaaacaggaaacaagtcttaagttgaagagtaggtaagtaaaatatgttttattacaaattagaacacagtaatatctgtacattaaaatacatgcatgggggccaggtgcggtggctcatgcctgtaatcccagcactttgggaggctgaggcaggtggctcacctgaggtcaggagtttgataccagcctgggcaacatggtgaaaccctgtctcttctaaaaatacaaaatattagcccggtgtggtggcgcacccctgtaatcccagctcctccacaggctgaggcatgagaattgcttgaacctgggaggtagaggttgcagtgagccaagattgcaccactgcactccagcctgggtgacagagcaagactctgtctctaaataaataaataaataaaatacaagcatgaggattttacagtgaaaatacttggtttaagttgctgagattatggatgatttattgtaccctcttaaaatggactttgttttttaacataaatattaagggcaattaaatcatttgtttactgaatggatgtggtttgctgccaggtctggctttgaactggtgattgttatacttgtttttagacatttctcttgggaagttgtgcatctgacaggaatatagtactgtacgatatgaggcaagctactcctttgaaaaaggttatcttagatatgagaacaaatacaatctgttggaaccctatggaagctttcatttttacagcagcaaatgaagattataacttatatacttttgatatgcgtgcactggacactcctgtaatggtccatatggatcatgtatctgcagtgcttgatgtggattactctcccactgggaaggagtttgtgtctgctagtttcgataaatctattcgaatctttcctgtagacaaaagtcgaagcagggaggtatatcatacaaagagaatgcaacatgttatctgtgtaaaatggacttctgacagcaagtatattatgtgtggatctgatgaaatgaacattcgcctgtggaaagctaatgcttctgaaaaattgggtgtgcttacatcacgagaaaaagcagccaaggattataaccagaaattgaaggagaaatttcagcattatcctcatataaaacgtatagctcgtcatcgacatctaccaaaatctatcaactgaaagctgagcgtgaacgtggtatcaccattgatatctccttgtggaaatttgagaccagcaagtactatgtgactatcattgatgccccaggacacagagactttatcaaaaacatgattacagggacatctcaggctgactgtgctgtcctgattgttgctgctggtgttggtgaatttgaagctggtatctccaagaatgggcagacccgagagcatgcccttctggcttacacactgggtgtgaaacaactaattgtcggtgttaacaaaatggattccactgagccaccctacagccagaagagatatgaggaaattgttaaggaagtcagcacttacattaagaaaattggctacaaccccgacacagtagcatttgtgccaatttctggttggaatggtgacaacatgctggagccaagtgctaacatgccttggttcaagggatggaaagtcacccgtaaggatggcaatgccagtggaaccacgctgcttgaggc

SEQ ID NO: 367971 - DNA, 507 bp, Homo sapiens
aattttagctttatttgctgtatcatcatcatcagtatcatcatcatcatcagttttcttgttttaaaatagggtttggagtctcttcaaggctttctgttttggaaaagtaaaacttaaaaatctatagccatgtgaattatacttatggagaaaaagagtcttgttttattaacatcagacatctttgttcctactaattattttggagtaatgttcagtatcgggctaatgatcgatggatatcactcatccaattatgatgcatggattagaccacggccttaaactttgtacatagtgttgaataaattcatcttatttgcagtcttattgtcatctagctttgatacacttgccctttcatatgtctcttgtcactattctgtgtaagattataatcccaaataccactatatgtatttttcttcatattctattattgaacagtattaatgcttaatgttaatatataagtaatatatacattttaaaaattaaaaatgc

SEQ ID NO: 367972 - DNA, 397 bp, Homo sapiens
aaaggacctgtcctcaggggcaagacggtctgggcagagaggctgaggcagaggagtcaggagattcctaggggacagttggactgggggccagactacgccaggctaaggagtgtgatgtgggaagctggagaaggctgtgatgaaatgtgctgtggactttgggaggccgaggcggatggatcacctgaggtcaggagttcaagtccagcctggtcaacatggtgaaaccccgtctctaccaaaaatacaaaattagccaggtgtggtggcacatgcctgtaattccagctactcggaaggctgaggcaggagaacctgggaggtggaggttgcagtgagccaagattgtgctactgcactccagcctgggcaacagaacaaaaactacatctca

SEQ ID NO: 367973 - DNA, 6287 bp, Homo sapiens
  misc_feature (4610)..(4610): n is a, c, g, or t
  misc_feature (4615)..(4615): n is a, c, g, or t
  misc_feature (4812)..(4812): n is a, c, g, or t
actcaagaaacagtttgcgtgcgatgtggacaagagaggtccccgttgggtgaggaacccgggaaggcccgcccagattcgggccccctgcccttgtcccctgggctgggggcgcgggcaaagcgggggcctggcgggcgctgagaggacctgaagccggcgcgggcggcggaggcgggctgggggcagcagccatgcctacctggggggcccgccccgcgtccccagatcgctttgcggtgtctgcggaggctgagaacaaggttcgggaacagcagccccatgtggagcgcatcttcagcgtgggggtgagcgtccttccgaaggactgtccggacaacccccacatctggctgcagctggagggccccaaggaaaacgccagcagagccaaggagtacctgaagggcctctgcagcccagaactgcaggatgaaatccactacccgcccaaactgcactgcatctttctgggagcccagggcttcttccttgactgcctggcctggagcacgtcagcccatctggtgcccagggcgccaggctcactgatgatcagtggcctgactgaagcctttgtcatggctcagagccgggtagaagagctggcagagcggctgagctgggacttcacgccaggaccatcttccggagcctctcagtgtactggagtgctgagagacttctctgccctgctgcagtccccgggggatgcccatagagaggctctgttgcagttgcccctggctgtccaggaggagctgctgagtctggtgcaggaggcgtctagtgggcaggggccaggagcactggcttcttgggaggggcggagctcagccttgctgggtgctcagtgccaaggagtgagagctccccctagtgacggcagggagtccctggacactggatctatgggacccggagattgcaggggagcaaggggagacacttacgctgtggagaaggagggagggaaacagggtggtcccagggagatggatttggggtggaaggagttgcctggggaagaggcgtgggagagagaagtggccctcaggccacagtcagtgggtggaggggcaagggagtcagcacccctgaaagggaaggccctggggaaggaggagatagctctgggaggaggagggttctgtgtccaccgtgagcctcccggtgcccatggctcctgtcacagggcagctcagtcccgaggagcctccctcctccagcggctccacaatgggaatgcctctcctccgagggtgcccagccctccacctgcaccggaacccccatggcactgtggagaccggggtgactgcggagaccggggagacgtgggggacaggggagacaagcagcagggcatggcacggggtcgggggcctcaatggaaacgaggcgcccgagggggcaacttggtgactggcacacagcgtttcaaggaggccctgcaggatcctttcaccctgtgccttgccaatgtgcctggccagccagacctccgccatattgtcattgacggcagcaacgtggccatggtgcatggcctccagcactacttctccagccggggcattgccattgctgtgcagtacttctgggaccgtggtcaccgtgacataactgtctttgtgcctcagtggcgcttcagtaaggatgccaaagtcagagagagtcacttcctgcaaaagctgtattccctcagcctgctctccctcacaccctcacgagtcatggatggcaagaggatctcctcctatgatgacaggttcatggtgaagctggctgaagagacagatgggataattgtctccaatgaccagttccgggacctggcggaggagtctgagaagtggatggcaatcatcagagaacgcctgctgccctttacctttgtgggaaacctcttcatggtacctgatgacccactggggcgaaacggccccaccctggatgaatttctgaagaagccagccaggacacaggggtcttctaaggctcagcatccttccaggggctttgcagaacatggtaaacagcagcaggggagagaagaggaaaaaggtagtggtggcattcggaagacccgggaaacagagcggctccggcggcagctgctggaggtgttttggggtcaggatcacaaagtggacttcatcctgcagcgggagccatactgccgggacatcaaccaactgtctgaggccctgctcagtcttaacttttgagcctcacctgcttgagtggctgccgccctgtcagctccagccgcctccagctcagccctttctgtgagagtccctctgctgctcactctgatccagaggcaccctgagttggtgctttggatcagggaagccactttgggacaggtccataaagtgaactgatcttaccgagtcaggacctcagccagctctcaagaggttctgctcagccttaacttctcaactttgccttagcacagggtttctgtagggagtgggggctgctagaggggattagttccggagactgagactgttggctccacctccaagctgagctagggtggagggcagggtgggcaggaagtgacaggaagttaagctgttcctctccctggctgctgctctggatggccagagaacaagatgctcccttgctgagctcctgggagcgtggaaggagatgctaggccctggcacagtgttatgtggactgggccacgatagggtggagtgagctagtgaagaaggcagagggagacttggcttctggtctcagctatgcctgttttgtgaccttgattgagttgcttgggctttacttctgcctacaaatcaggggtaaaaatacctgttgggaggagaaatgagaacatagaggaaagcctcttggaggaaaggtgcttggaccaagtctcaggtgtgtctgcctgtggctgcacaggctctctaaccgaaacctcactttcagagagatgtgggtcctttgtctccaggatccacaccctagattttaacactgcattctcactataacatgccctataatggctgcatcccttttgagcaacctccaaaatctacatttacacagtaggtaaattagggatgactgcattatcaaaatactctcagggttcctataaatggcagctctcctgttgtattcaggtgttgtttacagactaacaaatgtgttggcaaatccctggttagatgcacttcctggtgttgagatgaacacgtcgatttttcaccaatcgatgaagccatgctctgcaatgacaatattaatgtgatccgaccctaacattttctctatggaagacgtatgttgcataaagcaaggcacacttctgctttatgtgtgtgtgtatggggatgggaggacttaacggaagttgaaccagttggttctagatgaaccaattatctggaaaatgaaagaaccagagttggaaggcacttgactggccaccagaccaactctgctgttactgacatgctttcttcaccctgattcctagaggtcattgccctggatctgcttgaagtcctcctgtgccagggaatttactatctccagggtagcacattccctgtgtagacggtattaatcagtactccttactttagtgcagcctaaagtatgcttttctgttacatccacctttgaggctggtcatacctccaggaacaatacagagccagtcaacttcctggaatccaagaccagataaagaagtaggacaggtgcccctgggttctgttctgtgtgggcctgtggggagtctctagacaagatcttttccaggccctgacttctgcctccctctgagtggcacagggagttgaatactgcatggcgagtgtaatgatgatggggagggtccttgtgtcctcaccccttcctttttggtgatttacaccactgtaccatactgacccaggctgggggcaggtgtgttggagacaggctggtcaaagaggtgacaatgattaagagataacccagtggtccctgagaagagattggttagtatggcctgaactggtggctgggggaactgtgtctggtcaagttatggcagatgtcacagctttaggtaggtaaaaagggtcctagatgaaaaccttggagtttttttttttcctgatagggttgtttatacttcttgattggtttcttgccattttcactttcagtgatggtgggtgtgcagtagaccaaaagtgtcttctgcccttttgtgctaagggccctggttgactgagtggccccagtcagatgagaggcaagtcctaagcttcttatagacagggatgttgactttgttctgctgcagcctgataaactgggaccactgtgtggttagtaatgcacttgccatttggtgacacagactgaaggctatcctacacctgggccttacctcttcctctactggcatcctaatggcactctgacagcatccagggtgactacagggcccattggaaatggatcatcattctctcttctagtgtctatctttatcataacctgatgtcccaaacttgtgacaagttcttttggcaactgaaggaccaagaagggaaacggtgatgagagagactgcncattntaactttcaaaaccccgtctttggggaagaatcatctagggtgacattccttgaagtaaatcccaggagaatctaggccaaagagatgagccaaggttagtgagacaatttatttttattgcctaaactgcagagcattctctacacagcgtaaaggagaagtggggcagctgcaggacatgtagagaaaccaaacngggaaatcttacaaggagttgaaaagattaatgtcccaacctgatgagattacggccttgagacaataaggtggagcaacagaacaatgggaaagaggactgggagaggaatctaagaaccagatggcttcagctctctagaggagctgagcctattcacagtgcctaacctggaagcctgtgaggaacaggcctcaggcccttgccatgacctacttaggctacaatttcctttaaggcagcccctagctctgggaaggaatactggtagccagtggccagtgttcgccgtgggatcaccttctggccctccagcagcatgatggcacgctgtcgcccaaagacagcttgcaccacagcgctggggagagggatgaaggctcggcggcccaggcagcaccgaaggtctgggcaaactcagcattagtggcggaggatggagccactccattcaggaccccgtgcacgtggtttgcttcaagggcatgggtcaggattcctgccaggtccccgatgtgtatccaggggaagaattggtggcctgagccgatggggccccccaggcccaggcgaaagggcagcagcatgtggcccatggcaccacccccacggcccagcacaacccctagagcaggaaagagggaaggtacaggggtcttctcagccttgaaggagcccactgctcctcctggtttctgtttccccttcctcactctccccatgctgacttggctctgtaacagaagtgagcagtatggctgtctttaagacctcacaccttctcatctgcaggttggctagaagtggtggcatcctctcactctgtaattgtaatctcagctctcctaatcccatcacttccccagcccagagaagacattccaaccctgtctgatacccaggcccgtttctcacctgagcgcaccaccacctggcgtgtagaatctccaggaagcctggctgcagcttcccatttggttacgaggttggagaaaaagtcaaagtcccctcctgggctgtcttcatcatactccgcagtcagactgggctggtagtaagctgccggtggaacacaatcatttgccctgggtgtccttggtcctgcctggctctctgtagtggaggctccccttggcatcaccttctctggcccttaggatctccccatttggagacagagccatttggatattttccccttgaacttctccatgacctgaagcgttccttccctggaggaactctttggttgcagggctaaacttagaggctgctagagtgtagtggttaagaacaggaacttgggtaccaggcgcctgaattttaatcagctccctcatttattaactctctgacttgatgcaagttacttaacctctctgtatagaattttcacatctttaaaatgggaataatagtacctacctcatagggttgttgtaaggaataaatgataataagcataaaacacttca

SEQ ID NO: 367974 - DNA, 6159 bp, Homo sapiens
  misc_feature (4482)..(4482): n is a, c, g, or t
  misc_feature (4487)..(4487): n is a, c, g, or t
  misc_feature (4684)..(4684): n is a, c, g, or t
actcaagaaacagtttgcgtgcgatgtggacaagagaggtccccgttggggctgggggcagcagccatgcctacctggggggcccgccccgcgtccccagatcgctttgcggtgtctgcggaggctgagaacaaggttcgggaacagcagccccatgtggagcgcatcttcagcgtgggggtgagcgtccttccgaaggactgtccggacaacccccacatctggctgcagctggagggccccaaggaaaacgccagcagagccaaggagtacctgaagggcctctgcagcccagaactgcaggatgaaatccactacccgcccaaactgcactgcatctttctgggagcccagggcttcttccttgactgcctggcctggagcacgtcagcccatctggtgcccagggcgccaggctcactgatgatcagtggcctgactgaagcctttgtcatggctcagagccgggtagaagagctggcagagcggctgagctgggacttcacgccaggaccatcttccggagcctctcagtgtactggagtgctgagagacttctctgccctgctgcagtccccgggggatgcccatagagaggctctgttgcagttgcccctggctgtccaggaggagctgctgagtctggtgcaggaggcgtctagtgggcaggggccaggagcactggcttcttgggaggggcggagctcagccttgctgggtgctcagtgccaaggagtgagagctccccctagtgacggcagggagtccctggacactggatctatgggacccggagattgcaggggagcaaggggagacacttacgctgtggagaaggagggagggaaacagggtggtcccagggagatggatttggggtggaaggagttgcctggggaagaggcgtgggagagagaagtggccctcaggccacagtcagtgggtggaggggcaagggagtcagcacccctgaaagggaaggccctggggaaggaggagatagctctgggaggaggagggttctgtgtccaccgtgagcctcccggtgcccatggctcctgtcacagggcagctcagtcccgaggagcctccctcctccagcggctccacaatgggaatgcctctcctccgagggtgcccagccctccacctgcaccggaacccccatggcactgtggagaccggggtgactgcggagaccggggagacgtgggggacaggggagacaagcagcagggcatggcacggggtcgggggcctcaatggaaacgaggcgcccgagggggcaacttggtgactggcacacagcgtttcaaggaggccctgcaggatcctttcaccctgtgccttgccaatgtgcctggccagccagacctccgccatattgtcattgacggcagcaacgtggccatggtgcatggcctccagcactacttctccagccggggcattgccattgctgtgcagtacttctgggaccgtggtcaccgtgacataactgtctttgtgcctcagtggcgcttcagtaaggatgccaaagtcagagagagtcacttcctgcaaaagctgtattccctcagcctgctctccctcacaccctcacgagtcatggatggcaagaggatctcctcctatgatgacaggttcatggtgaagctggctgaagagacagatgggataattgtctccaatgaccagttccgggacctggcggaggagtctgagaagtggatggcaatcatcagagaacgcctgctgccctttacctttgtgggaaacctcttcatggtacctgatgacccactggggcgaaacggccccaccctggatgaatttctgaagaagccagccaggacacaggggtcttctaaggctcagcatccttccaggggctttgcagaacatggtaaacagcagcaggggagagaagaggaaaaaggtagtggtggcattcggaagacccgggaaacagagcggctccggcggcagctgctggaggtgttttggggtcaggatcacaaagtggacttcatcctgcagcgggagccatactgccgggacatcaaccaactgtctgaggccctgctcagtcttaacttttgagcctcacctgcttgagtggctgccgccctgtcagctccagccgcctccagctcagccctttctgtgagagtccctctgctgctcactctgatccagaggcaccctgagttggtgctttggatcagggaagccactttgggacaggtccataaagtgaactgatcttaccgagtcaggacctcagccagctctcaagaggttctgctcagccttaacttctcaactttgccttagcacagggtttctgtagggagtgggggctgctagaggggattagttccggagactgagactgttggctccacctccaagctgagctagggtggagggcagggtgggcaggaagtgacaggaagttaagctgttcctctccctggctgctgctctggatggccagagaacaagatgctcccttgctgagctcctgggagcgtggaaggagatgctaggccctggcacagtgttatgtggactgggccacgatagggtggagtgagctagtgaagaaggcagagggagacttggcttctggtctcagctatgcctgttttgtgaccttgattgagttgcttgggctttacttctgcctacaaatcaggggtaaaaatacctgttgggaggagaaatgagaacatagaggaaagcctcttggaggaaaggtgcttggaccaagtctcaggtgtgtctgcctgtggctgcacaggctctctaaccgaaacctcactttcagagagatgtgggtcctttgtctccaggatccacaccctagattttaacactgcattctcactataacatgccctataatggctgcatcccttttgagcaacctccaaaatctacatttacacagtaggtaaattagggatgactgcattatcaaaatactctcagggttcctataaatggcagctctcctgttgtattcaggtgttgtttacagactaacaaatgtgttggcaaatccctggttagatgcacttcctggtgttgagatgaacacgtcgatttttcaccaatcgatgaagccatgctctgcaatgacaatattaatgtgatccgaccctaacattttctctatggaagacgtatgttgcataaagcaaggcacacttctgctttatgtgtgtgtgtatggggatgggaggacttaacggaagttgaaccagttggttctagatgaaccaattatctggaaaatgaaagaaccagagttggaaggcacttgactggccaccagaccaactctgctgttactgacatgctttcttcaccctgattcctagaggtcattgccctggatctgcttgaagtcctcctgtgccagggaatttactatctccagggtagcacattccctgtgtagacggtattaatcagtactccttactttagtgcagcctaaagtatgcttttctgttacatccacctttgaggctggtcatacctccaggaacaatacagagccagtcaacttcctggaatccaagaccagataaagaagtaggacaggtgcccctgggttctgttctgtgtgggcctgtggggagtctctagacaagatcttttccaggccctgacttctgcctccctctgagtggcacagggagttgaatactgcatggcgagtgtaatgatgatggggagggtccttgtgtcctcaccccttcctttttggtgatttacaccactgtaccatactgacccaggctgggggcaggtgtgttggagacaggctggtcaaagaggtgacaatgattaagagataacccagtggtccctgagaagagattggttagtatggcctgaactggtggctgggggaactgtgtctggtcaagttatggcagatgtcacagctttaggtaggtaaaaagggtcctagatgaaaaccttggagtttttttttttcctgatagggttgtttatacttcttgattggtttcttgccattttcactttcagtgatggtgggtgtgcagtagaccaaaagtgtcttctgcccttttgtgctaagggccctggttgactgagtggccccagtcagatgagaggcaagtcctaagcttcttatagacagggatgttgactttgttctgctgcagcctgataaactgggaccactgtgtggttagtaatgcacttgccatttggtgacacagactgaaggctatcctacacctgggccttacctcttcctctactggcatcctaatggcactctgacagcatccagggtgactacagggcccattggaaatggatcatcattctctcttctagtgtctatctttatcataacctgatgtcccaaacttgtgacaagttcttttggcaactgaaggaccaagaagggaaacggtgatgagagagactgcncattntaactttcaaaaccccgtctttggggaagaatcatctagggtgacattccttgaagtaaatcccaggagaatctaggccaaagagatgagccaaggttagtgagacaatttatttttattgcctaaactgcagagcattctctacacagcgtaaaggagaagtggggcagctgcaggacatgtagagaaaccaaacngggaaatcttacaaggagttgaaaagattaatgtcccaacctgatgagattacggccttgagacaataaggtggagcaacagaacaatgggaaagaggactgggagaggaatctaagaaccagatggcttcagctctctagaggagctgagcctattcacagtgcctaacctggaagcctgtgaggaacaggcctcaggcccttgccatgacctacttaggctacaatttcctttaaggcagcccctagctctgggaaggaatactggtagccagtggccagtgttcgccgtgggatcaccttctggccctccagcagcatgatggcacgctgtcgcccaaagacagcttgcaccacagcgctggggagagggatgaaggctcggcggcccaggcagcaccgaaggtctgggcaaactcagcattagtggcggaggatggagccactccattcaggaccccgtgcacgtggtttgcttcaagggcatgggtcaggattcctgccaggtccccgatgtgtatccaggggaagaattggtggcctgagccgatggggccccccaggcccaggcgaaagggcagcagcatgtggcccatggcaccacccccacggcccagcacaacccctagagcaggaaagagggaaggtacaggggtcttctcagccttgaaggagcccactgctcctcctggtttctgtttccccttcctcactctccccatgctgacttggctctgtaacagaagtgagcagtatggctgtctttaagacctcacaccttctcatctgcaggttggctagaagtggtggcatcctctcactctgtaattgtaatctcagctctcctaatcccatcacttccccagcccagagaagacattccaaccctgtctgatacccaggcccgtttctcacctgagcgcaccaccacctggcgtgtagaatctccaggaagcctggctgcagcttcccatttggttacgaggttggagaaaaagtcaaagtcccctcctgggctgtcttcatcatactccgcagtcagactgggctggtagtaagctgccggtggaacacaatcatttgccctgggtgtccttggtcctgcctggctctctgtagtggaggctccccttggcatcaccttctctggcccttaggatctccccatttggagacagagccatttggatattttccccttgaacttctccatgacctgaagcgttccttccctggaggaactctttggttgcagggctaaacttagaggctgctagagtgtagtggttaagaacaggaacttgggtaccaggcgcctgaattttaatcagctccctcatttattaactctctgacttgatgcaagttacttaacctctctgtatagaattttcacatctttaaaatgggaataatagtacctacctcatagggttgttgtaaggaataaatgataataagcataaaacacttca

SEQ ID NO: 367975 - DNA, 6233 bp, Homo sapiens
  misc_feature (4556)..(4556): n is a, c, g, or t
  misc_feature (4561)..(4561): n is a, c, g, or t
  misc_feature (4758)..(4758): n is a, c, g, or t
actcaagaaacagtttgcgtgcgatgtggacaagagaggtccccgttgggtgaggaacccgggaaggcccgcccagattcgggccccctgcccttgtcccctgggctgggggcgcgggcaaagcgggggcctggcgggcgctgagaggacctgaagccggcgcgggcggcggaggcgggctgggggcagcagccatgcctacctggggggcccgccccgcgtccccagatcgctttgcggtgtctgcggaggctgagaacaaggttcgggaacagcagccccatgtggagcgcatcttcagcgtgggggtgagcgtccttccgaaggactgtccggacaacccccacatctggctgcagctggagggccccaaggaaaacgccagcagagccaaggagtacctgaagggcctctgcagcccagaactgcaggatgaaatccactacccgcccaaactgcactgcatctttctgggagcccagggcttcttccttgactgcctggcctggagcacgtcagcccatctggtgcccagggcgccaggctcactgatgatcagtggcctgactgaagcctttgtcatggctcagagccgggtagaagagctggcagagcggctgagctgggacttcacgccaggaccatcttccggagcctctcagtgtactggagtgctgagagacttctctgccctgctgcagtccccgggggatgcccatagagaggctctgttgcagttgcccctggctgtccaggaggagctgctgagtctggtgcaggaggcgtctagtgggcaggggccaggagcactggcttcttgggaggggcggagctcagccttgctgggtgctcagtgccaaggagtgagagctccccctagtgacggcagggagtccctggacactggatctatgggacccggagattgcaggggagcaaggggagacacttacgctgtggagaaggagggagggaaacagggtggtcccagggagatggatttggggtggaaggagttgcctggggaagaggcgtgggagagagaagtggccctcaggccacagtcagtgggtggaggggcaagggagtcagcacccctgaaagggaaggccctggggaaggaggagatagctctgggaggaggagggttctgtgtccaccgtgagcctcccggtgcccatggctcctgtcacagggcagctcagtcccgaggagcctccctcctccagcggctccacaatgggaatgcctctcctccgagggtgcccagccctccacctgcaccggaacccccatggcactgtggagaccggggtgactgcggagaccggggagacgtgggggacaggggagacaagcagcagggcatggcacggggtcgggggcctcaatggaaacgaggcgcccgagggggcaacttggtgactggcacacagcgtttcaaggaggccctgcaggatcctttcaccctgtgccttgccaatgtgcctggccagccagacctccgccatattgtcattgacggcagcaacgtggccatggtgcatggcctccagcactacttctccagccggggcattgccattgctgtgcagtacttctgggaccgtggtcaccgtgacataactgtctttgtgcctcagtggcgcttcagtaaggatgccaaagtcagagagagtcacttcctgcaaaagctgtattccctcagcctgctctccctcacaccctcacgagtcatggatggcaagaggatctcctcctatgatgacaggttcatggtgaagctggctgaagagacagatgggataattgtctccaatgaccagttccgggacctggcggaggagtctgagaagtggatggcaatcatcagagaacgcctgctgccctttacctttgtgggaaacctcttcatggtacctgatgacccactggggcgaaacggccccaccctggatgaatttctgaagaagccagccaggacacaggggtcttctaaggctcagcatccttccaggggctttgcagaacatggtaaacagcagcaggggagagaagaggaaaaaggtagtggtggcattcggaagacccgggaaacagagcggctccggcggcagctgctggaggtgttttggggtcaggatcacaaagtggacttcatcctgcagcgggagccatactgccgggacatcaaccaactgtctgaggccctgctcagtcttaacttttgagcctcacctgcttgagtggctgccgccctgtcagctccagccgcctccagctcagccctttctgtgagagtccctctgctgctcactctgatccagaggcaccctgagttggtgctttggatcagggaagccactttgggacaggtccataaagtgaactgatcttaccgagtcaggacctcagccagctctcaagaggttctgctcagccttaacttctcaactttgccttagcacagggtttctgtagggagtgggggctgctagaggggattagttccggagactgagactgttggctccacctccaagctgagctagggtggagggcagggtgggcaggaagtgacaggaagttaagctgttcctctccctggctgctgctctggatggccagagaacaagatgctcccttgctgagctcctgggagcgtggaaggagatgctaggccctggcacagtgttatgtggactgggccacgatagggtggagtgagctagtgaagaaggcagagggagacttggcttctggtctcagctatgcctgttttgtgaccttgattgagttgcttgggctttacttctgcctacaaatcaggggaaaggtgcttggaccaagtctcaggtgtgtctgcctgtggctgcacaggctctctaaccgaaacctcactttcagagagatgtgggtcctttgtctccaggatccacaccctagattttaacactgcattctcactataacatgccctataatggctgcatcccttttgagcaacctccaaaatctacatttacacagtaggtaaattagggatgactgcattatcaaaatactctcagggttcctataaatggcagctctcctgttgtattcaggtgttgtttacagactaacaaatgtgttggcaaatccctggttagatgcacttcctggtgttgagatgaacacgtcgatttttcaccaatcgatgaagccatgctctgcaatgacaatattaatgtgatccgaccctaacattttctctatggaagacgtatgttgcataaagcaaggcacacttctgctttatgtgtgtgtgtatggggatgggaggacttaacggaagttgaaccagttggttctagatgaaccaattatctggaaaatgaaagaaccagagttggaaggcacttgactggccaccagaccaactctgctgttactgacatgctttcttcaccctgattcctagaggtcattgccctggatctgcttgaagtcctcctgtgccagggaatttactatctccagggtagcacattccctgtgtagacggtattaatcagtactccttactttagtgcagcctaaagtatgcttttctgttacatccacctttgaggctggtcatacctccaggaacaatacagagccagtcaacttcctggaatccaagaccagataaagaagtaggacaggtgcccctgggttctgttctgtgtgggcctgtggggagtctctagacaagatcttttccaggccctgacttctgcctccctctgagtggcacagggagttgaatactgcatggcgagtgtaatgatgatggggagggtccttgtgtcctcaccccttcctttttggtgatttacaccactgtaccatactgacccaggctgggggcaggtgtgttggagacaggctggtcaaagaggtgacaatgattaagagataacccagtggtccctgagaagagattggttagtatggcctgaactggtggctgggggaactgtgtctggtcaagttatggcagatgtcacagctttaggtaggtaaaaagggtcctagatgaaaaccttggagtttttttttttcctgatagggttgtttatacttcttgattggtttcttgccattttcactttcagtgatggtgggtgtgcagtagaccaaaagtgtcttctgcccttttgtgctaagggccctggttgactgagtggccccagtcagatgagaggcaagtcctaagcttcttatagacagggatgttgactttgttctgctgcagcctgataaactgggaccactgtgtggttagtaatgcacttgccatttggtgacacagactgaaggctatcctacacctgggccttacctcttcctctactggcatcctaatggcactctgacagcatccagggtgactacagggcccattggaaatggatcatcattctctcttctagtgtctatctttatcataacctgatgtcccaaacttgtgacaagttcttttggcaactgaaggaccaagaagggaaacggtgatgagagagactgcncattntaactttcaaaaccccgtctttggggaagaatcatctagggtgacattccttgaagtaaatcccaggagaatctaggccaaagagatgagccaaggttagtgagacaatttatttttattgcctaaactgcagagcattctctacacagcgtaaaggagaagtggggcagctgcaggacatgtagagaaaccaaacngggaaatcttacaaggagttgaaaagattaatgtcccaacctgatgagattacggccttgagacaataaggtggagcaacagaacaatgggaaagaggactgggagaggaatctaagaaccagatggcttcagctctctagaggagctgagcctattcacagtgcctaacctggaagcctgtgaggaacaggcctcaggcccttgccatgacctacttaggctacaatttcctttaaggcagcccctagctctgggaaggaatactggtagccagtggccagtgttcgccgtgggatcaccttctggccctccagcagcatgatggcacgctgtcgcccaaagacagcttgcaccacagcgctggggagagggatgaaggctcggcggcccaggcagcaccgaaggtctgggcaaactcagcattagtggcggaggatggagccactccattcaggaccccgtgcacgtggtttgcttcaagggcatgggtcaggattcctgccaggtccccgatgtgtatccaggggaagaattggtggcctgagccgatggggccccccaggcccaggcgaaagggcagcagcatgtggcccatggcaccacccccacggcccagcacaacccctagagcaggaaagagggaaggtacaggggtcttctcagccttgaaggagcccactgctcctcctggtttctgtttccccttcctcactctccccatgctgacttggctctgtaacagaagtgagcagtatggctgtctttaagacctcacaccttctcatctgcaggttggctagaagtggtggcatcctctcactctgtaattgtaatctcagctctcctaatcccatcacttccccagcccagagaagacattccaaccctgtctgatacccaggcccgtttctcacctgagcgcaccaccacctggcgtgtagaatctccaggaagcctggctgcagcttcccatttggttacgaggttggagaaaaagtcaaagtcccctcctgggctgtcttcatcatactccgcagtcagactgggctggtagtaagctgccggtggaacacaatcatttgccctgggtgtccttggtcctgcctggctctctgtagtggaggctccccttggcatcaccttctctggcccttaggatctccccatttggagacagagccatttggatattttccccttgaacttctccatgacctgaagcgttccttccctggaggaactctttggttgcagggctaaacttagaggctgctagagtgtagtggttaagaacaggaacttgggtaccaggcgcctgaattttaatcagctccctcatttattaactctctgacttgatgcaagttacttaacctctctgtatagaattttcacatctttaaaatgggaataatagtacctacctcatagggttgttgtaaggaataaatgataataagcataaaacacttca

SEQ ID NO: 367976 - DNA, 4460 bp, Homo sapiens
  misc_feature (2783)..(2783): n is a, c, g, or t
  misc_feature (2788)..(2788): n is a, c, g, or t
  misc_feature (2985)..(2985): n is a, c, g, or t
tagcgatcgttatgaggaggagctgagaagtgcatggcagtatcagagaacgcctgctgccctttacctttgtgggaaacctcttcatggtacctgatgacccactggggcgaaacggccccaccctggatgaatttctgaagaagccagccaggacacaggggtcttctaaggctcagcatccttccaggggctttgcagaacatggtaaacagcagcaggggagagaagaggaaaaaggtagtggtggcattcggaagacccgggaaacagagcggctccggcggcagctgctggaggtgttttggggtcaggatcacaaagtggacttcatcctgcagcgggagccatactgccgggacatcaaccaactgtctgaggccctgctcagtcttaacttttgagcctcacctgcttgagtggctgccgccctgtcagctccagccgcctccagctcagccctttctgtgagagtccctctgctgctcactctgatccagaggcaccctgagttggtgctttggatcagggaagccactttgggacaggtccataaagtgaactgatcttaccgagtcaggacctcagccagctctcaagaggttctgctcagccttaacttctcaactttgccttagcacagggtttctgtagggagtgggggctgctagaggggattagttccggagactgagactgttggctccacctccaagctgagctagggtggagggcagggtgggcaggaagtgacaggaagttaagctgttcctctccctggctgctgctctggatggccagagaacaagatgctcccttgctgagctcctgggagcgtggaaggagatgctaggccctggcacagtgttatgtggactgggccacgatagggtggagtgagctagtgaagaaggcagagggagacttggcttctggtctcagctatgcctgttttgtgaccttgattgagttgcttgggctttacttctgcctacaaatcaggggtaaaaatacctgttgggaggagaaatgagaacatagaggaaagcctcttggaggaaaggtgcttggaccaagtctcaggtgtgtctgcctgtggctgcacaggctctctaaccgaaacctcactttcagagagatgtgggtcctttgtctccaggatccacaccctagattttaacactgcattctcactataacatgccctataatggctgcatcccttttgagcaacctccaaaatctacatttacacagtaggtaaattagggatgactgcattatcaaaatactctcagggttcctataaatggcagctctcctgttgtattcaggtgttgtttacagactaacaaatgtgttggcaaatccctggttagatgcacttcctggtgttgagatgaacacgtcgatttttcaccaatcgatgaagccatgctctgcaatgacaatattaatgtgatccgaccctaacattttctctatggaagacgtatgttgcataaagcaaggcacacttctgctttatgtgtgtgtgtatggggatgggaggacttaacggaagttgaaccagttggttctagatgaaccaattatctggaaaatgaaagaaccagagttggaaggcacttgactggccaccagaccaactctgctgttactgacatgctttcttcaccctgattcctagaggtcattgccctggatctgcttgaagtcctcctgtgccagggaatttactatctccagggtagcacattccctgtgtagacggtattaatcagtactccttactttagtgcagcctaaagtatgcttttctgttacatccacctttgaggctggtcatacctccaggaacaatacagagccagtcaacttcctggaatccaagaccagataaagaagtaggacaggtgcccctgggttctgttctgtgtgggcctgtggggagtctctagacaagatcttttccaggccctgacttctgcctccctctgagtggcacagggagttgaatactgcatggcgagtgtaatgatgatggggagggtccttgtgtcctcaccccttcctttttggtgatttacaccactgtaccatactgacccaggctgggggcaggtgtgttggagacaggctggtcaaagaggtgacaatgattaagagataacccagtggtccctgagaagagattggttagtatggcctgaactggtggctgggggaactgtgtctggtcaagttatggcagatgtcacagctttaggtaggtaaaaagggtcctagatgaaaaccttggagtttttttttttcctgatagggttgtttatacttcttgattggtttcttgccattttcactttcagtgatggtgggtgtgcagtagaccaaaagtgtcttctgcccttttgtgctaagggccctggttgactgagtggccccagtcagatgagaggcaagtcctaagcttcttatagacagggatgttgactttgttctgctgcagcctgataaactgggaccactgtgtggttagtaatgcacttgccatttggtgacacagactgaaggctatcctacacctgggccttacctcttcctctactggcatcctaatggcactctgacagcatccagggtgactacagggcccattggaaatggatcatcattctctcttctagtgtctatctttatcataacctgatgtcccaaacttgtgacaagttcttttggcaactgaaggaccaagaagggaaacggtgatgagagagactgcncattntaactttcaaaaccccgtctttggggaagaatcatctagggtgacattccttgaagtaaatcccaggagaatctaggccaaagagatgagccaaggttagtgagacaatttatttttattgcctaaactgcagagcattctctacacagcgtaaaggagaagtggggcagctgcaggacatgtagagaaaccaaacngggaaatcttacaaggagttgaaaagattaatgtcccaacctgatgagattacggccttgagacaataaggtggagcaacagaacaatgggaaagaggactgggagaggaatctaagaaccagatggcttcagctctctagaggagctgagcctattcacagtgcctaacctggaagcctgtgaggaacaggcctcaggcccttgccatgacctacttaggctacaatttcctttaaggcagcccctagctctgggaaggaatactggtagccagtggccagtgttcgccgtgggatcaccttctggccctccagcagcatgatggcacgctgtcgcccaaagacagcttgcaccacagcgctggggagagggatgaaggctcggcggcccaggcagcaccgaaggtctgggcaaactcagcattagtggcggaggatggagccactccattcaggaccccgtgcacgtggtttgcttcaagggcatgggtcaggattcctgccaggtccccgatgtgtatccaggggaagaattggtggcctgagccgatggggccccccaggcccaggcgaaagggcagcagcatgtggcccatggcaccacccccacggcccagcacaacccctagagcaggaaagagggaaggtacaggggtcttctcagccttgaaggagcccactgctcctcctggtttctgtttccccttcctcactctccccatgctgacttggctctgtaacagaagtgagcagtatggctgtctttaagacctcacaccttctcatctgcaggttggctagaagtggtggcatcctctcactctgtaattgtaatctcagctctcctaatcccatcacttccccagcccagagaagacattccaaccctgtctgatacccaggcccgtttctcacctgagcgcaccaccacctggcgtgtagaatctccaggaagcctggctgcagcttcccatttggttacgaggttggagaaaaagtcaaagtcccctcctgggctgtcttcatcatactccgcagtcagactgggctggtagtaagctgccggtggaacacaatcatttgccctgggtgtccttggtcctgcctggctctctgtagtggaggctccccttggcatcaccttctctggcccttaggatctccccatttggagacagagccatttggatattttccccttgaacttctccatgacctgaagcgttccttccctggaggaactctttggttgcagggctaaacttagaggctgctagagtgtagtggttaagaacaggaacttgggtaccaggcgcctgaattttaatcagctccctcatttattaactctctgacttgatgcaagttacttaacctctctgtatagaattttcacatctttaaaatgggaataatagtacctacctcatagggttgttgtaaggaataaatgataataagcataaaacacttca

SEQ ID NO: 367977 - DNA, 3070 bp, Homo sapiens
actcaagaaacagtttgcgtgcgatgtggacaagagaggtccccgttgggtgaggaacccgggaaggcccgcccagattcgggccccctgcccttgtcccctgggctgggggcgcgggcaaagcgggggcctggcgggcgctgagaggacctgaagccggcgcgggcggcggaggcgggctgggggcagcagccatgcctacctggggggcccgccccgcgtccccagatcgctttgcggtgtctgcggaggctgagaacaaggttcgggaacagcagccccatgtggagcgcatcttcagcgtgggggtgagcgtccttccgaaggactgtccggacaacccccacatctggctgcagctggagggccccaaggaaaacgccagcagagccaaggagtacctgaagggcctctgcagcccagaactgcaggatgaaatccactacccgcccaaactgcactgcatctttctgggagcccagggcttcttccttgactgcctggcctggagcacgtcagcccatctggtgcccagggcgccaggctcactgatgatcagtggcctgactgaagcctttgtcatggctcagagccgggtagaagagctggcagagcggctgagctgggacttcacgccaggaccatcttccggagcctctcagtgtactggagtgctgagagacttctctgccctgctgcagtccccgggggatgcccatagagaggctctgttgcagttgcccctggctgtccaggaggagctgctgagtctggtgcaggaggcgtctagtgggcaggggccaggagcactggcttcttgggaggggcggagctcagccttgctgggtgctcagtgccaaggagtgagagctccccctagtgacggcagggagtccctggacactggatctatgggacccggagattgcaggggagcaaggggagacacttacgctgtggagaaggagggagggaaacagggtggtcccagggagatggatttggggtggaaggagttgcctggggaagaggcgtgggagagagaagtggccctcaggccacagtcagtgggtggaggggcaagggagtcagcacccctgaaagggaaggccctggggaaggaggagatagctctgggaggaggagggttctgtgtccaccgtgagcctcccggtgcccatggctcctgtcacagggcagctcagtcccgaggagcctccctcctccagcggctccacaatgggaatgcctctcctccgagggtgcccagccctccacctgcaccggaacccccatggcactgtggagaccggggtgactgcggagaccggggagacgtgggggacaggggagacaagcagcagggcatggcacggggtcgggggcctcaatggaaacgaggcgcccgagggggcaacttggtgactggcacacagcgtttcaaggaggccctgcaggatcctttcaccctgtgccttgccaatgtgcctggccagccagacctccgccatattgtcattgacggcagcaacgtggccatggtgcatggcctccagcactacttctccagccggggcattgccattgctgtgcagtacttctgggaccgtggtcaccgtgacataactgtctttgtgcctcagtggcgcttcagtaaggatgccaaagtcagagagagtcacttcctgcaaaagctgtattccctcagcctgctctccctcacaccctcacgagtcatggatggcaagaggatctcctcctatgatgacaggttcatggtgaagctggctgaagagacagatgggataattgtctccaatgaccagttccgggacctggcggaggagtctgagaagtggatggcaatcatcagagaacgcctgctgccctttacctttgtgggaaacctcttcatggtacctgatgacccactggggcgaaacggccccaccctggatgaatttctgaagaagccagccaggacacaggggtcttctaaggctcagcatccttccaggggctttgcagaacatggtaaacagcagcaggggagagaagaggaaaaaggtagtggtggcattcggaagacccgggaaacagagcggctccggcggcagctgctggaggtgttttggggtcaggatcacaaagtggacttcatcctgcagcgggagccatactgccgggacatcaaccaactgtctgaggccctgctcagtcttaacttttgagcctcacctgcttgagtggctgccgccctgtcagctccagccgcctccagctcagccctttctgtgagagtccctctgctgctcactctgatccagaggcaccctgagttggtgctttggatcagggaagccactttgggacaggtccataaagtgaactgatcttaccaaaaaaaaaaaaaaaaaaaaaaaaaaatttggggggcgccttgggcctggaaaagtttttaaacccaattggtgggggggggggccccgaggttaggcggaacccggggccaaggcgttgtgcccagaggaaactcgtggccagagaacagaggggcgggttttctccccaccaataaaaaaagcgccgcgggggcaagaccccgaggggccttgtggaaacacactcccgagagtggaggtccggagggcccacagacgggcttctaccacaacgggggtctcccaggcggcagtgcaaatttcaaaatgcgccggcgcgggggaaaagaaacacacaaaaccaaaacgaacaagaaaccagacacacgactacgaccacaaactcaaggaggaagaaagagggaggagcgggggcgagagagacaagaagcaaggacaggacagagagagcacatacaggcaaagacacacgcactaaaacgcacggagaaacatgaggcaaaacaacaaacgacagcagatcgaccgagcgaggagaccgcacacatgagaccagccggccgaacgcccagcaccacgagataacgccacgagcacgcccacgcgagacactgccaagacccagaacccaccacccgcacccgccaacaacaccaccgaccccaaca

SEQ ID NO: 367978 - DNA, 616 bp, Homo sapiens
  misc_feature (42)..(42): n is a, c, g, or t
ctttgtttaatgcttattatcatttattccttacaacaaccntatgaggtaggtactattattcccattttaaagatgtgaaaattctatacagagaggttaagtaacttgcatcaagtcagagagttaataaatgagggagctgattaaaattcaggcgcctggtacccaagttcctgttcttaaccactacaccctagctgccggtggaacacaatcatttgccctgggtgtccttggtcctgcctggctctctgtagtggaggctccccttggcatcaccttctctggcccttaggatctccccatttggagacagagccatttggatattttccccttgaacttctccatgacctgaagcgttccttccctggaggaactctttggttgcagggctaaacttagaggctgctagagtgtagtggttaagaacaggaacttgggtaccaggcgcctgaattttaatcagctccctcatttattaactctctgacttgatgcaagttacttaacctctctgtatagaattttcacatctttaaaatgggaataatagtacctacctcatagggttgttgtaaggaataaatgataataagcataaaacacttca

SEQ ID NO: 367979 - DNA, 467 bp, Homo sapiens
ccgctgagaactgggcacagatgcagatgtttttctaaagccagctctgctctggccatggggtgaaaactctgggaaggaggtgaagttttcttgaaggatggagccagcagcttctggtgatactggtctcggttgtctgggaggtgggcaagggccccctctgtgaccacacattatctttcgccatccagcctgctgccctttacctttgtgggaaacctcttcatggtacctgatgacccactggggcgaaacggccccaccctggatgaatttctgaagaagccagccaggtaatcaatcccctagactacttacaggcagcccccacccctggccctctctcagcaggcccagagacttgggtggaagtgtgacctcagtttgggccagcttaattttgcagtggtttgagttgcattggccttggcctttataagcttcccaggggatcctgacataga

SEQ ID NO: 367980 - DNA, 6232 bp, Homo sapiens
  misc_feature (67)..(67): n is a, c, g, or t
  misc_feature (4555)..(4555): n is a, c, g, or t
  misc_feature (4560)..(4560): n is a, c, g, or t
  misc_feature (4757)..(4757): n is a, c, g, or t
gggagagaaaggagggatgaagccgcctgcccactggacgggagggctgcagccagagcttcagggnagccctgctggatgggacagcactgagggctggacctggggggatggagaacatgggctgggggcagcagccatgcctacctggggggcccgccccgcgtccccagatcgctttgcggtgtctgcggaggctgagaacaaggttcgggaacagcagccccatgtggagcgcatcttcagcgtgggggtgagcgtccttccgaaggactgtccggacaacccccacatctggctgcagctggagggccccaaggaaaacgccagcagagccaaggagtacctgaagggcctctgcagcccagaactgcaggatgaaatccactacccgcccaaactgcactgcatctttctgggagcccagggcttcttccttgactgcctggcctggagcacgtcagcccatctggtgcccagggcgccaggctcactgatgatcagtggcctgactgaagcctttgtcatggctcagagccgggtagaagagctggcagagcggctgagctgggacttcacgccaggaccatcttccggagcctctcagtgtactggagtgctgagagacttctctgccctgctgcagtccccgggggatgcccatagagaggctctgttgcagttgcccctggctgtccaggaggagctgctgagtctggtgcaggaggcgtctagtgggcaggggccaggagcactggcttcttgggaggggcggagctcagccttgctgggtgctcagtgccaaggagtgagagctccccctagtgacggcagggagtccctggacactggatctatgggacccggagattgcaggggagcaaggggagacacttacgctgtggagaaggagggagggaaacagggtggtcccagggagatggatttggggtggaaggagttgcctggggaagaggcgtgggagagagaagtggccctcaggccacagtcagtgggtggaggggcaagggagtcagcacccctgaaagggaaggccctggggaaggaggagatagctctgggaggaggagggttctgtgtccaccgtgagcctcccggtgcccatggctcctgtcacagggcagctcagtcccgaggagcctccctcctccagcggctccacaatgggaatgcctctcctccgagggtgcccagccctccacctgcaccggaacccccatggcactgtggagaccggggtgactgcggagaccggggagacgtgggggacaggggagacaagcagcagggcatggcacggggtcgggggcctcaatggaaacgaggcgcccgagggggcaacttggtgactggcacacagcgtttcaaggaggccctgcaggatcctttcaccctgtgccttgccaatgtgcctggccagccagacctccgccatattgtcattgacggcagcaacgtggccatggtgcatggcctccagcactacttctccagccggggcattgccattgctgtgcagtacttctgggaccgtggtcaccgtgacataactgtctttgtgcctcagtggcgcttcagtaaggatgccaaagtcagagagagtcacttcctgcaaaagctgtattccctcagcctgctctccctcacaccctcacgagtcatggatggcaagaggatctcctcctatgatgacaggttcatggtgaagctggctgaagagacagatgggataattgtctccaatgaccagttccgggacctggcggaggagtctgagaagtggatggcaatcatcagagaacgcctgctgccctttacctttgtgggaaacctcttcatggtacctgatgacccactggggcgaaacggccccaccctggatgaatttctgaagaagccagccaggacacaggggtcttctaaggctcagcatccttccaggggctttgcagaacatggtaaacagcagcaggggagagaagaggaaaaaggtagtggtggcattcggaagacccgggaaacagagcggctccggcggcagctgctggaggtgttttggggtcaggatcacaaagtggacttcatcctgcagcgggagccatactgccgggacatcaaccaactgtctgaggccctgctcagtcttaacttttgagcctcacctgcttgagtggctgccgccctgtcagctccagccgcctccagctcagccctttctgtgagagtccctctgctgctcactctgatccagaggcaccctgagttggtgctttggatcagggaagccactttgggacaggtccataaagtgaactgatcttaccgagtcaggacctcagccagctctcaagaggttctgctcagccttaacttctcaactttgccttagcacagggtttctgtagggagtgggggctgctagaggggattagttccggagactgagactgttggctccacctccaagctgagctagggtggagggcagggtgggcaggaagtgacaggaagttaagctgttcctctccctggctgctgctctggatggccagagaacaagatgctcccttgctgagctcctgggagcgtggaaggagatgctaggccctggcacagtgttatgtggactgggccacgatagggtggagtgagctagtgaagaaggcagagggagacttggcttctggtctcagctatgcctgttttgtgaccttgattgagttgcttgggctttacttctgcctacaaatcaggggtaaaaatacctgttgggaggagaaatgagaacatagaggaaagcctcttggaggaaaggtgcttggaccaagtctcaggtgtgtctgcctgtggctgcacaggctctctaaccgaaacctcactttcagagagatgtgggtcctttgtctccaggatccacaccctagattttaacactgcattctcactataacatgccctataatggctgcatcccttttgagcaacctccaaaatctacatttacacagtaggtaaattagggatgactgcattatcaaaatactctcagggttcctataaatggcagctctcctgttgtattcaggtgttgtttacagactaacaaatgtgttggcaaatccctggttagatgcacttcctggtgttgagatgaacacgtcgatttttcaccaatcgatgaagccatgctctgcaatgacaatattaatgtgatccgaccctaacattttctctatggaagacgtatgttgcataaagcaaggcacacttctgctttatgtgtgtgtgtatggggatgggaggacttaacggaagttgaaccagttggttctagatgaaccaattatctggaaaatgaaagaaccagagttggaaggcacttgactggccaccagaccaactctgctgttactgacatgctttcttcaccctgattcctagaggtcattgccctggatctgcttgaagtcctcctgtgccagggaatttactatctccagggtagcacattccctgtgtagacggtattaatcagtactccttactttagtgcagcctaaagtatgcttttctgttacatccacctttgaggctggtcatacctccaggaacaatacagagccagtcaacttcctggaatccaagaccagataaagaagtaggacaggtgcccctgggttctgttctgtgtgggcctgtggggagtctctagacaagatcttttccaggccctgacttctgcctccctctgagtggcacagggagttgaatactgcatggcgagtgtaatgatgatggggagggtccttgtgtcctcaccccttcctttttggtgatttacaccactgtaccatactgacccaggctgggggcaggtgtgttggagacaggctggtcaaagaggtgacaatgattaagagataacccagtggtccctgagaagagattggttagtatggcctgaactggtggctgggggaactgtgtctggtcaagttatggcagatgtcacagctttaggtaggtaaaaagggtcctagatgaaaaccttggagtttttttttttcctgatagggttgtttatacttcttgattggtttcttgccattttcactttcagtgatggtgggtgtgcagtagaccaaaagtgtcttctgcccttttgtgctaagggccctggttgactgagtggccccagtcagatgagaggcaagtcctaagcttcttatagacagggatgttgactttgttctgctgcagcctgataaactgggaccactgtgtggttagtaatgcacttgccatttggtgacacagactgaaggctatcctacacctgggccttacctcttcctctactggcatcctaatggcactctgacagcatccagggtgactacagggcccattggaaatggatcatcattctctcttctagtgtctatctttatcataacctgatgtcccaaacttgtgacaagttcttttggcaactgaaggaccaagaagggaaacggtgatgagagagactgcncattntaactttcaaaaccccgtctttggggaagaatcatctagggtgacattccttgaagtaaatcccaggagaatctaggccaaagagatgagccaaggttagtgagacaatttatttttattgcctaaactgcagagcattctctacacagcgtaaaggagaagtggggcagctgcaggacatgtagagaaaccaaacngggaaatcttacaaggagttgaaaagattaatgtcccaacctgatgagattacggccttgagacaataaggtggagcaacagaacaatgggaaagaggactgggagaggaatctaagaaccagatggcttcagctctctagaggagctgagcctattcacagtgcctaacctggaagcctgtgaggaacaggcctcaggcccttgccatgacctacttaggctacaatttcctttaaggcagcccctagctctgggaaggaatactggtagccagtggccagtgttcgccgtgggatcaccttctggccctccagcagcatgatggcacgctgtcgcccaaagacagcttgcaccacagcgctggggagagggatgaaggctcggcggcccaggcagcaccgaaggtctgggcaaactcagcattagtggcggaggatggagccactccattcaggaccccgtgcacgtggtttgcttcaagggcatgggtcaggattcctgccaggtccccgatgtgtatccaggggaagaattggtggcctgagccgatggggccccccaggcccaggcgaaagggcagcagcatgtggcccatggcaccacccccacggcccagcacaacccctagagcaggaaagagggaaggtacaggggtcttctcagccttgaaggagcccactgctcctcctggtttctgtttccccttcctcactctccccatgctgacttggctctgtaacagaagtgagcagtatggctgtctttaagacctcacaccttctcatctgcaggttggctagaagtggtggcatcctctcactctgtaattgtaatctcagctctcctaatcccatcacttccccagcccagagaagacattccaaccctgtctgatacccaggcccgtttctcacctgagcgcaccaccacctggcgtgtagaatctccaggaagcctggctgcagcttcccatttggttacgaggttggagaaaaagtcaaagtcccctcctgggctgtcttcatcatactccgcagtcagactgggctggtagtaagctgccggtggaacacaatcatttgccctgggtgtccttggtcctgcctggctctctgtagtggaggctccccttggcatcaccttctctggcccttaggatctccccatttggagacagagccatttggatattttccccttgaacttctccatgacctgaagcgttccttccctggaggaactctttggttgcagggctaaacttagaggctgctagagtgtagtggttaagaacaggaacttgggtaccaggcgcctgaattttaatcagctccctcatttattaactctctgacttgatgcaagttacttaacctctctgtatagaattttcacatctttaaaatgggaataatagtacctacctcatagggttgttgtaaggaataaatgataataagcataaaacacttca

SEQ ID NO: 367981 - DNA, 6573 bp, Homo sapiens
  misc_feature (4610)..(4610): n is a, c, g, or t
  misc_feature (4615)..(4615): n is a, c, g, or t
  misc_feature (4812)..(4812): n is a, c, g, or t
actcaagaaacagtttgcgtgcgatgtggacaagagaggtccccgttgggtgaggaacccgggaaggcccgcccagattcgggccccctgcccttgtcccctgggctgggggcgcgggcaaagcgggggcctggcgggcgctgagaggacctgaagccggcgcgggcggcggaggcgggctgggggcagcagccatgcctacctggggggcccgccccgcgtccccagatcgctttgcggtgtctgcggaggctgagaacaaggttcgggaacagcagccccatgtggagcgcatcttcagcgtgggggtgagcgtccttccgaaggactgtccggacaacccccacatctggctgcagctggagggccccaaggaaaacgccagcagagccaaggagtacctgaagggcctctgcagcccagaactgcaggatgaaatccactacccgcccaaactgcactgcatctttctgggagcccagggcttcttccttgactgcctggcctggagcacgtcagcccatctggtgcccagggcgccaggctcactgatgatcagtggcctgactgaagcctttgtcatggctcagagccgggtagaagagctggcagagcggctgagctgggacttcacgccaggaccatcttccggagcctctcagtgtactggagtgctgagagacttctctgccctgctgcagtccccgggggatgcccatagagaggctctgttgcagttgcccctggctgtccaggaggagctgctgagtctggtgcaggaggcgtctagtgggcaggggccaggagcactggcttcttgggaggggcggagctcagccttgctgggtgctcagtgccaaggagtgagagctccccctagtgacggcagggagtccctggacactggatctatgggacccggagattgcaggggagcaaggggagacacttacgctgtggagaaggagggagggaaacagggtggtcccagggagatggatttggggtggaaggagttgcctggggaagaggcgtgggagagagaagtggccctcaggccacagtcagtgggtggaggggcaagggagtcagcacccctgaaagggaaggccctggggaaggaggagatagctctgggaggaggagggttctgtgtccaccgtgagcctcccggtgcccatggctcctgtcacagggcagctcagtcccgaggagcctccctcctccagcggctccacaatgggaatgcctctcctccgagggtgcccagccctccacctgcaccggaacccccatggcactgtggagaccggggtgactgcggagaccggggagacgtgggggacaggggagacaagcagcagggcatggcacggggtcgggggcctcaatggaaacgaggcgcccgagggggcaacttggtgactggcacacagcgtttcaaggaggccctgcaggatcctttcaccctgtgccttgccaatgtgcctggccagccagacctccgccatattgtcattgacggcagcaacgtggccatggtgcatggcctccagcactacttctccagccggggcattgccattgctgtgcagtacttctgggaccgtggtcaccgtgacataactgtctttgtgcctcagtggcgcttcagtaaggatgccaaagtcagagagagtcacttcctgcaaaagctgtattccctcagcctgctctccctcacaccctcacgagtcatggatggcaagaggatctcctcctatgatgacaggttcatggtgaagctggctgaagagacagatgggataattgtctccaatgaccagttccgggacctggcggaggagtctgagaagtggatggcaatcatcagagaacgcctgctgccctttacctttgtgggaaacctcttcatggtacctgatgacccactggggcgaaacggccccaccctggatgaatttctgaagaagccagccaggacacaggggtcttctaaggctcagcatccttccaggggctttgcagaacatggtaaacagcagcaggggagagaagaggaaaaaggtagtggtggcattcggaagacccgggaaacagagcggctccggcggcagctgctggaggtgttttggggtcaggatcacaaagtggacttcatcctgcagcgggagccatactgccgggacatcaaccaactgtctgaggccctgctcagtcttaacttttgagcctcacctgcttgagtggctgccgccctgtcagctccagccgcctccagctcagccctttctgtgagagtccctctgctgctcactctgatccagaggcaccctgagttggtgctttggatcagggaagccactttgggacaggtccataaagtgaactgatcttaccgagtcaggacctcagccagctctcaagaggttctgctcagccttaacttctcaactttgccttagcacagggtttctgtagggagtgggggctgctagaggggattagttccggagactgagactgttggctccacctccaagctgagctagggtggagggcagggtgggcaggaagtgacaggaagttaagctgttcctctccctggctgctgctctggatggccagagaacaagatgctcccttgctgagctcctgggagcgtggaaggagatgctaggccctggcacagtgttatgtggactgggccacgatagggtggagtgagctagtgaagaaggcagagggagacttggcttctggtctcagctatgcctgttttgtgaccttgattgagttgcttgggctttacttctgcctacaaatcaggggtaaaaatacctgttgggaggagaaatgagaacatagaggaaagcctcttggaggaaaggtgcttggaccaagtctcaggtgtgtctgcctgtggctgcacaggctctctaaccgaaacctcactttcagagagatgtgggtcctttgtctccaggatccacaccctagattttaacactgcattctcactataacatgccctataatggctgcatcccttttgagcaacctccaaaatctacatttacacagtaggtaaattagggatgactgcattatcaaaatactctcagggttcctataaatggcagctctcctgttgtattcaggtgttgtttacagactaacaaatgtgttggcaaatccctggttagatgcacttcctggtgttgagatgaacacgtcgatttttcaccaatcgatgaagccatgctctgcaatgacaatattaatgtgatccgaccctaacattttctctatggaagacgtatgttgcataaagcaaggcacacttctgctttatgtgtgtgtgtatggggatgggaggacttaacggaagttgaaccagttggttctagatgaaccaattatctggaaaatgaaagaaccagagttggaaggcacttgactggccaccagaccaactctgctgttactgacatgctttcttcaccctgattcctagaggtcattgccctggatctgcttgaagtcctcctgtgccagggaatttactatctccagggtagcacattccctgtgtagacggtattaatcagtactccttactttagtgcagcctaaagtatgcttttctgttacatccacctttgaggctggtcatacctccaggaacaatacagagccagtcaacttcctggaatccaagaccagataaagaagtaggacaggtgcccctgggttctgttctgtgtgggcctgtggggagtctctagacaagatcttttccaggccctgacttctgcctccctctgagtggcacagggagttgaatactgcatggcgagtgtaatgatgatggggagggtccttgtgtcctcaccccttcctttttggtgatttacaccactgtaccatactgacccaggctgggggcaggtgtgttggagacaggctggtcaaagaggtgacaatgattaagagataacccagtggtccctgagaagagattggttagtatggcctgaactggtggctgggggaactgtgtctggtcaagttatggcagatgtcacagctttaggtaggtaaaaagggtcctagatgaaaaccttggagtttttttttttcctgatagggttgtttatacttcttgattggtttcttgccattttcactttcagtgatggtgggtgtgcagtagaccaaaagtgtcttctgcccttttgtgctaagggccctggttgactgagtggccccagtcagatgagaggcaagtcctaagcttcttatagacagggatgttgactttgttctgctgcagcctgataaactgggaccactgtgtggttagtaatgcacttgccatttggtgacacagactgaaggctatcctacacctgggccttacctcttcctctactggcatcctaatggcactctgacagcatccagggtgactacagggcccattggaaatggatcatcattctctcttctagtgtctatctttatcataacctgatgtcccaaacttgtgacaagttcttttggcaactgaaggaccaagaagggaaacggtgatgagagagactgcncattntaactttcaaaaccccgtctttggggaagaatcatctagggtgacattccttgaagtaaatcccaggagaatctaggccaaagagatgagccaaggttagtgagacaatttatttttattgcctaaactgcagagcattctctacacagcgtaaaggagaagtggggcagctgcaggacatgtagagaaaccaaacngggaaatcttacaaggagttgaaaagattaatgtcccaacctgatgagattacggccttgagacaataaggtggagcaacagaacaatgggaaagaggactgggagaggaatctaagaaccagatggcttcagctctctagaggagctgagcctattcacagtgcctaacctggaagcctgtgaggaacaggcctcaggcccttgccatgacctacttaggctacaatttcctttaaggcagcccctagctctgggaaggaatactggtagccagtggccagtgttcgccgtgggatcaccttctggccctccagcagcatgatggcacgctgtcgcccaaagacagcttgcaccacagcgctggggagagggatgaaggctcggcggcccaggcagcaccgaaggtctgggcaaactcagcattagtggcggaggatggagccactccattcaggaccccgtgcacgtggtttgcttcaagggcatgggtcaggattcctgccaggtccccgatgtgtatccaggggaagaattggtggcctgagccgatggggccccccaggcccaggcgaaagggcagcagcatgtggcccatggcaccacccccacggcccagcacaacccctagagcaggaaagagggaaggtacaggggtcttctcagccttgaaggagcccactgctcctcctggtttctgtttccccttcctcactctccccatgctgacttggctctgtaacagaagtgagcagtatggctgtctttaagacctcacaccttctcatctgcaggttggctagaagtggtggcatcctctcactctgtaattgtaatctcagctctcctaatcccatcacttccccagcccagagaagacattccaaccctgtctgatacccaggcccgtttctcacctgagcgcaccaccacctggcgtgtagaatctccaggaagcctggctgcagcttcccatttggttacgaggttggagaaaaagtcaaagtcccctcctgggctgtcttcatcatactccgcagtcagactgggctggtagtaagctgccggtggaacacaatcatttgccctgggtgtccttggtcctgcctggctctctgtagtggaggctccccttggcatcaccttctctggcccttaggatctccccatttggagacagagccatttggatattttccccttgaacttctccatgacctgaagcgttccttccctggaggaactctttggttgcagggctaaacttagaggctgctagagtgtagtggttaagaacaggaacttgggtaccaggcgcctgaattttaatcagctccctcatttattaactctctgacttgatgcaagttacttaacctctctgtatagaattttcacatctttaaaatgggaataatagtacctacctcatagggttgttgtaaggaataaatgataataagcataaaacacttcaaatagtggctggtgtgtataattgtttgcaattacttggtcccaaaggtgaccaggaactctgttcctaaagaactatggtgtgagaagtaagggactttgggataggtggacttttccctggcattgagtgatgccactccccactgttttttcagggtctcaatttcttagtgaaagtacacaaaggttaggagaaacatgcatggatcaagggcctaggaagtcattttgcctggaaaagaccagtgctctggtgtgtgcatagctacagaggtctgagttac

SEQ ID NO: 367982 - DNA, 3406 bp, Homo sapiens
actcaagaaacagtttgcgtgcgatgtggacaagagaggtccccgttgggtgaggaacccgggaaggcccgcccagattcgggccccctgcccttgtcccctgggctgggggcgcgggcaaagcgggggcctggcgggcgctgagaggacctgaagccggcgcgggcggcggaggcgggctgggggcagcagccatgcctacctggggggcccgccccgcgtccccagatcgctttgcggtgtctgcggaggctgagaacaaggttcgggaacagcagccccatgtggagcgcatcttcagcgtgggggtgagcgtccttccgaaggactgtccggacaacccccacatctggctgcagctggagggccccaaggaaaacgccagcagagccaaggagtacctgaagggcctctgcagcccagaactgcaggatgaaatccactacccgcccaaactgcactgcatctttctgggagcccagggcttcttccttgactgcctggcctggagcacgtcagcccatctggtgcccagggcgccaggctcactgatgatcagtggcctgactgaagcctttgtcatggctcagagccgggtagaagagctggcagagcggctgagctgggacttcacgccaggaccatcttccggagcctctcagtgtactggagtgctgagagacttctctgccctgctgcagtccccgggggatgcccatagagaggctctgttgcagttgcccctggctgtccaggaggagctgctgagtctggtgcaggaggcgtctagtgggcaggggccaggagcactggcttcttgggaggggcggagctcagccttgctgggtgctcagtgccaaggagtgagagctccccctagtgacggcagggagtccctggacactggatctatgggacccggagattgcaggggagcaaggggagacacttacgctgtggagaaggagggagggaaacagggtggtcccagggagatggatttggggtggaaggagttgcctggggaagaggcgtgggagagagaagtggccctcaggccacagtcagtgggtggaggggcaagggagtcagcacccctgaaagggaaggccctggggaaggaggagatagctctgggaggaggagggttctgtgtccaccgtgagcctcccggtgcccatggctcctgtcacagggcagctcagtcccgaggagcctccctcctccagcggctccacaatgggaatgcctctcctccgagggtgcccagccctccacctgcaccggaacccccatggcactgtggagaccggggtgactgcggagaccggggagacgtgggggacaggggagacaagcagcagggcatggcacggggtcgggggcctcaatggaaacgaggcgcccgagggggcaacttggtgactggcacacagcgtttcaaggaggccctgcaggatcctttcaccctgtgccttgccaatgtgcctggccagccagacctccgccatattgtcattgacggcagcaacgtggccatggtgcatggcctccagcactacttctccagccggggcattgccattgctgtgcagtacttctgggaccgtggtcaccgtgacataactgtctttgtgcctcagtggcgcttcagtaaggatgccaaagtcagagagagtcacttcctgcaaaagctgtattccctcagcctgctctccctcacaccctcacgagtcatggatggcaagaggatctcctcctatgatgacaggttcatggtgaagctggctgaagagacagatgggataattgtctccaatgaccagttccgggacctggcggaggagtctgagaagtggatggcaatcatcagagaacgcctgctgccctttacctttgtgggaaacctcttcatggtacctgatgacccactggggcgaaacggccccaccctggatgaatttctgaagaagccagccaggacacaggggtcttctaaggctcagcatccttccaggggctttgcagaacatggtaaacagcagcaggggagagaagaggaaaaaggtagtggtggcattcggaagacccgggaaacagagcggctccggcggcagctgctggaggtgttttggggtcaggatcacaaagtggacttcatcctgcagcgggagccatactgccgggacatcaaccaactgtctgaggccctgctcagtcttaacttttgagcctcacctgcttgagtggctgccgccctgtcagctccagccgcctccagctcagccctttctgtgagagtccctctgctgctcactctgatccagaggcaccctgagttggtgctttggatcagggaagccactttgggacaggtccataaagtgaactgatcttaccgagtcaggacctcagccagctctcaagaggttctgctcagccttaacttctcaactttgccttagcacagggtttctgtagggagtgggggctgctagaggggattagttccggagactgagactgttggctccacctccaagctgagctagggtggagggcagggtgggcaggaagtgacaggaagttaagctgttcctctccctggctgctgctctggatggccagagaacaagatgctcccttgctgagctcctgggagcgtggaaggagatgctaggccctggcacagtgttatgtggactgggccacgatagggtggagtgagctagtgaagaaggcagagggagacttggcttctggtctcagctatgcctgttttgtgaccttgattgagttgcttgggctttacttctgcctacaaatcaggggtaaaaatacctgttgggaggagaaatgagaacatagaggaaagcctcttggaggaaaggtgcttggaccaagtctcaggtgtgtctgcctgtggctgcacaggctctctaaccgaaacctcactttcagagagatgtgggtcctttgtctccaggatccacaccctagattttaacactgcattctcactataacatgccctataatggctgcatcccttttgagcaacctccaaaatctacatttacacagtaggtaaattagggatgactgcattatcaaaatactctcagggttcctataaatggcagctctcctgttgtattcaggtgttgtttacagactaacaaatgtgttggcaaatccctggttagatgcacttcctggtgttgagatgaacacgtcgatttttcaccaatcgatgaagccatgctctgcaatgacaatattaatgtgatccgaccctaacattttctctatggaagacgtatgttgcataagaacgacacgtctcggtgttttcttttcttccgttcgtcccgtctttccctggctgtcgttctcgtcggggtcc

SEQ ID NO: 367983 - DNA, 2332 bp, Homo sapiens
actcaagaaacagtttgcgtgcgatgtggacaagagaggtccccgttgggtgaggaacccgggaaggcccgcccagattcgggccccctgcccttgtcccctgggctgggggcgcgggcaaagcgggggcctggcgggcgctgagaggacctgaagccggcgcgggcggcggaggcgggctgggggcagcagccatgcctacctggggggcccgccccgcgtccccagatcgctttgcggtgtctgcggaggctgagaacaaggttcgggaacagcagccccatgtggagcgcatcttcagcgtgggggtgagcgtccttccgaaggactgtccggacaacccccacatctggctgcagctggagggccccaaggaaaacgccagcagagccaaggagtacctgaagggcctctgcagcccagaactgcaggatgaaatccactacccgcccaaactgcactgcatctttctgggagcccagggcttcttccttgactgcctggcctggagcacgtcagcccatctggtgcccagggcgccaggctcactgatgatcagtggcctgactgaagcctttgtcatggctcagagccgggtagaagagctggcagagcggctgagctgggacttcacgccaggaccatcttccggagcctctcagtgtactggagtgctgagagacttctctgccctgctgcagtccccgggggatgcccatagagaggctctgttgcagttgcccctggctgtccaggaggagctgctgagtctggtgcaggaggcgtctagtgggcaggggccaggagcactggcttcttgggaggggcggagctcagccttgctgggtgctcagtgccaaggagtgagagctccccctagtgacggcagggagtccctggacactggatctatgggacccggagattgcaggggagcaaggggagacacttacgctgtggagaaggagggagggaaacagggtggtcccagggagatggatttggggtggaaggagttgcctggggaagaggcgtgggagagagaagtggccctcaggccacagtcagtgggtggaggggcaagggagtcagcacccctgaaagggaaggccctggggaaggaggagatagctctgggaggaggagggttctgtgtccaccgtgagcctcccggtgcccatggctcctgtcacagggcagctcagtcccgaggagcctccctcctccagcggctccacaatgggaatgcctctcctccgagggtgcccagccctccacctgcaccggaacccccatggcactgtggagaccggggtgactgcggagaccggggagacgtgggggacaggggagacaagcagcagggcatggcacggggtcgggggcctcaatggaaacgaggcgcccgagggggcaacttggtgactggcacacagcgtttcaaggaggccctgcaggatcctttcaccctgtgccttgccaatgtgcctggccagccagacctccgccatattgtcattgacggcagcaacgtggccatggtgcatggcctccagcactacttctccagccggggcattgccattgctgtgcagtacttctgggaccgtggtcaccgtgacataactgtctttgtgcctcagtggcgcttcagtaaggatgccaaagtcagagagagtcacttcctgcaaaagctgtattccctcagcctgctctccctcacaccctcacgagtcatggatggcaagaggatctcctcctatgatgacaggtacttgctcctctcctggccccaggcttgatattgaaggagccctatggaagactgagggagagagaaaagctcctggtggtttacgctgtttctaagccttggtggtgggtaaggggccagttattcctctgtgtgccttatgattgggtaggtaaacctgccctgcaggtgtgatgagatgaactgtagacaaccatgtttgtctattcatcattcatcaaacaaaatgataccttgtatttatatagtgccttactgtctagaaaatactggtttagtggaaaggtgggaaagctggttacataagtagctgacagatgtcttcttataacctgaatttccaaacatgcagagaaatttccctaacattctggaaaaaccagagtaaaggtcaaaataacaagtaaaatggagaaacacaacgcatgaataataggactgtacaaaacatggtataatagaaagatcactggatttagaattggaagatctgaatttgagcctcaagtagcactactcattgactttgactgtggaacttttcttagtgaattaacc

SEQ ID NO: 367984 - DNA, 1610 bp, Homo sapiens
  misc_feature (7)..(7): n is a, c, g, or t
  misc_feature (65)..(65): n is a, c, g, or t
  misc_feature (331)..(331): n is a, c, g, or t
tctctgngagactgctgcaccctcatctgtcaaagatggaactggacttagttgagctctgaggnccctgtggacttggcccctccacaccctcattatggcaactggacataaacttaacagagggcttcccagcaaaatgtcctcttcttcctacaaacaggctgtttctatatgtgcatgtttcatgctaagcacttctttcttgggtggagatggcaaaggcctctttctgctgagacaaagtgatttggagagtcacctggcccctgaagggggagtggtaggatccagccacccagtgtgcagtgaattggagcagggatctcancacacagggaggtggggaggctccccctaacctcgggcacctgttgctcctccagactgcagcgcatgctcttagctcatcctcttaactggctctcaccgtgctcctggctttggtcaccacgtagctctcactccagcttcaggtagccatcagtagggcctggcaatatacactgatttggtttgttttatgtttgtctgcaggtgaaatccctaagggctctgccatgtactccagccttgtgacccttgccttccaggaaccatgcaagaagcgcagccaccagaagtccttaaaacagcaggaaaggtgggcctgtcccccttttgtgcagctacctatctgctgaggagcatctgggcctcattcctccaagtccacgggagggtccagaagagggagtcagagatgtatcctggtggagctgggagaaaggcagaaagcctttctgacggctatggaatacgattagccaaggtccacttggcccagcactaagaaaaagatgcgtagtttgcacagaaggttttgtgatcctgcctctcaacagccccagcagcttgggaactagcaagagcacatttcttgcctcatcagctgtcctgagatggaaaactcagtgaatataggaccctgattccgatgaaaggggcacgtggtcccaatgctggagctcctctggcaggttctaaaagcacactactgagcagcggtgccctgccggacactgctggcgggggctcagtgagcactactcacagatccacacctgaccctgttgggtcgagtcaggctgggccttggtctgcactgtagcacctgtgttctttgagttcacatcatgaatgtggtgacttcccagataccatctcaggcttaacctagcacatcctatttcttttcttctatgatatccaaattggactgacctcacttcaaagttgctgtcccattttgtcaccctatcttatctcggggaaattgcagactgatggccagaccaactctgttgaaattcttgcatagagcaaacctgtgctcatttttaagtggcatgggagaggccccaagcctagtaaagcctagtctgtgtcttcacagtgctggtagaatgtgtttgtgtgtataaatatatgatatagatttatatatgttgctaacgccatatattgaaggccaacataactggtggacagggtgggtgacagaaaatgaaagtctttttggtgattgttaaagcaagatgtgtataaagaaataaatagtttttctttca

SEQ ID NO: 367985 - DNA, 1821 bp, Homo sapiens
  misc_feature (1309)..(1309): n is a, c, g, or t
tagtttttgtatttttagtagagatgggtttcaccatgttggtcaggctggtctcgaactcctgacctcatgatccgcccacctcagcctcccaaagtgctgggattacaggtgtgagctaccacgcctggcctattatgatttttaatgaagtttgtcataaccaagtacttgtcattttctgatgagaacactgaaagtttagggcatgtagtgccaacttttggcagtatttcttcacaggtggtggcgtgttcttccatcaggagtcatgtaatgtttggtgatctctcgtgatgttagcagctgttgctgtttgatgccttatcccttaattcattaagggttgcaaaatggagatatcctaatgctatcattttttcatctgttaggtgaagttttacttacataaaaacttcatctcttcttgcttctgctaatggtaaccattctttttcagtatcataataagcttgttaaacaaatttgatgtgttttatagtgccagctaaagtagaagacatcattaagaacaactatgacatcttcccataaaacttcctttgttactatactgcatggattattggtttgatgctgtagagccctattcatgttctcattttcttttccattactggctgatagtaataggatatgcaaaagcatttgcctcagtgttaaaatgtaaacatggcagacattgtttcctcttttcacagatggaactttctgctctacagtccatgatggctgtgcaggaagaagagctgcaggtgcaggctgctgatatggagtctctgaccaggaacatacagattaaagaagatctcataaaggtctttcaaaactttttaaagaccactggaaatgttcacagctcagaatacctgtagggcctcttcagacaatatttgcacacatcgaatcccttggccagtgattatccatatcccacttgaaagtataggcagaatatttcaagacatttgttcccgtgctactctgctgaataatccttttattactattttcacatccatacttattttttgacttctaggacctgcaaatgcaactggttgatcctgaagacataccagctatggaacgcctgacccaggaagtcttacttcttcgggaaaaagttgcttcagtagaatcccagggtcaagaaatttcaggaaaccgaagacaacaggtaagttactggaatataaaccttatttatttatttacatttttttgtattcttttttttttttttagtagagatggagtttcaccatgttggtcaggctagtcttgnactcctgactgcaagtgatccatcctcctcggcccctcaaagtgctggaattacatacaagcatgagtcaccacattgagacaaggtctcactgtgtcacccaggcaggagtgcagtggtatgatcacagctcactgcagcctcaaactctggggctcaaggaatcttcctgcctcagcctcctgagtagctggagctgcaggtgcacaccaccacgcccggctcaaaccttatttttctactgtgaaataaaccatggtaaagctgtcaatctcagctatttgtggagggttagttgatggtatttcctagagaaactgtgctctaaaatttcctactttggtcggtagcagctatagatgcccctttctgacatttgtagttctgaaaagagcagcagttcttttggacacataccaatagttatccctcacactcatacctaagtcacctccctcaactgaatctttctcttttatctgcatttaaccatgttcagatctctcccagtt

SEQ ID NO: 367986 - DNA, 457 bp, Homo sapiens
  misc_feature (23)..(23): n is a, c, g, or t
attgactgagatcttaacaacancagcaacgatacatcagcaaatccttattatccagccttctttcctgtagcctagcatggagaatctgaccagaccccattttgagaaggtcagcctacactggaatgaactttttacattagggcatttgtatttccctcacaatacttgccacattacttggcataggagagatgcttagtgtaattataagttaacaagcctttggatcagggcttgactcatgatagacaaagtatatgcctgctggatggaagaatctcttgggcgagcaccatttttctttccatcacctttccttgaaaatatatcttcagctttgggtaggaggaatcttggtgtatgaaatcattgcaaatttacttcatcttttctggagtttgaagttgtgactctcctgctaccaattaaataaagcttactttgccataac

SEQ ID NO: 367987 - DNA, 9867 bp, Homo sapiens
tggcgcgagctgcattcccagacactccagctcttacggaaagaagcactgtcttttgcgctagtgtttgtctaccgtcccctgtcctaaaataatgactgccctctacctgagggaaagggacttcaatggtggtaatctactcgcggctggctgcatccttaaaaaagcccatttctcttctactatcttcaagatcttggttaaccagattcacattgtatgtgccggactctttctcaggtgactgctctgtgcttttttatctaaagaagggcaagtcacccacgggtactaaccctcccccacccacatcaagggagaaacactcctctactcttttctggacattcctgttcagagtcgaggtaagggttgcacggccccgcccctccgttaccaagccttccctcgcctgcctcgcagcctcaggcccttagaacccaggcggggcggggccgggaaaggtgaggctgctggcgggaagcgggggcggcgcgcagcggtacctagcggcgctgccccgctggcagccggaggacgtggcactgtccgagaatgcagggaggggattcgtctttctcctccccgcgaggaggagcctcgacatcctgcagaggcgggaggatccttgagggcactggtgcgactttcaggtgaggtcttagcagatgaaagcggctggctgtggcccgcgccagtagtgctttctgctccgcactcgccgtgagccaggtgtgcaaccggatttggggcgagggtcgcgctggctacctcgcatgcgcagagccggaagcccgctgaccggactacagctcccagaagagccttgtggaggccgcagacgcgaagccgctggcgccatcttgaaatctgatcctccatccccgaggctttgcgtctgcgcggccggccgctgctgctccgggagcccagtctgctaaaaggggaggacgttgaggacgcggcggctggcgggagagacagctggggagagacatggcagggtcggagcgcggcctgcgcctctgtcactcagcatcctcttaggcgtttccacgcccgccccctgcccgaggggcggggctgacggctctggtacccggagtcggcgcgcggggcaggggcgcgcccctgcagagtggggaccccactgggctgtgccatgctgaccggagaccaccgaggcgggagacagagcgcggcgaagagccattgagtggtcacccagtagccgccgccgccgccgcctcgggaagcttgccacccgctaggagggaagatgaaggagatttgcaggatctgtgcccgagagctgtgtggaaaccagcggcgctggatcttccacacggcgtccaagctcaatctccaggttctgctttcgcacgtcttgggcaaggatgtcccccgcgatggcaaagccgagttcgcttgcagcaagtgtgctttcatgcttgatcgaatctatcgattcgacacagttattgcccggattgaagcgctttctattgagcgcttgcaaaagctgctactggagaaggatcgcctcaagttctgcattgccagtatgtatcggaagaataacgatgactctggcgcggagatcaaggcggggaatgggacggttgacatgtccgtcttacccgatgcgagatactctgcactgctccaggaggacttcgcctattcagggtttgagtgctgggtggagaatgaggatcagatccaggagccacacagctgccatggttcagaaggccctggaaaccgacccaggagatgccgtggttgtgccgctttgcgggttgctgattctgactatgaagccatttgtaaggtacctcgaaaggtggccagaagtatctcctgcggcccttctagcaggtggtcgaccagcatttgcactgaagaaccagcgttgtctgaggttgggccacccgacttagcaagcacaaaggtacccccagatggagaaagcatggaggaagagacgcctggttcctctgtggaatctttggatgcaagcgtccaggctagccctccacaacagaaagatgaggagactgagagaagtgcaaaggaacttggaaagtgtgactgttgttcagatgatcaggctccgcagcatgggtgtaatcacaagctggaattagctcttagcatgattaaaggtcttgattataagcccatccagagcccccgagggagcaggcttccgattccagtgaaatccagcctacctggagccaagcctggccctagcatgacagatggagttagttccggtttccttaacaggtctttgaaacccctttacaagacacctgtgagttatcccttggagctttcagacctgcaggagctgtgggatgatctctgtgaagattatttgccgctccgggtccagcccatgactgaagagttgctgaaacaacaaaagctgaattcacatgagaccactataactcagcagtctgtatctgattcccacttggcagaactccaggaaaaaatccagcaaacagaggccaccaacaagattcttcaagagaaacttaatgaaatgagctatgaactaaagtgtgctcaggagtcgtctcaaaagcaagatggtacaattcagaacctcaaggaaactctgaaaagcagggaacgtgagactgaggagttgtaccaggtaattgaaggtcaaaatgacacaatggcaaagcttcgagaaatgctgcaccaaagccagcttggacaacttcacagctcagagggtacttctccagctcagcaacaggtagctctgcttgatcttcagagtgctttattctgcagccaacttgaaatacagaagctccagagggtggtacgacagaaagagcgccaactggctgatgccaaacaatgtgtgcaatttgtagaggctgcagcacacgagagtgaacagcagaaagaggcttcttggaaacataaccaggaattgcgaaaagccttgcagcagctacaagaagaattgcagaataagagccaacagcttcgtgcctgggaggctgaaaaatacaatgagattcgaacccaggaacaaaacatccagcacctaaaccatagtctgagtcacaaggagcagttgcttcaggaatttcgggagctcctacagtatcgagataactcagacaaaacccttgaagcaaatgaaatgttgcttgagaaacttcgccagcgaatacatgataaagctgttgctctggagcgggctatagatgaaaaattctctgctctagaagagaaagaaaaagaactgcgccagcttcgtcttgctgtgagagagcgagatcatgacttagagagactgcgcgatgtcctctcctccaatgaagctactatgcaaagtatggagagtctcctgagggccaaaggcctggaagtggaacagttatctactacctgtcaaaacctccagtggctgaaagaagaaatggaaaccaaatttagccgttggcagaaggaacaagagagtatcattcagcagttacagacgtctcttcatgataggaacaaagaagtggaggatcttagtgcaacactgctctgcaaacttggaccagggcagagtgagatagcagaggagctgtgccagcgtctacagcgaaaggaaaggatgctgcaggaccttctaagtgatcgaaataaacaagtgctggaacatgaaatggagattcaaggcctgcttcagtctgtgagcaccagggagcaggaaagccaagctgctgcagagaagttggtgcaagccttaatggaaagaaattcagaattacaggccctgcgccaatatttaggagggagagactccctgatgtcccaagcacccatctctaaccaacaagctgaagttacccccactggccgtcttggaaaacagactgatcaaggttcaatgcagataccttccagagatgatagcacttcattgactgccaaagaggatgtcagcatacccagatccacattaggagacttggacacagttgcagggctggaaaaagaactgagtaatgccaaagaggaacttgaactcatggctaaaaaagaaagagaaagtcagatggaactttctgctctacagtccatgatggctgtgcaggaagaagagctgcaggtgcaggctgctgatatggagtctctgaccaggaacatacagattaaagaagatctcataaaggacctgcaaatgcaactggttgatcctgaagacataccagctatggaacgcctgacccaggaagtcttacttcttcgggaaaaagttgcttcagtagaatcccagggtcaagaaatttcaggaaaccgaagacaacagttgctgctgatgctagaaggactagtagatgaacggagtcggctcaatgaggccttacaagcagagagacagctctatagcagtctggtgaagttccatgcccatccagagagctctgagagagaccgaactctgcaggtggaactggaaggggctcaggtgttacgcagtcggctagaagaagttcttggaagaagcttggagcgcttaaacaggctggagaccctggccgccattggaggtgcagctgcaggggatgacaccgaagatacaagcactgagttcactgacagtattgaggaggaggctgcacaccatagtcaccagcaacttgtcaaggtggctttggagaaaagtctggcaactgtggagacccagaacccatctttttcccctccttctccgatgggaggggacagtaacaggtgtcttcaggaagaaatgctccacctgagggctgagttccaccagcacttagaagagaagaggaaagctgaggaggaactgaaggagctaaaggctcaaattgaggaagcaggattctcctcagtgtcccacatcaggaacaccatgctgagcctttgccttgagaatgcggagctgaaagagcagatgggagaagcaatgtctgatggatgggagatcgaggaagacaaggagaagggcgaggtgatggttgagactgtggtaaccaaagagggtctgagtgagagtagccttcaggctgagttcagaaagctccagggaaaactgaagaatgcccacaatatcatcaacctcctcaaagaacaacttgtgctgagtagcaaggaagggaatagtaaacttactccagagctccttgtgcatctgaccagcaccattgaaagaataaacacagaactggttggttcccctgggaagcaccaacaccaagaggaggggaatgtgactgtgaggcctttccccagaccccagagccttgaccttggggctaccttcacagtggatgcccaccaattggataaccagtcccagcctcgtgaccctgggcctcagtcagcgtttagcctaccagggtccacccagcacctgcgctcccagctgtcacaatgcaaacaacgctatcaagatctccaggagaagctgctgctatcagaagccactgtctttgctcaggctaacgagctggagaaatacagagttatgcttacaggtgaatccttggtgaagcaggacagcaagcagatccaggtggacctccaggacctgggctatgagacttgtggccgaagcgagaatgaggctgaacgggaggaaaccaccagtcctgagtgtgaggagcacaacagcctcaaggaaatggtcctgatggaggggctgtgctctgagcagggacgccggggctcaacactggctagttcctctgagaggaagcccttggagaaccagctagggaagcaggaagagttccgggtatatggaaagtcagaaaacatcttggtcctacgaaaggacatcaaagatctgaaggcccagctgcagaatgccaacaaggtcattcaaaacctcaagagccgggtccggtccctctcagttacaagtgattattcgtctagtctggaaagaccccggaagctgagagctgttggcaccttggaggggtcttcacctcatagtgtccctgatgaggatgaggggtggctgtctgatggcactggggctttctactctccagggcttcaggccaaaaaggacctggagagtctcatccagagagtatcccagctggaggcccagctcccaaaaaatggactagaagagaagctggctgaggagctgagatcagcctcgtggcctgggaaatatgattccctgattcaggatcaggcccgggaactgtcttacctacggcaaaaaatacgagaagggagaggtatttgttatcttatcacccggcatgcaaaagatacagtaaaatcttttgaggatctcctaaggagcaatgacattgactactacctgggacagagcttccgggagcaactcgcccagggaagccagctgacagagaggctcaccagcaaactcagcaccaaggatcataaaagtgagaaagatcaagctggacttgagccactggccctcaggctcagcagggagctgcaggagaaggagaaagtgattgaagtcctgcaggccaagctggatgctcggtccctcacaccctccagcagccatgccttgtctgactcccaccgctctcccagcagcacctctttcctgtctgatgaactggaagcctgctctgacatggacatagtcagcgagtacacacactatgaagagaagaaagcttctcccagtcactcagattccatccatcattcgagtcattctgctgtgttgtcttctaaaccatcatcaaccagtgcatctcagggggctaaggccgaatccaacagcaaccccatcagcttgccaactccccagaatacccccaaggaggccaaccaggcccattcaggctttcattttcactccatacccaagctggctagccttcctcaggcaccattgccctcagctccatccagcttcctgcctttcagccccactggccctctcctccttggctgctgtgagacaccagtggtctccttggctgaggctcagcaggagctacagatgctgcagaagcagttgggagaaagtgccagcactgttcctcctgcttccacagctacattgctgagcaacgacttggaagccgactcttcctactacctcaactctgcccagcctcactctcctccaaggggcaccatagaactgggaagaatcctagagcctgggtacctgggcagcagtggcaagtgggatgtgatgaggcctcagaaagggagtgtatctggggacctatcctcaggctcctctgtgtaccagcttaactccaaacccacaggggctgacctgctggaagagcatcttggtgaaatccggaacctgcgccagcgcctggaggaatccatctgcatcaatgaccgcctacgggagcaactggaacaccggctgacctctactgctcgtggaaggggatccacttctaacttctacagtcagggcctggagtccatacctcagctctgcaatgagaacagagtcctcagggaagacaatcgaagacttcaggctcaactgagtcatgtttccagagagcactcccaggaaacagaaagcctgagggaggctctgctgtcctctcgatcccaccttcaagagctggaaaaggagctggagcaccagaaggtggaaaggcagcagcttttggaagacttgagggagaagcagcaagaggtcttgcatttcagggaggaacgtctttccctccaggaaaacgactccagtgggccttgcctctccctggtcagactgcagcacaagctggttctcctgcagcaacagtgtgaagagaaacagcagctctttgagtccctccagtcagagctacaaatctacgaggcactttatggcaattccaagaaggggctgaaagcttacagcctggatgcctgtcaccaaatccctttgagcagtgacctgagccacctggtggcagaggtacgagctctgagagggcagctggagcagagcattcaggggaacaattgtctgcgactgcagctgcaacagcagctggagagcggtgctggcaaagccagcctcagcccctcctccattaaccagaacttcccagccagcactgaccctggaaacaagcagctgctcctccaagattcagctgtgtcccctccagtccgggatgttggtatgaattccccagctctggtcttccccagctctgcttcctctactcctggctcagaaacgcccataatcaacagagcaaatggcttgggtttggatacttctccagtaatgaagacccctcccaagctagagggtgatgctactgatggctcctttgccaataagcatggccgccatgtcattggccacattgatgactacagtgccctaagacagcagattgcggagggcaagctgctggtcaaaaagatagtgtctcttgtgagatcagcgtgcagcttccctggccttgaagcccaaggcacagaggtgctaggcagcaaaggtattcatgagcttcggagcagcaccagtgccctgcaccatgccctagaggagtcagcttccctcctcaccatgttctggagagcggccctgccaagcacccacatccctgtgctgcctggcaaagtgggagaatcaacagaaagggaacttctggaactgagaaccaaagtatccaaacaggagcgactccttcagagcacaactgagcatctgaagaacgccaaccagcagaaggagagcatggaacagttcattgtcagccagctaaccagaacacatgatgttttaaagaaggcaaggactaacttagaggtgaaatccctaagggctctgccatgtactccagccttgtgacccttgccttccaggaaccatgcaagaagcgcagccaccagaagtccttaaaacagcaggaaaggtgggcctgtcccccttttgtgcagctacctatctgctgaggagcatctgggcctcattcctccaagtccacgggagggtccagaagagggagtcagagatgtatcctggtggagctgggagaaaggcagaaagcctttctgacggctatggaatacgattagccaaggtccacttggcccagcactaagaaaaagatgcgtagtttgcacagaaggttttgtgatcctgcctctcaacagccccagcagcttgggaactagcaagagcacatttcttgcctcatcagctgtcctgagatggaaaactcagtgaatataggaccctgattccgatgaaaggggcacgtggtcccaatgctggagctcctctggcaggttctaaaagcacactactgagcagcggtgccctgccggacactgctggcgggggctcagtgagcactactcacagatccacacctgaccctgttgggtcgagtcaggctgggccttggtctgcactgtagcacctgtgttctttgagttcacatcatgaatgtggtgacttcccagataccatctcaggcttaacctagcacatcctatttcttttcttctatgatatccaaattggactgacctcacttcaaagttgctgtcccattttgtcaccctatcttatctcggggaaattgcagactgatggccagaccaactctgttgaaattcttgcatagagcaaacctgtgctcatttttaagtggcatgggagaggccccaagcctagtaaagcctagtctgtgtcttcacagtgctggtagaatgtgtttgtgtgtataaatatatgatatagatttatatatgttgctaacgccatatattgaaggccaacataactggtggacagggtgggtgacagaaaatgaaagtctttttggtgattgttaaagcaagatgtgtataaagaaataaatagtttttctttca

SEQ ID NO: 367988 - DNA, 8116 bp, Homo sapiens
tggcgcgagctgcattcccagacactccagctcttacggaaagaagcactgtcttttgcgctagtgtttgtctaccgtcccctgtcctaaaataatgactgccctctacctgagggaaagggacttcaatggtggtaatctactcgcggctggctgcatccttaaaaaagcccatttctcttctactatcttcaagatcttggttaaccagattcacattgtatgtgccggactctttctcaggtgactgctctgtgcttttttatctaaagaagggcaagtcacccacgggtactaaccctcccccacccacatcaagggagaaacactcctctactcttttctggacattcctgttcagagtcgaggtaagggttgcacggccccgcccctccgttaccaagccttccctcgcctgcctcgcagcctcaggcccttagaacccaggcggggcggggccgggaaaggtgaggctgctggcgggaagcgggggcggcgcgcagcggtacctagcggcgctgccccgctggcagccggaggacgtggcactgtccgagaatgcagggaggggattcgtctttctcctccccgcgaggaggagcctcgacatcctgcagaggcgggaggatccttgagggcactggtgcgactttcagcccatgactgaagagttgctgaaacaacaaaagctgaattcacatgagaccactataactcagcagtctgtatctgattcccacttggcagaactccaggaaaaaatccagcaaacagaggccaccaacaagattcttcaagagaaacttaatgaaatgagctatgaactaaagtgtgctcaggagtcgtctcaaaagcaagatggtacaattcagaacctcaaggaaactctgaaaagcagggaacgtgagactgaggagttgtaccaggtaattgaaggtcaaaatgacacaatggcaaagcttcgagaaatgctgcaccaaagccagcttggacaacttcacagctcagagggtacttctccagctcagcaacaggtagctctgcttgatcttcagagtgctttattctgcagccaacttgaaatacagaagctccagagggtggtacgacagaaagagcgccaactggctgatgccaaacaatgtgtgcaatttgtagaggctgcagcacacgagagtgaacagcagaaagaggcttcttggaaacataaccaggaattgcgaaaagccttgcagcagctacaagaagaattgcagaataagagccaacagcttcgtgcctgggaggctgaaaaatacaatgagattcgaacccaggaacaaaacatccagcacctaaaccatagtctgagtcacaaggagcagttgcttcaggaatttcgggagctcctacagtatcgagataactcagacaaaacccttgaagcaaatgaaatgttgcttgagaaacttcgccagcgaatacatgataaagctgttgctctggagcgggctatagatgaaaaattctctgctctagaagagaaagaaaaagaactgcgccagcttcgtcttgctgtgagagagcgagatcatgacttagagagactgcgcgatgtcctctcctccaatgaagctactatgcaaagtatggagagtctcctgagggccaaaggcctggaagtggaacagttatctactacctgtcaaaacctccagtggctgaaagaagaaatggaaaccaaatttagccgttggcagaaggaacaagagagtatcattcagcagttacagacgtctcttcatgataggaacaaagaagtggaggatcttagtgcaacactgctctgcaaacttggaccagggcagagtgagatagcagaggagctgtgccagcgtctacagcgaaaggaaaggatgctgcaggaccttctaagtgatcgaaataaacaagtgctggaacatgaaatggagattcaaggcctgcttcagtctgtgagcaccagggagcaggaaagccaagctgctgcagagaagttggtgcaagccttaatggaaagaaattcagaattacaggccctgcgccaatatttaggagggagagactccctgatgtcccaagcacccatctctaaccaacaagctgaagttacccccactggccgtcttggaaaacagactgatcaaggttcaatgcagataccttccagagatgatagcacttcattgactgccaaagaggatgtcagcatacccagatccacattaggagacttggacacagttgcagggctggaaaaagaactgagtaatgccaaagaggaacttgaactcatggctaaaaaagaaagagaaagtcagatggaactttctgctctacagtccatgatggctgtgcaggaagaagagctgcaggtgcaggctgctgatatggagtctctgaccaggaacatacagattaaagaagatctcataaaggacctgcaaatgcaactggttgatcctgaagacataccagctatggaacgcctgacccaggaagtcttacttcttcgggaaaaagttgcttcagtagaatcccagggtcaagaaatttcaggaaaccgaagacaacagttgctgctgatgctagaaggactagtagatgaacggagtcggctcaatgaggccttacaagcagagagacagctctatagcagtctggtgaagttccatgcccatccagagagctctgagagagaccgaactctgcaggtggaactggaaggggctcaggtgttacgcagtcggctagaagaagttcttggaagaagcttggagcgcttaaacaggctggagaccctggccgccattggaggtgcagctgcaggggatgacaccgaagatacaagcactgagttcactgacagtattgaggaggaggctgcacaccatagtcaccagcaacttgtcaaggtggctttggagaaaagtctggcaactgtggagacccagaacccatctttttcccctccttctccgatgggaggggacagtaacaggtgtcttcaggaagaaatgctccacctgagggctgagttccaccagcacttagaagagaagaggaaagctgaggaggaactgaaggagctaaaggctcaaattgaggaagcaggattctcctcagtgtcccacatcaggaacaccatgctgagcctttgccttgagaatgcggagctgaaagagcagatgggagaagcaatgtctgatggatgggagatcgaggaagacaaggagaagggcgaggtgatggttgagactgtggtaaccaaagagggtctgagtgagagtagccttcaggctgagttcagaaagctccagggaaaactgaagaatgcccacaatatcatcaacctcctcaaagaacaacttgtgctgagtagcaaggaagggaatagtaaacttactccagagctccttgtgcatctgaccagcaccattgaaagaataaacacagaactggttggttcccctgggaagcaccaacaccaagaggaggggaatgtgactgtgaggcctttccccagaccccagagccttgaccttggggctaccttcacagtggatgcccaccaattggataaccagtcccagcctcgtgaccctgggcctcagtcagcgtttagcctaccagggtccacccagcacctgcgctcccagctgtcacaatgcaaacaacgctatcaagatctccaggagaagctgctgctatcagaagccactgtctttgctcaggctaacgagctggagaaatacagagttatgcttacaggtgaatccttggtgaagcaggacagcaagcagatccaggtggacctccaggacctgggctatgagacttgtggccgaagcgagaatgaggctgaacgggaggaaaccaccagtcctgagtgtgaggagcacaacagcctcaaggaaatggtcctgatggaggggctgtgctctgagcagggacgccggggctcaacactggctagttcctctgagaggaagcccttggagaaccagctagggaagcaggaagagttccgggtatatggaaagtcagaaaacatcttggtcctacgaaaggacatcaaagatctgaaggcccagctgcagaatgccaacaaggtcattcaaaacctcaagagccgggtccggtccctctcagttacaagtgattattcgtctagtctggaaagaccccggaagctgagagctgttggcaccttggaggggtcttcacctcatagtgtccctgatgaggatgaggggtggctgtctgatggcactggggctttctactctccagggcttcaggccaaaaaggacctggagagtctcatccagagagtatcccagctggaggcccagctcccaaaaaatggactagaagagaagctggctgaggagctgagatcagcctcgtggcctgggaaatatgattccctgattcaggatcaggcccgggaactgtcttacctacggcaaaaaatacgagaagggagaggtatttgttatcttatcacccggcatgcaaaagatacagtaaaatcttttgaggatctcctaaggagcaatgacattgactactacctgggacagagcttccgggagcaactcgcccagggaagccagctgacagagaggctcaccagcaaactcagcaccaaggatcataaaagtgagaaagatcaagctggacttgagccactggccctcaggctcagcagggagctgcaggagaaggagaaagtgattgaagtcctgcaggccaagctggatgctcggtccctcacaccctccagcagccatgccttgtctgactcccaccgctctcccagcagcacctctttcctgtctgatgaactggaagcctgctctgacatggacatagtcagcgagtacacacactatgaagagaagaaagcttctcccagtcactcagattccatccatcattcgagtcattctgctgtgttgtcttctaaaccatcatcaaccagtgcatctcagggggctaaggccgaatccaacagcaaccccatcagcttgccaactccccagaatacccccaaggaggccaaccaggcccattcaggctttcattttcactccatacccaagctggctagccttcctcaggcaccattgccctcagctccatccagcttcctgcctttcagccccactggccctctcctccttggctgctgtgagacaccagtggtctccttggctgaggctcagcaggagctacagatgctgcagaagcagttgggagaaagtgccagcactgttcctcctgcttccacagctacattgctgagcaacgacttggaagccgactcttcctactacctcaactctgcccagcctcactctcctccaaggggcaccatagaactgggaagaatcctagagcctgggtacctgggcagcagtggcaagtgggatgtgatgaggcctcagaaagggagtgtatctggggacctatcctcaggctcctctgtgtaccagcttaactccaaacccacaggggctgacctgctggaagagcatcttggtgaaatccggaacctgcgccagcgcctggaggaatccatctgcatcaatgaccgcctacgggagcaactggaacaccggctgacctctactgctcgtggaaggggatccacttctaacttctacagtcagggcctggagtccatacctcagctctgcaatgagaacagagtcctcagggaagacaatcgaagacttcaggctcaactgagtcatgtttccagagagcactcccaggaaacagaaagcctgagggaggctctgctgtcctctcgatcccaccttcaagagctggaaaaggagctggagcaccagaaggtggaaaggcagcagcttttggaagacttgagggagaagcagcaagaggtcttgcatttcagggaggaacgtctttccctccaggaaaacgactccagtgggccttgcctctccctggtcagactgcagcacaagctggttctcctgcagcaacagtgtgaagagaaacagcagctctttgagtccctccagtcagagctacaaatctacgaggcactttatggcaattccaagaaggggctgaaagcttacagcctggatgcctgtcaccaaatccctttgagcagtgacctgagccacctggtggcagaggtacgagctctgagagggcagctggagcagagcattcaggggaacaattgtctgcgactgcagctgcaacagcagctggagagcggtgctggcaaagccagcctcagcccctcctccattaaccagaacttcccagccagcactgaccctggaaacaagcagctgctcctccaagattcagctgtgtcccctccagtccgggatgttggtatgaattccccagctctggtcttccccagctctgcttcctctactcctggctcagaaacgcccataatcaacagagcaaatggcttgggtttggatacttctccagtaatgaagacccctcccaagctagagggtgatgctactgatggctcctttgccaataagcatggccgccatgtcattggccacattgatgactacagtgccctaagacagcagattgcggagggcaagctgctggtcaaaaagatagtgtctcttgtgagatcagcgtgcagcttccctggccttgaagcccaaggcacagaggtgctaggcagcaaaggtattcatgagcttcggagcagcaccagtgccctgcaccatgccctagaggagtcagcttccctcctcaccatgttctggagagcggccctgccaagcacccacatccctgtgctgcctggcaaagtgggagaatcaacagaaagggaacttctggaactgagaaccaaagtatccaaacaggagcgactccttcagagcacaactgagcatctgaagaacgccaaccagcagaaggagagcatggaacagttcattgtcagccagctaaccagaacacatgatgttttaaagaaggcaaggactaacttagaggtgaaatccctaagggctctgccatgtactccagccttgtgacccttgccttccaggaaccatgcaagaagcgcagccaccagaagtccttaaaacagcaggaaaggtgggcctgtcccccttttgtgcagctacctatctgctgaggagcatctgggcctcattcctccaagtccacgggagggtccagaagagggagtcagagatgtatcctggtggagctgggagaaaggcagaaagcctttctgacggctatggaatacgattagccaaggtccacttggcccagcactaagaaaaagatgcgtagtttgcacagaaggttttgtgatcctgcctctcaacagccccagcagcttgggaactagcaagagcacatttcttgcctcatcagctgtcctgagatggaaaactcagtgaatataggaccctgattccgatgaaaggggcacgtggtcccaatgctggagctcctctggcaggttctaaaagcacactactgagcagcggtgccctgccggacactgctggcgggggctcagtgagcactactcacagatccacacctgaccctgttgggtcgagtcaggctgggccttggtctgcactgtagcacctgtgttctttgagttcacatcatgaatgtggtgacttcccagataccatctcaggcttaacctagcacatcctatttcttttcttctatgatatccaaattggactgacctcacttcaaagttgctgtcccattttgtcaccctatcttatctcggggaaattgcagactgatggccagaccaactctgttgaaattcttgcatagagcaaacctgtgctcatttttaagtggcatgggagaggccccaagcctagtaaagcctagtctgtgtcttcacagtgctggtagaatgtgtttgtgtgtataaatatatgatatagatttatatatgttgctaacgccatatattgaaggccaacataactggtggacagggtgggtgacagaaaatgaaagtctttttggtgattgttaaagcaagatgtgtataaagaaataaatagtttttctttca

SEQ ID NO: 367989 - DNA, 9504 bp, Homo sapiens
tggcgcgagctgcattcccagacactccagctcttacggaaagaagcactgtcttttgcgctagtgtttgtctaccgtcccctgtcctaaaataatgactgccctctacctgagggaaagggacttcaatggtggtaatctactcgcggctggctgcatccttaaaaaagcccatttctcttctactatcttcaagatcttggttaaccagattcacattgtatgtgccggactctttctcaggtgactgctctgtgcttttttatctaaagaagggcaagtcacccacgggtactaaccctcccccacccacatcaagggagaaacactcctctactcttttctggacattcctgttcagagtcgaggtaagggttgcacggccccgcccctccgttaccaagccttccctcgcctgcctcgcagcctcaggcccttagaacccaggcggggcggggccgggaaaggtgaggctgctggcgggaagcgggggcggcgcgcagcggtacctagcggcgctgccccgctggcagccggaggacgtggcactgtccgagaatgcagggaggggattcgtctttctcctccccgcgaggaggagcctcgacatcctgcagaggcgggaggatccttgagggcactggtgcgactttcaggtgaggtcttagcagatgaaagcggctggctgtggcccgcgccagtagtgctttctgctccgcactcgccgtgagccaggtgtgcaaccggatttggggcgagggtcgcgctggctacctcgcatgcgcagagccggaagcccgctgaccggactacagctcccagaagagccttgtggaggccgcagacgcgaagccgctggcgccatcttgaaatctgatcctccatccccgaggctttgcgtctgcgcggccggccgctgctgctccgggagcccagtctgctaaaaggggaggacgttgaggacgcggcggctggcgggagagacagctggggagagacatggcagggtcggagcgcggcctgcgcctctgtcactcagcatcctcttaggcgtttccacgcccgccccctgcccgaggggcggggctgacggctctggtacccggagtcggcgcgcggggcaggggcgcgcccctgcagagtggggaccccactgggctgtgccatgctgaccggagaccaccgaggcgggagacagagcgcggcgaagagccattgagtggtcacccagtagccgccgccgccgccgcctcgggaagcttgccacccgctaggagggaagatgaaggagatttgcaggatctgtgcccgagagctgtgtggaaaccagcggcgctggatcttccacacggcgtccaagctcaatctccaggttctgctttcgcacgtcttgggcaaggatgtcccccgcgatggcaaagccgagttcgcttgcagcaagtgtgctttcatgcttgatcgaatctatcgattcgacacagttattgcccggattgaagcgctttctattgagcgcttgcaaaagctgctactggagaaggatcgcctcaagttctgcattgccagtatgtatcggaagaataacgatgactctggcgcggagatcaaggcggggaatgggacggttgacatgtccgtcttacccgatgcgagatactctgcactgctccaggaggacttcgcctattcagggtttgagtgctgggtggagaatgaggatcagatccaggagccacacagctgccatggttcagaaggccctggaaaccgacccaggagatgccgtggttgtgccgctttgcgggttgctgattctgactatgaagccatttgtaaggtacctcgaaaggtggccagaagtatctcctgcggcccttctagcaggtggtcgaccagcatttgcactgaagaaccagcgttgtctgaggttgggccacccgacttagcaagcacaaaggtacccccagatggagaaagcatggaggaagagacgcctggttcctctgtggaatctttggatgcaagcgtccaggctagccctccacaacagaaagatgaggagactgagagaagtgcaaaggaacttggaaagtgtgactgttgttcagatgatcaggctccgcagcatgggtgtaatcacaagctggaattagctcttagcatgattaaaggtcttgattataagcccatccagagcccccgagggagcaggcttccgattccagtgaaatccagcctacctggagccaagcctggccctagcatgacagatggagttagttccggtttccttaacaggtctttgaaacccctttacaagacacctgtgagttatcccttggagctttcagacctgcaggagctgtgggatgatctctgtgaagattatttgccgctccgggtccagcccatgactgaagagttgctgaaacaacaaaagctgaattcacatgagaccactataactcagcagtctgtatctgattcccacttggcagaactccaggaaaaaatccagcaaacagaggccaccaacaagattcttcaagagaaacttaatgaaatgagctatgaactaaagtgtgctcaggagtcgtctcaaaagcaagatggtacaattcagaacctcaaggaaactctgaaaagcagggaacgtgagactgaggagttgtaccaggtaattgaaggtcaaaatgacacaatggcaaagcttcgagaaatgctgcaccaaagccagcttggacaacttcacagctcagagggtacttctccagctcagcaacaggtagctctgcttgatcttcagagtgctttattctgcagccaacttgaaatacagaagctccagagggtggtacgacagaaagagcgccaactggctgatgccaaacaatgtgtgcaatttgtagaggctgcagcacacgagagtgaacagcagaaagaggcttcttggaaacataaccaggaattgcgaaaagccttgcagcagctacaagaagaattgcagaataagagccaacagcttcgtgcctgggaggctgaaaaatacaatgagattcgaacccaggaacaaaacatccagcacctaaaccatagtctgagtcacaaggagcagttgcttcaggaatttcgggagctcctacagtatcgagataactcagacaaaacccttgaagcaaatgaaatgttgcttgagaaacttcgccagcgaatacatgataaagctgttgctctggagcgggctatagatgaaaaattctctgctctagaagagaaagaaaaagaactgcgccagcttcgtcttgctgtgagagagcgagatcatgacttagagagactgcgcgatgtcctctcctccaatgaagctactatgcaaagtatggagagtctcctgagggccaaaggcctggaagtggaacagttatctactacctgtcaaaacctccagtggctgaaagaagaaatggaaaccaaatttagccgttggcagaaggaacaagagagtatcattcagcagttacagacgtctcttcatgataggaacaaagaagtggaggatcttagtgcaacactgctctgcaaacttggaccagggcagagtgagatagcagaggagctgtgccagcgtctacagcgaaaggaaaggatgctgcaggaccttctaagtgatcgaaataaacaagtgctggaacatgaaatggagattcaaggcctgcttcagtctgtgagcaccagggagcaggaaagccaagctgctgcagagaagttggtgcaagccttaatggaaagaaattcagaattacaggccctgcgccaatatttaggagggagagactccctgatgtcccaagcacccatctctaaccaacaagctgaagttacccccactggccgtcttggaaaacagactgatcaaggttcaatgcagataccttccagagatgatagcacttcattgactgccaaagaggatgtcagcatacccagatccacattaggagacttggacacagttgcagggctggaaaaagaactgagtaatgccaaagaggaacttgaactcatggctaaaaaagaaagagaaagtcagatggaactttctgctctacagtccatgatggctgtgcaggaagaagagctgcaggtgcaggctgctgatatggagtctctgaccaggaacatacagattaaagaagatctcataaaggacctgcaaatgcaactggttgatcctgaagacataccagctatggaacgcctgacccaggaagtcttacttcttcgggaaaaagttgcttcagtagaatcccagggtcaagaaatttcaggaaaccgaagacaacagttgctgctgatgctagaaggactagtagatgaacggagtcggctcaatgaggccttacaagcagagagacagctctatagcagtctggtgaagttccatgcccatccagagagctctgagagagaccgaactctgcaggtggaactggaaggggctcaggtgttacgcagtcggctagaagaagttcttggaagaagcttggagcgcttaaacaggctggagaccctggccgccattggaggtgcagctgcaggggatgacaccgaagatacaagcactgagttcactgacagtattgaggaggaggctgcacaccatagtcaccagcaacttgtcaaggtggctttggagaaaagtctggcaactgtggagacccagaacccatctttttcccctccttctccgatgggaggggacagtaacaggtgtcttcaggaagaaatgctccacctgagggctgagttccaccagcacttagaagagaagaggaaagctgaggaggaactgaaggagctaaaggctcaaattgaggaagcaggattctcctcagtgtcccacatcaggaacaccatgctgagcctttgccttgagaatgcggagctgaaagagcagatgggagaagcaatgtctgatggatgggagatcgaggaagacaaggagaagggcgaggtgatggttgagactgtggtaaccaaagagggtctgagtgagagtagccttcaggctgagttcagaaagctccagggaaaactgaagaatgcccacaatatcatcaacctcctcaaagaacaacttgtgctgagtagcaaggaagggaatagtaaacttactccagagctccttgtgcatctgaccagcaccattgaaagaataaacacagaactggttggttcccctgggaagcaccaacaccaagaggaggggaatgtgactgtgaggcctttccccagaccccagagccttgaccttggggctaccttcacagtggatgcccaccaattggataaccagtcccagcctcgtgaccctgggcctcagtcagcgtttagcctaccagggtccacccagcacctgcgctcccagctgtcacaatgcaaacaacgctatcaagatctccaggagaagctgctgctatcagaagccactgtctttgctcaggctaacgagctggagaaatacagagttatgcttacaggtgaatccttggtgaagcaggacagcaagcagatccaggtggacctccaggacctgggctatgagacttgtggccgaagcgagaatgaggctgaacgggaggaaaccaccagtcctgagtgtgaggagcacaacagcctcaaggaaatggtcctgatggaggggctgtgctctgagcagggacgccggggctcaacactggctagttcctctgagaggaagcccttggagaaccagctagggaagcaggaagagttccgggtatatggaaagtcagaaaacatcttggtcctacgaaaggacatcaaagatctgaaggcccagctgcagaatgccaacaaggtcattcaaaacctcaagagccgggtccggtccctctcagttacaagtgattattcgtctagtctggaaagaccccggaagctgagagctgttggcaccttggaggggtcttcacctcatagtgtccctgatgaggatgaggggtggctgtctgatggcactggggctttctactctccagggcttcaggccaaaaaggacctggagagtctcatccagagagtatcccagctggaggcccagctcccaaaaaatggactagaagagaagctggctgaggagctgagatcagcctcgtggcctgggaaatatgattccctgattcaggatcaggcccgggaactgtcttacctacggcaaaaaatacgagaagggagaggtatttgttatcttatcacccggcatgcaaaagatacagtaaaatcttttgaggatctcctaaggagcaatgacattgactactacctgggacagagcttccgggagcaactcgcccagggaagccagctgacagagaggctcaccagcaaactcagcaccaaggatcataaaagtgagaaagatcaagctggacttgagccactggccctcaggctcagcagggagctgcaggagaaggagaaagtgattgaagtcctgcaggccaagctggatgctcggtccctcacaccctccagcagccatgccttgtctgactcccaccgctctcccagcagcacctctttcctgtctgatgaactggaagcctgctctgacatggacatagtcagcgagtacacacactatgaagagaagaaagcttctcccagtcactcaggtgccagcactgttcctcctgcttccacagctacattgctgagcaacgacttggaagccgactcttcctactacctcaactctgcccagcctcactctcctccaaggggcaccatagaactgggaagaatcctagagcctgggtacctgggcagcagtggcaagtgggatgtgatgaggcctcagaaagggagtgtatctggggacctatcctcaggctcctctgtgtaccagcttaactccaaacccacaggggctgacctgctggaagagcatcttggtgaaatccggaacctgcgccagcgcctggaggaatccatctgcatcaatgaccgcctacgggagcaactggaacaccggctgacctctactgctcgtggaaggggatccacttctaacttctacagtcagggcctggagtccatacctcagctctgcaatgagaacagagtcctcagggaagacaatcgaagacttcaggctcaactgagtcatgtttccagagagcactcccaggaaacagaaagcctgagggaggctctgctgtcctctcgatcccaccttcaagagctggaaaaggagctggagcaccagaaggtggaaaggcagcagcttttggaagacttgagggagaagcagcaagaggtcttgcatttcagggaggaacgtctttccctccaggaaaacgactccagactgcagcacaagctggttctcctgcagcaacagtgtgaagagaaacagcagctctttgagtccctccagtcagagctacaaatctacgaggcactttatggcaattccaagaaggggctgaaagcttacagcctggatgcctgtcaccaaatccctttgagcagtgacctgagccacctggtggcagaggtacgagctctgagagggcagctggagcagagcattcaggggaacaattgtctgcgactgcagctgcaacagcagctggagagcggtgctggcaaagccagcctcagcccctcctccattaaccagaacttcccagccagcactgaccctggaaacaagcagctgctcctccaagattcagctgtgtcccctccagtccgggatgttggtatgaattccccagctctggtcttccccagctctgcttcctctactcctggctcagaaacgcccataatcaacagagcaaatggcttgggtttggatacttctccagtaatgaagacccctcccaagctagagggtgatgctactgatggctcctttgccaataagcatggccgccatgtcattggccacattgatgactacagtgccctaagacagcagattgcggagggcaagctgctggtcaaaaagatagtgtctcttgtgagatcagcgtgcagcttccctggccttgaagcccaaggcacagaggtgctaggcagcaaaggtattcatgagcttcggagcagcaccagtgccctgcaccatgccctagaggagtcagcttccctcctcaccatgttctggagagcggccctgccaagcacccacatccctgtgctgcctggcaaagtgggagaatcaacagaaagggaacttctggaactgagaaccaaagtatccaaacaggagcgactccttcagagcacaactgagcatctgaagaacgccaaccagcagaaggagagcatggaacagttcattgtcagccagctaaccagaacacatgatgttttaaagaaggcaaggactaacttagaggtgaaatccctaagggctctgccatgtactccagccttgtgacccttgccttccaggaaccatgcaagaagcgcagccaccagaagtccttaaaacagcaggaaaggtgggcctgtcccccttttgtgcagctacctatctgctgaggagcatctgggcctcattcctccaagtccacgggagggtccagaagagggagtcagagatgtatcctggtggagctgggagaaaggcagaaagcctttctgacggctatggaatacgattagccaaggtccacttggcccagcactaagaaaaagatgcgtagtttgcacagaaggttttgtgatcctgcctctcaacagccccagcagcttgggaactagcaagagcacatttcttgcctcatcagctgtcctgagatggaaaactcagtgaatataggaccctgattccgatgaaaggggcacgtggtcccaatgctggagctcctctggcaggttctaaaagcacactactgagcagcggtgccctgccggacactgctggcgggggctcagtgagcactactcacagatccacacctgaccctgttgggtcgagtcaggctgggccttggtctgcactgtagcacctgtgttctttgagttcacatcatgaatgtggtgacttcccagataccatctcaggcttaacctagcacatcctatttcttttcttctatgatatccaaattggactgacctcacttcaaagttgctgtcccattttgtcaccctatcttatctcggggaaattgcagactgatggccagaccaactctgttgaaattcttgcatagagcaaacctgtgctcatttttaagtggcatgggagaggccccaagcctagtaaagcctagtctgtgtcttcacagtgctggtagaatgtgtttgtgtgtataaatatatgatatagatttatatatgttgctaacgccatatattgaaggccaacataactggtggacagggtgggtgacagaaaatgaaagtctttttggtgattgttaaagcaagatgtgtataaagaaataaatagtttttctttca

SEQ ID NO: 367990 - DNA, 9361 bp, Homo sapiens
tggcgcgagctgcattcccagacactccagctcttacggaaagaagcactgtcttttgcgctagtgtttgtctaccgtcccctgtcctaaaataatgactgccctctacctgagggaaagggacttcaatggtggtaatctactcgcggctggctgcatccttaaaaaagcccatttctcttctactatcttcaagatcttggttaaccagattcacattgtatgtgccggactctttctcaggtgactgctctgtgcttttttatctaaagaagggcaagtcacccacgggtactaaccctcccccacccacatcaagggagaaacactcctctactcttttctggacattcctgttcagagtcgaggtaagggttgcacggccccgcccctccgttaccaagccttccctcgcctgcctcgcagcctcaggcccttagaacccaggcggggcggggccgggaaaggtgaggctgctggcgggaagcgggggcggcgcgcagcggtacctagcggcgctgccccgctggcagccggaggacgtggcactgtccgagaatgcagggaggggattcgtctttctcctccccgcgaggaggagcctcgacatcctgcagaggcgggaggatccttgagggcactggtgcgactttcaggtgaggtcttagcagatgaaagcggctggctgtggcccgcgccagtagtgctttctgctccgcactcgccgtgagccaggtgtgcaaccggatttggggcgagggtcgcgctggctacctcgcatgcgcagagccggaagcccgctgaccggactacagctcccagaagagccttgtggaggccgcagacgcgaagccgctggcgccatcttgaaatctgatcctccatccccgaggctttgcgtctgcgcggccggccgctgctgctccgggagcccagtctgctaaaaggggaggacgttgaggacgcggcggctggcgggagagacagctggggagagacatggcagggtcggagcgcggcctgcgcctctgtcactcagcatcctcttaggcgtttccacgcccgccccctgcccgaggggcggggctgacggctctggtacccggagtcggcgcgcggggcaggggcgcgcccctgcagagtggggaccccactgggctgtgccatgctgaccggagaccaccgaggcgggagacagagcgcggcgaagagccattgagtggtcacccagtagccgccgccgccgccgcctcgggaagcttgccacccgctaggagggaagatgaaggagatttgcaggatctgtgcccgagagctgtgtggaaaccagcggcgctggatcttccacacggcgtccaagctcaatctccaggttctgctttcgcacgtcttgggcaaggatgtcccccgcgatggcaaagccgagttcgcttgcagcaagtgtgctttcatgcttgatcgaatctatcgattcgacacagttattgcccggattgaagcgctttctattgagcgcttgcaaaagctgctactggagaaggatcgcctcaagttctgcattgccagtatgtatcggaagaataacgatgactctggcgcggagatcaaggcggggaatgggacggttgacatgtccgtcttacccgatgcgagatactctgcactgctccaggaggacttcgcctattcagggtttgagtgctgggtggagaatgaggatcagatccaggagccacacagctgccatggttcagaaggccctggaaaccgacccaggagatgccgtggttgtgccgctttgcgggttgctgattctgactatgaagccatttgtaaggtacctcgaaaggtggccagaagtatctcctgcggcccttctagcaggtggtcgaccagcatttgcactgaagaaccagcgttgtctgaggttgggccacccgacttagcaagcacaaaggtacccccagatggagaaagcatggaggaagagacgcctggttcctctgtggaatctttggatgcaagcgtccaggctagccctccacaacagaaagatgaggagactgagagaagtgcaaaggaacttggaaagtgtgactgttgttcagatgatcaggctccgcagcatgggtgtaatcacaagctggaattagctcttagcatgattaaaggtcttgattataagcccatccagagcccccgagggagcaggcttccgattccagtgaaatccagcctacctggagccaagcctggccctagcatgacagatggagttagttccggtttccttaacaggtctttgaaacccctttacaagacacctgtgagttatcccttggagctttcagacctgcaggagctgtgggatgatctctgtgaagattatttgccgctccgggtccagcccatgactgaagagttgctgaaacaacaaaagctgaattcacatgagaccactataactcagcagtctgtatctgattcccacttggcagaactccaggaaaaaatccagcaaacagaggccaccaacaagattcttcaagagaaacttaatgaaatgagctatgaactaaagtgtgctcaggagtcgtctcaaaagcaagatggtacaattcagaacctcaaggaaactctgaaaagcagggaacgtgagactgaggagttgtaccaggtaattgaaggtcaaaatgacacaatggcaaagcttcgagaaatgctgcaccaaagccagcttggacaacttcacagctcagagggtacttctccagctcagcaacaggtagctctgcttgatcttcagagtgctttattctgcagccaacttgaaatacagaagctccagagggtggtacgacagaaagagcgccaactggctgatgccaaacaatgtgtgcaatttgtagaggctgcagcacacgagagtgaacagcagaaagaggcttcttggaaacataaccaggaattgcgaaaagccttgcagcagctacaagaagaattgcagaataagagccaacagcttcgtgcctgggaggctgaaaaatacaatgagattcgaacccaggaacaaaacatccagcacctaaaccatagtctgagtcacaaggagcagttgcttcaggaatttcgggagctcctacagtatcgagataactcagacaaaacccttgaagcaaatgaaatgttgcttgagaaacttcgccagcgaatacatgataaagctgttgctctggagcgggctatagatgaaaaattctctgctctagaagagaaagaaaaagaactgcgccagcttcgtcttgctgtgagagagcgagatcatgacttagagagactgcgcgatgtcctctcctccaatgaagctactatgcaaagtatggagagtctcctgagggccaaaggcctggaagtggaacagttatctactacctgtcaaaacctccagtggctgaaagaagaaatggaaaccaaatttagccgttggcagaaggaacaagagagtatcattcagcagttacagacgtctcttcatgataggaacaaagaagtggaggatcttagtgcaacactgctctgcaaacttggaccagggcagagtgagatagcagaggagctgtgccagcgtctacagcgaaaggaaaggatgctgcaggaccttctaagtgatcgaaataaacaagtgctggaacatgaaatggagattcaaggcctgcttcagtctgtgagcaccagggagcaggaaagccaagctgctgcagagaagttggtgcaagccttaatggaaagaaattcagaattacaggccctgcgccaatatttaggagggagagactccctgatgtcccaagcacccatctctaaccaacaagctgaagttacccccactggccgtcttggaaaacagactgatcaaggttcaatgcagataccttccagagatgatagcacttcattgactgccaaagaggatgtcagcatacccagatccacattaggagacttggacacagttgcagggctggaaaaagaactgagtaatgccaaagaggaacttgaactcatggctaaaaaagaaagagaaagtcagatggaactttctgctctacagtccatgatggctgtgcaggaagaagagctgcaggtgcaggctgctgatatggagtctctgaccaggaacatacagattaaagaagatctcataaaggacctgcaaatgcaactggttgatcctgaagacataccagctatggaacgcctgacccaggaagtcttacttcttcgggaaaaagttgcttcagtagaatcccagggtcaagaaatttcaggaaaccgaagacaacagttgctgctgatgctagaaggactagtagatgaacggagtcggctcaatgaggccttacaagcagagagacagctctatagcagtctggtgaagttccatgcccatccagagagctctgagagagaccgaactctgcaggtggaactggaaggggctcaggtgttacgcagtcggctagaagaagttcttggaagaagcttggagcgcttaaacaggctggagaccctggccgccattggaggtgcagctgcaggggatgacaccgaagatacaagcactgagttcactgacagtattgaggaggaggctgcacaccatagtcaccagcaacttgtcaaggtggctttggagaaaagtctggcaactgtggagacccagaacccatctttttcccctccttctccgatgggaggggacagtaacaggtgtcttcaggaagaaatgctccacctgagggctgagttccaccagcacttagaagagaagaggaaagctgaggaggaactgaaggagctaaaggctcaaattgaggaagcaggattctcctcagtgtcccacatcaggaacaccatgctgagcctttgccttgagaatgcggagctgaaagagcagatgggagaagcaatgtctgatggatgggagatcgaggaagacaaggagaagggcgaggtgatggttgagactgtggtaaccaaagagggtctgagtgagagtagccttcaggctgagttcagaaagctccagggaaaactgaagaatgcccacaatatcatcaacctcctcaaagaacaacttgtgctgagtagcaaggaagggaatagtaaacttactccagagctccttgtgcatctgaccagcaccattgaaagaataaacacagaactggttggttcccctgggaagcaccaacaccaagaggaggggaatgtgactgtgaggcctttccccagaccccagagccttgaccttggggctaccttcacagtggatgcccaccaattggataaccagtcccagcctcgtgaccctgggcctcagtcagcgtttagcctaccagggtccacccagcacctgcgctcccagctgtcacaatgcaaacaacgctatcaagatctccaggagaagctgctgctatcagaagccactgtctttgctcaggctaacgagctggagaaatacagagttatgcttacaggtgaatccttggtgaagcaggacagcaagcagatccaggtggacctccaggacctgggctatgagacttgtggccgaagcgagaatgaggctgaacgggaggaaaccaccagtcctgagtgtgaggagcacaacagcctcaaggaaatggtcctgatggaggggctgtgctctgagcagggacgccggggctcaacactggctagttcctctgagaggaagcccttggagaaccagctagggaagcaggaagagttccgggtatatggaaagtcagaaaacatcttggtcctacgaaaggacatcaaagatctgaaggcccagctgcagaatgccaacaaggtcattcaaaacctcaagagccgggtccggtccctctcagttacaagtgattattcgtctagtctggaaagaccccggaagctgagagctgttggcaccttggaggggtcttcacctcatagtgtccctgatgaggatgaggggtggctgtctgatggcactggggctttctactctccagggcttcaggccaaaaaggacctggagagtctcatccagagagtatcccagctggaggcccagctcccaaaaaatggactagaagagaagctggctgaggagctgagatcagcctcgtggcctgggaaatatgattccctgattcaggatcaggcccgggaactgtcttacctacggcaaaaaatacgagaagggagaggtatttgttatcttatcacccggcatgcaaaagatacagtaaaatcttttgaggatctcctaaggagcaatgacattgactactacctgggacagagcttccgggagcaactcgcccagggaagccagctgacagagaggctcaccagcaaactcagcaccaaggatcataaaagtgagaaagatcaagctggacttgagccactggccctcaggctcagcagggagctgcaggagaaggagaaagtgattgaagtcctgcaggccaagctggatgctcggtccctcacaccctccagcagccatgccttgtctgactcccaccgctctcccagcagcacctctttcctgtctgatgaactggaagcctgctctgacatggacatagtcagcgagtacacacactatgaagagaagaaagcttctcccagtcactcagattccatccatcattcgagtcattctgctgtgttgtcttctaaaccatcatcaaccagtgcatctcagggggctaaggccgaatccaacagcaaccccatcagcttgccaactccccagaatacccccaaggaggccaaccaggcccattcaggctttcattttcactccatacccaagctggctagccttcctcaggcaccattgccctcagctccatccagcttcctgcctttcagccccactggccctctcctccttggctgctgtgagacaccagtggtctccttggctgaggctcagcaggagctacagatgctgcagaagcagttgggagaaagtgccagcactgttcctcctgcttccacagctacattgctgagcaacgacttggaagccgactcttcctactacctcaactctgcccagcctcactctcctccaaggggcaccatagaactgggaagaatcctagagcctgggtacctgggcagcagtggcaagtgggatgtgatgaggcctcagaaagggagtgtatctggggacctatcctcaggctcctctgtgtaccagcttaactccaaacccacaggggctgacctgctggaagagcatcttggtgaaatccggaacctgcgccagcgcctggaggaatccatctgcatcaatgaccgcctacgggagcaactggaacaccggctgacctctactgctcgtggaaggggatccacttctaacttctacagtcagggcctggagtccatacctcagctctgcaatgagaacagagtcctcagggaagacaatcgaagacttcaggctcaactgagtcatgtttccagagagcactcccaggaaacagaaagcctgagggaggctctgctgtcctctcgatcccaccttcaagagctggaaaaggagctggagcaccagaaggtggaaaggcagcagcttttggaagacttgagggagaagcagcaagaggtcttgcatttcagggaggaacgtctttccctccaggaaaacgactccaggcttgggtttggatacttctccagtaatgaagacccctcccaagctagagggtgatgctactgatggctcctttgccaataagcatggccgccatgtcattggccacattgatgactacagtgccctaagacagcagattgcggagggcaagctgctggtcaaaaagatagtgtctcttgtgagatcagcgtgcagcttccctggccttgaagcccaaggcacagaggtgctaggcagcaaaggtattcatgagcttcggagcagcaccagtgccctgcaccatgccctagaggagtcagcttccctcctcaccatgttctggagagcggccctgccaagcacccacatccctgtgctgcctggcaaagtgggagaatcaacagaaagggaacttctggaactgagaaccaaagtatccaaacaggagcgactccttcagagcacaactgagcatctgaagaacgccaaccagcagaaggagagcatggaacagttcattgtcagccagctaaccagaacacatgatgttttaaagaaggcaaggactaacttagaggtgaaatccctaagggctctgccatgtactccagccttgtgacccttgccttccaggaaccatgcaagaagcgcagccaccagaagtccttaaaacagcaggaaaggtgggcctgtcccccttttgtgcagctacctatctgctgaggagcatctgggcctcattcctccaagtccacgggagggtccagaagagggagtcagagatgtatcctggtggagctgggagaaaggcagaaagcctttctgacggctatggaatacgattagccaaggtccacttggcccagcactaagaaaaagatgcgtagtttgcacagaaggttttgtgatcctgcctctcaacagccccagcagcttgggaactagcaagagcacatttcttgcctcatcagctgtcctgagatggaaaactcagtgaatataggaccctgattccgatgaaaggggcacgtggtcccaatgctggagctcctctggcaggttctaaaagcacactactgagcagcggtgccctgccggacactgctggcgggggctcagtgagcactactcacagatccacacctgaccctgttgggtcgagtcaggctgggccttggtctgcactgtagcacctgtgttctttgagttcacatcatgaatgtggtgacttcccagataccatctcaggcttaacctagcacatcctatttcttttcttctatgatatccaaattggactgacctcacttcaaagttgctgtcccattttgtcaccctatcttatctcggggaaattgcagactgatggccagaccaactctgttgaaattcttgcatagagcaaacctgtgctcatttttaagtggcatgggagaggccccaagcctagtaaagcctagtctgtgtcttcacagtgctggtagaatgtgtttgtgtgtataaatatatgatatagatttatatatgttgctaacgccatatattgaaggccaacataactggtggacagggtgggtgacagaaaatgaaagtctttttggtgattgttaaagcaagatgtgtataaagaaataaatagtttttctttca

SEQ ID NO: 367991 - DNA, 5948 bp, Homo sapiens
cgagtgggttcctgcacatccaagcgcacccacaagggggaccctctgccatctcttgcccagttgggatacaccagccaccaggcagaggtcatacccacacgagacttggacacagttgcagggctggaaaaagaactgagtaatgccaaagaggaacttgaactcatggctaaaaaagaaagagaaagtcagatggaactttctgctctacagtccatgatggctgtgcaggaagaagagctgcaggtgcaggctgctgatatggagtctctgaccaggaacatacagattaaagaagatctcataaaggacctgcaaatgcaactggttgatcctgaagacataccagctatggaacgcctgacccaggaagtcttacttcttcgggaaaaagttgcttcagtagaatcccagggtcaagaaatttcaggaaaccgaagacaacagttgctgctgatgctagaaggactagtagatgaacggagtcggctcaatgaggccttacaagcagagagacagctctatagcagtctggtgaagttccatgcccatccagagagctctgagagagaccgaactctgcaggtggaactggaaggggctcaggtgttacgcagtcggctagaagaagttcttggaagaagcttggagcgcttaaacaggctggagaccctggccgccattggaggtgcagctgcaggggatgacaccgaagatacaagcactgagttcactgacagtattgaggaggaggctgcacaccatagtcaccagcaacttgtcaaggtggctttggagaaaagtctggcaactgtggagacccagaacccatctttttcccctccttctccgatgggaggggacagtaacaggtgtcttcaggaagaaatgctccacctgagggctgagttccaccagcacttagaagagaagaggaaagctgaggaggaactgaaggagctaaaggctcaaattgaggaagcaggattctcctcagtgtcccacatcaggaacaccatgctgagcctttgccttgagaatgcggagctgaaagagcagatgggagaagcaatgtctgatggatgggagatcgaggaagacaaggagaagggcgaggtgatggttgagactgtggtaaccaaagagggtctgagtgagagtagccttcaggctgagttcagaaagctccagggaaaactgaagaatgcccacaatatcatcaacctcctcaaagaacaacttgtgctgagtagcaaggaagggaatagtaaacttactccagagctccttgtgcatctgaccagcaccattgaaagaataaacacagaactggttggttcccctgggaagcaccaacaccaagaggaggggaatgtgactgtgaggcctttccccagaccccagagccttgaccttggggctaccttcacagtggatgcccaccaattggataaccagtcccagcctcgtgaccctgggcctcagtcagcgtttagcctaccagggtccacccagcacctgcgctcccagctgtcacaatgcaaacaacgctatcaagatctccaggagaagctgctgctatcagaagccactgtctttgctcaggctaacgagctggagaaatacagagttatgcttacaggtgaatccttggtgaagcaggacagcaagcagatccaggtggacctccaggacctgggctatgagacttgtggccgaagcgagaatgaggctgaacgggaggaaaccaccagtcctgagtgtgaggagcacaacagcctcaaggaaatggtcctgatggaggggctgtgctctgagcagggacgccggggctcaacactggctagttcctctgagaggaagcccttggagaaccagctagggaagcaggaagagttccgggtatatggaaagtcagaaaacatcttggtcctacgaaaggacatcaaagatctgaaggcccagctgcagaatgccaacaaggtcattcaaaacctcaagagccgggtccggtccctctcagttacaagtgattattcgtctagtctggaaagaccccggaagctgagagctgttggcaccttggaggggtcttcacctcatagtgtccctgatgaggatgaggggtggctgtctgatggcactggggctttctactctccagggcttcaggccaaaaaggacctggagagtctcatccagagagtatcccagctggaggcccagctcccaaaaaatggactagaagagaagctggctgaggagctgagatcagcctcgtggcctgggaaatatgattccctgattcaggatcaggcccgggaactgtcttacctacggcaaaaaatacgagaagggagaggtatttgttatcttatcacccggcatgcaaaagatacagtaaaatcttttgaggatctcctaaggagcaatgacattgactactacctgggacagagcttccgggagcaactcgcccagggaagccagctgacagagaggctcaccagcaaactcagcaccaaggatcataaaagtgagaaagatcaagctggacttgagccactggccctcaggctcagcagggagctgcaggagaaggagaaagtgattgaagtcctgcaggccaagctggatgctcggtccctcacaccctccagcagccatgccttgtctgactcccaccgctctcccagcagcacctctttcctgtctgatgaactggaagcctgctctgacatggacatagtcagcgagtacacacactatgaagagaagaaagcttctcccagtcactcagattccatccatcattcgagtcattctgctgtgttgtcttctaaaccatcatcaaccagtgcatctcagggggctaaggccgaatccaacagcaaccccatcagcttgccaactccccagaatacccccaaggaggccaaccaggcccattcaggctttcattttcactccatacccaagctggctagccttcctcaggcaccattgccctcagctccatccagcttcctgcctttcagccccactggccctctcctccttggctgctgtgagacaccagtggtctccttggctgaggctcagcaggagctacagatgctgcagaagcagttgggagaaagtgccagcactgttcctcctgcttccacagctacattgctgagcaacgacttggaagccgactcttcctactacctcaactctgcccagcctcactctcctccaaggggcaccatagaactgggaagaatcctagagcctgggtacctgggcagcagtggcaagtgggatgtgatgaggcctcagaaagggagtgtatctggggacctatcctcaggctcctctgtgtaccagcttaactccaaacccacaggggctgacctgctggaagagcatcttggtgaaatccggaacctgcgccagcgcctggaggaatccatctgcatcaatgaccgcctacgggagcaactggaacaccggctgacctctactgctcgtggaaggggatccacttctaacttctacagtcagggcctggagtccatacctcagctctgcaatgagaacagagtcctcagggaagacaatcgaagacttcaggctcaactgagtcatgtttccagagagcactcccaggaaacagaaagcctgagggaggctctgctgtcctctcgatcccaccttcaagagctggaaaaggagctggagcaccagaaggtggaaaggcagcagcttttggaagacttgagggagaagcagcaagaggtcttgcatttcagggaggaacgtctttccctccaggaaaacgactccagactgcagcacaagctggttctcctgcagcaacagtgtgaagagaaacagcagctctttgagtccctccagtcagagctacaaatctacgaggcactttatggcaattccaagaaggggctgaaagcttacagcctggatgcctgtcaccaaatccctttgagcagtgacctgagccacctggtggcagaggtacgagctctgagagggcagctggagcagagcattcaggggaacaattgtctgcgactgcagctgcaacagcagctggagagcggtgctggcaaagccagcctcagcccctcctccattaaccagaacttcccagccagcactgaccctggaaacaagcagctgctcctccaagattcagctgtgtcccctccagtccgggatgttggtatgaattccccagctctggtcttccccagctctgcttcctctactcctggctcagaaacgcccataatcaacagagcaaatggcttgggtttggatacttctccagtaatgaagacccctcccaagctagagggtgatgctactgatggctcctttgccaataagcatggccgccatgtcattggccacattgatgactacagtgccctaagacagcagattgcggagggcaagctgctggtcaaaaagatagtgtctcttgtgagatcagcgtgcagcttccctggccttgaagcccaaggcacagaggtgctaggcagcaaaggtattcatgagcttcggagcagcaccagtgccctgcaccatgccctagaggagtcagcttccctcctcaccatgttctggagagcggccctgccaagcacccacatccctgtgctgcctggcaaagtgggagaatcaacagaaagggaacttctggaactgagaaccaaagtatccaaacaggagcgactccttcagagcacaactgagcatctgaagaacgccaaccagcagaaggagagcatggaacagttcattgtcagccagctaaccagaacacatgatgttttaaagaaggcaaggactaacttagaggtgaaatccctaagggctctgccatgtactccagccttgtgacccttgccttccaggaaccatgcaagaagcgcagccaccagaagtccttaaaacagcaggaaaggtgggcctgtcccccttttgtgcagctacctatctgctgaggagcatctgggcctcattcctccaagtccacgggagggtccagaagagggagtcagagatgtatcctggtggagctgggagaaaggcagaaagcctttctgacggctatggaatacgattagccaaggtccacttggcccagcactaagaaaaagatgcgtagtttgcacagaaggttttgtgatcctgcctctcaacagccccagcagcttgggaactagcaagagcacatttcttgcctcatcagctgtcctgagatggaaaactcagtgaatataggaccctgattccgatgaaaggggcacgtggtcccaatgctggagctcctctggcaggttctaaaagcacactactgagcagcggtgccctgccggacactgctggcgggggctcagtgagcactactcacagatccacacctgaccctgttgggtcgagtcaggctgggccttggtctgcactgtagcacctgtgttctttgagttcacatcatgaatgtggtgacttcccagataccatctcaggcttaacctagcacatcctatttcttttcttctatgatatccaaattggactgacctcacttcaaagttgctgtcccattttgtcaccctatcttatctcggggaaattgcagactgatggccagaccaactctgttgaaattcttgcatagagcaaacctgtgctcatttttaagtggcatgggagaggccccaagcctagtaaagcctagtctgtgtcttcacagtgctggtagaatgtgtttgtgtgtataaatatatgatatagatttatatatgttgctaacgccatatattgaaggccaacataactggtggacagggtgggtgacagaaaatgaaagtctttttggtgattgttaaagcaagatgtgtataaagaaataaatagtttttctttca

SEQ ID NO: 367992 - DNA, 4965 bp, Homo sapiens
tggcgcgagctgcattcccagacactccagctcttacggaaagaagcactgtcttttgcgctagtgtttgtctaccgtcccctgtcctaaaataatgactgccctctacctgagggaaagggacttcaatggtggtaatctactcgcggctggctgcatccttaaaaaagcccatttctcttctactatcttcaagatcttggttaaccagattcacattgtatgtgccggactctttctcaggtgactgctctgtgcttttttatctaaagaagggcaagtcacccacgggtactaaccctcccccacccacatcaagggagaaacactcctctactcttttctggacattcctgttcagagtcgaggtaagggttgcacggccccgcccctccgttaccaagccttccctcgcctgcctcgcagcctcaggcccttagaacccaggcggggcggggccgggaaaggtgaggctgctggcgggaagcgggggcggcgcgcagcggtacctagcggcgctgccccgctggcagccggaggacgtggcactgtccgagaatgcagggaggggattcgtctttctcctccccgcgaggaggagcctcgacatcctgcagaggcgggaggatccttgagggcactggtgcgactttcaggtgaggtcttagcagatgaaagcggctggctgtggcccgcgccagtagtgctttctgctccgcactcgccgtgagccaggtgtgcaaccggatttggggcgagggtcgcgctggctacctcgcatgcgcagagccggaagcccgctgaccggactacagctcccagaagagccttgtggaggccgcagacgcgaagccgctggcgccatcttgaaatctgatcctccatccccgaggctttgcgtctgcgcggccggccgctgctgctccgggagcccagtctgctaaaaggggaggacgttgaggacgcggcggctggcgggagagacagctggggagagacatggcagggtcggagcgcggcctgcgcctctgtcactcagcatcctcttaggcgtttccacgcccgccccctgcccgaggggcggggctgacggctctggtacccggagtcggcgcgcggggcaggggcgcgcccctgcagagtggggaccccactgggctgtgccatgctgaccggagaccaccgaggcgggagacagagcgcggcgaagagccattgagtggtcacccagtagccgccgccgccgccgcctcgggaagcttgccacccgctaggagggaagatgaaggagatttgcaggatctgtgcccgagagctgtgtggaaaccagcggcgctggatcttccacacggcgtccaagctcaatctccaggttctgctttcgcacgtcttgggcaaggatgtcccccgcgatggcaaagccgagttcgcttgcagcaagtgtgctttcatgcttgatcgaatctatcgattcgacacagttattgcccggattgaagcgctttctattgagcgcttgcaaaagctgctactggagaaggatcgcctcaagttctgcattgccagtatgtatcggaagaataacgatgactctggcgcggagatcaaggcggggaatgggacggttgacatgtccgtcttacccgatgcgagatactctgcactgctccaggaggacttcgcctattcagggtttgagtgctgggtggagaatgaggatcagatccaggagccacacagctgccatggttcagaaggccctggaaaccgacccaggagatgccgtggttgtgccgctttgcgggttgctgattctgactatgaagccatttgtaaggtacctcgaaaggtggccagaagtatctcctgcggcccttctagcaggtggtcgaccagcatttgcactgaagaaccagcgttgtctgaggttgggccacccgacttagcaagcacaaaggtacccccagatggagaaagcatggaggaagagacgcctggttcctctgtggaatctttggatgcaagcgtccaggctagccctccacaacagaaagatgaggagactgagagaagtgcaaaggaacttggaaagtgtgactgttgttcagatgatcaggctccgcagcatgggtgtaatcacaagctggaattagctcttagcatgattaaaggtcttgattataagcccatccagagcccccgagggagcaggcttccgattccagtgaaatccagcctacctggagccaagcctggccctagcatgacagatggagttagttccggtttccttaacaggtctttgaaacccctttacaagacacctgtgagttatcccttggagctttcagacctgcaggagctgtgggatgatctctgtgaagattatttgccgctccgggtccagcccatgactgaagagttgctgaaacaacaaaagctgaattcacatgagaccactataactcagcagtctgtatctgattcccacttggcagaactccaggaaaaaatccagcaaacagaggccaccaacaagattcttcaagagaaacttaatgaaatgagctatgaactaaagtgtgctcaggagtcgtctcaaaagcaagatggtacaattcagaacctcaaggaaactctgaaaagcagggaacgtgagactgaggagttgtaccaggtaattgaaggtcaaaatgacacaatggcaaagcttcgagaaatgctgcaccaaagccagcttggacaacttcacagctcagagggtacttctccagctcagcaacaggtagctctgcttgatcttcagagtgctttattctgcagccaacttgaaatacagaagctccagagggtggtacgacagaaagagcgccaactggctgatgccaaacaatgtgtgcaatttgtagaggctgcagcacacgagagtgaacagcagaaagaggcttcttggaaacataaccaggaattgcgaaaagccttgcagcagctacaagaagaattgcagaataagagccaacagcttcgtgcctgggaggctgaaaaatacaatgagattcgaacccaggaacaaaacatccagcacctaaaccatagtctgagtcacaaggagcagttgcttcaggaatttcgggagctcctacagtatcgagataactcagacaaaacccttgaagcaaatgaaatgttgcttgagaaacttcgccagcgaatacatgataaagctgttgctctggagcgggctatagatgaaaaattctctgctctagaagagaaagaaaaagaactgcgccagcttcgtcttgctgtgagagagcgagatcatgacttagagagactgcgcgatgtcctctcctccaatgaagctactatgcaaagtatggagagtctcctgagggccaaaggcctggaagtggaacagttatctactacctgtcaaaacctccagtggctgaaagaagaaatggaaaccaaatttagccgttggcagaaggaacaagagagtatcattcagcagttacagacgtctcttcatgataggaacaaagaagtggaggatcttagtgcaacactgctctgcaaacttggaccagggcagagtgagatagcagaggagctgtgccagcgtctacagcgaaaggaaaggatgctgcaggaccttctaagtgatcgaaataaacaagtgctggaacatgaaatggagattcaaggcctgcttcagtctgtgagcaccagggagcaggaaagccaagctgctgcagagaagttggtgcaagccttaatggaaagaaattcagaattacaggccctgcgccaatatttaggagggagagactccctgatgtcccaagcacccatctctaaccaacaagctgaagttacccccactggccgtcttggaaaacagactgatcaaggttcaatgcagataccttccagagatgatagcacttcattgactgccaaagaggatgtcagcatacccagatccacattaggagacttggacacagttgcagggctggaaaaagaactgagtaatgccaaagaggaacttgaactcatggctaaaaaagaaagagaaagtcagatggaactttctgctctacagtccatgatggctgtgcaggaagaagagctgcaggtgcaggctgctgatatggagtctctgaccaggaacatacagattaaagaagatctcataaaggacctgcaaatgcaactggttgatcctgaagacataccagctatggaacgcctgacccaggaagtcttacttcttcgggaaaaagttgcttcagtagaatcccagggtcaagaaatttcaggaaaccgaagacaacagttgctgctgatgctagaaggactagtagatgaacggagtcggctcaatgaggccttacaagcagagagacagctctatagcagtctggtgaagttccatgcccatccagagagctctgagagagaccgaactctgcaggtggaactggaaggggctcaggtgttacgcagtcggctagaagaagttcttggaagaagcttggagcgcttaaacaggctggagaccctggccgccattggaggtggggaactggaaagtgtgcgaattcatcacaagcatgcctactgagcactggcgggtcagactgcagcccaggatggaaaaccttgtttgcactaaccagaaagatccttgtctgattttggcagaattaaacggtgacttactaatgatagaactggtacaagtagcatcaactacaaagtgaaactcactttagcctacatggatctcactgtacatacatatcaatccctaaattgaatggtggaggttgcaaagtgtatttgcacattttaaatcattctgttttagtttttccacttttattcattcttatccctagccccttctcgttccctcatcccttctgtgggccaataaagtttattcttccccaa

SEQ ID NO: 367993 - DNA, 6253 bp, Homo sapiens
  misc_feature (6222)..(6222): n is a, c, g, or t
tggcgcgagctgcattcccagacactccagctcttacggaaagaagcactgtcttttgcgctagtgtttgtctaccgtcccctgtcctaaaataatgactgccctctacctgagggaaagggacttcaatggtggtaatctactcgcggctggctgcatccttaaaaaagcccatttctcttctactatcttcaagatcttggttaaccagattcacattgtatgtgccggactctttctcaggtgactgctctgtgcttttttatctaaagaagggcaagtcacccacgggtactaaccctcccccacccacatcaagggagaaacactcctctactcttttctggacattcctgttcagagtcgaggtaagggttgcacggccccgcccctccgttaccaagccttccctcgcctgcctcgcagcctcaggcccttagaacccaggcggggcggggccgggaaaggtgaggctgctggcgggaagcgggggcggcgcgcagcggtacctagcggcgctgccccgctggcagccggaggacgtggcactgtccgagaatgcagggaggggattcgtctttctcctccccgcgaggaggagcctcgacatcctgcagaggcgggaggatccttgagggcactggtgcgactttcaggtgaggtcttagcagatgaaagcggctggctgtggcccgcgccagtagtgctttctgctccgcactcgccgtgagccaggtgtgcaaccggatttggggcgagggtcgcgctggctacctcgcatgcgcagagccggaagcccgctgaccggactacagctcccagaagagccttgtggaggccgcagacgcgaagccgctggcgccatcttgaaatctgatcctccatccccgaggctttgcgtctgcgcggccggccgctgctgctccgggagcccagtctgctaaaaggggaggacgttgaggacgcggcggctggcgggagagacagctggggagagacatggcagggtcggagcgcggcctgcgcctctgtcactcagcatcctcttaggcgtttccacgcccgccccctgcccgaggggcggggctgacggctctggtacccggagtcggcgcgcggggcaggggcgcgcccctgcagagtggggaccccactgggctgtgccatgctgaccggagaccaccgaggcgggagacagagcgcggcgaagagccattgagtggtcacccagtagccgccgccgccgccgcctcgggaagcttgccacccgctaggagggaagatgaaggagatttgcaggatctgtgcccgagagctgtgtggaaaccagcggcgctggatcttccacacggcgtccaagctcaatctccaggttctgctttcgcacgtcttgggcaaggatgtcccccgcgatggcaaagccgagttcgcttgcagcaagtgtgctttcatgcttgatcgaatctatcgattcgacacagttattgcccggattgaagcgctttctattgagcgcttgcaaaagctgctactggagaaggatcgcctcaagttctgcattgccagtatgtatcggaagaataacgatgactctggcgcggagatcaaggcggggaatgggacggttgacatgtccgtcttacccgatgcgagatactctgcactgctccaggaggacttcgcctattcagggtttgagtgctgggtggagaatgaggatcagatccaggagccacacagctgccatggttcagaaggccctggaaaccgacccaggagatgccgtggttgtgccgctttgcgggttgctgattctgactatgaagccatttgtaaggtacctcgaaaggtggccagaagtatctcctgcggcccttctagcaggtggtcgaccagcatttgcactgaagaaccagcgttgtctgaggttgggccacccgacttagcaagcacaaaggtacccccagatggagaaagcatggaggaagagacgcctggttcctctgtggaatctttggatgcaagcgtccaggctagccctccacaacagaaagatgaggagactgagagaagtgcaaaggaacttggaaagtgtgactgttgttcagatgatcaggctccgcagcatgggtgtaatcacaagctggaattagctcttagcatgattaaaggtcttgattataagcccatccagagcccccgagggagcaggcttccgattccagtgaaatccagcctacctggagccaagcctggccctagcatgacagatggagttagttccggtttccttaacaggtctttgaaacccctttacaagacacctgtgagttatcccttggagctttcagacctgcaggagctgtgggatgatctctgtgaagattatttgccgctccgggtccagcccatgactgaagagttgctgaaacaacaaaagctgaattcacatgagaccactataactcagcagtctgtatctgattcccacttggcagaactccaggaaaaaatccagcaaacagaggccaccaacaagattcttcaagagaaacttaatgaaatgagctatgaactaaagtgtgctcaggagtcgtctcaaaagcaagatggtacaattcagaacctcaaggaaactctgaaaagcagggaacgtgagactgaggagttgtaccaggtaattgaaggtcaaaatgacacaatggcaaagcttcgagaaatgctgcaccaaagccagcttggacaacttcacagctcagagggtacttctccagctcagcaacaggtagctctgcttgatcttcagagtgctttattctgcagccaacttgaaatacagaagctccagagggtggtacgacagaaagagcgccaactggctgatgccaaacaatgtgtgcaatttgtagaggctgcagcacacgagagtgaacagcagaaagaggcttcttggaaacataaccaggaattgcgaaaagccttgcagcagctacaagaagaattgcagaataagagccaacagcttcgtgcctgggaggctgaaaaatacaatgagattcgaacccaggaacaaaacatccagcacctaaaccatagtctgagtcacaaggagcagttgcttcaggaatttcgggagctcctacagtatcgagataactcagacaaaacccttgaagcaaatgaaatgttgcttgagaaacttcgccagcgaatacatgataaagctgttgctctggagcgggctatagatgaaaaattctctgctctagaagagaaagaaaaagaactgcgccagcttcgtcttgctgtgagagagcgagatcatgacttagagagactgcgcgatgtcctctcctccaatgaagctactatgcaaagtatggagagtctcctgagggccaaaggcctggaagtggaacagttatctactacctgtcaaaacctccagtggctgaaagaagaaatggaaaccaaatttagccgttggcagaaggaacaagagagtatcattcagcagttacagacgtctcttcatgataggaacaaagaagtggaggatcttagtgcaacactgctctgcaaacttggaccagggcagagtgagatagcagaggagctgtgccagcgtctacagcgaaaggaaaggatgctgcaggaccttctaagtgatcgaaataaacaagtgctggaacatgaaatggagattcaaggcctgcttcagtctgtgagcaccagggagcaggaaagccaagctgctgcagagaagttggtgcaagccttaatggaaagaaattcagaattacaggccctgcgccaatatttaggagggagagactccctgatgtcccaagcacccatctctaaccaacaagctgaagttacccccactggccgtcttggaaaacagactgatcaaggttcaatgcagataccttccagagatgatagcacttcattgactgccaaagaggatgtcagcatacccagatccacattaggagacttggacacagttgcagggctggaaaaagaactgagtaatgccaaagaggaacttgaactcatggctaaaaaagaaagagaaagtcagatggaactttctgctctacagtccatgatggctgtgcaggaagaagagctgcaggtgcaggctgctgatatggagtctctgaccaggaacatacagattaaagaagatctcataaaggacctgcaaatgcaactggttgatcctgaagacataccagctatggaacgcctgacccaggaagtcttacttcttcgggaaaaagttgcttcagtagaatcccagggtcaagaaatttcaggaaaccgaagacaacagttgctgctgatgctagaaggactagtagatgaacggagtcggctcaatgaggccttacaagcagagagacagctctatagcagtctggtgaagttccatgcccatccagagagctctgagagagaccgaactctgcaggtggaactggaaggggctcaggtgttacgcagtcggctagaagaagttcttggaagaagcttggagcgcttaaacaggctggagaccctggccgccattggaggtgcagctgcaggggatgacaccgaagatacaagcactgagttcactgacagtattgaggaggaggctgcacaccatagtcaccagcaactatagcttcagaagcatttttacttgcaagacgatggacacattccccttgggctttttgtaactgaaacgcaccacagaagacagggagtcatcgaagggctgctcggggaggtggcagggcggaggacctgcttgggaagaaactccaagaagattggaatgcttccaaagcaagaatctttctcagtgaaatctcattatacaaagagaaccttatgcaacctgacaaaccactgaggtcatggtgactcagtgatcagcagatggtacttcaacagcaatcccctgtcaaacctcagaacttgaggctgaaacattgcttccacccaccatcagtgaagatgtaactagcatgttacaagagtgaataatctggacttcagagattaagtcaccaatagtgatctcacaagcactcaccggaactcctataatgtctccactttgtccatgccatttagcaatctcatctcctaaatggactgtgcctatgattcttaaggagaaagtgaatcattggtagatatcctgcacaagcagctggactttccagtaatagctttcttggggctattaggaaaattaaacaagaaatgaggctttctgggtctgcctgtatgtcttctgcataagacaaagaagagacatcgaatcaaccaataagaagagcccaaataagcatcctcaaatcttttgggatttggcacttggggacatgagtagttgtctgggatacgtcatattctcaacagtttctttgtagtagtaggatcaccttcttataataggatcaccttcttgttgctatagctgtacccgaccttcccttctcccttgagtgcttgcatgagctccacttttccttttgcttgaacagcttctcctgagtcctccttaccgatggttgtgactttaattatatacatctctgtccctccagacagatccctctgtcctcactctctgatttcattgaggatcttgggtgagagagagggacctgcaggatgaacaaatgtctactctaagacagctagattgggaggttggctggtcactgatggttataatgactgtgggacaggattaacttcagaataaatgaacaggagacacagatatgaagaaagtttctgattgatatggtctgaagtactcctggtattgcaagtcatttgctctaattctcaattgtaggcaaactgatttgtaaatttgcttcttcagccttctttcctgtagcctagcatggagaatctgaccagaccccattttgagaaggtcagcctacactggaatgaactttttacattagggcatttgtatttccctcacaatacttgccacattacttggcataggagagatgctaggtatctgagtacagcttggatcaggtgatcgatgacagtttgcgcgaggagacctgggagccttgctcccactccgaaatatagtggagagatggggaacgatctcctcgaggagaccgcaaaagtgcaaaaacggggcccaataaggaggggccccccggcagcaatttntcacaaaacaccgcaccacagcgggcgcccc

SEQ ID NO: 367994 - DNA, 1359 bp, Homo sapiens
atgagaagtgatcaggggggcttggggatgttgggagttgagactgatttgatatccccaaacctcctgtaccaggagcaattgtggctgcagagggagtggaggacagggggtggatagaaggagactccaagctgaatagccagaaagaaataaatgctttagaattctcatgctaagcaagtagggttaatttctgctggtggtttctactctgtggtgctcttttgttgtttcagtaaccagaacacatgatgttttaaagaaggcaaggactaacttagaggtgaaatccctaagggctctgccatgtactccagccttgtgacccttgccttccaggaaccatgcaagaagcgcagccaccagaagtccttaaaacagcaggaaaggtgggcctgtcccccttttgtgcagctacctatctgctgaggagcatctgggcctcattcctccaagtccacgggagggtccagaagagggagtcagagatgtatcctggtggagctgggagaaaggcagaaagcctttctgacggctatggaatacgattagccaaggtccacttggcccagcactaagaaaaagatgcgtagtttgcacagaaggttttgtgatcctgcctctcaacagccccagcagcttgggaactagcaagagcacatttcttgcctcatcagctgtcctgagatggaaaactcagtgaatataggaccctgattccgatgaaaggggcacgtggtcccaatgctggagctcctctggcaggttctaaaagcacactactgagcagcggtgccctgccggacactgctggcgggggctcagtgagcactactcacagatccacacctgaccctgttgggtcgagtcaggctgggccttggtctgcactgtagcacctgtgttctttgagttcacatcatgaatgtggtgacttcccagataccatctcaggcttaacctagcacatcctatttcttttcttctatgatatccaaattggactgacctcacttcaaagttgctgtcccattttgtcaccctatcttatctcggggaaattgcagactgatggccagaccaactctgttgaaattcttgcatagagcaaacctgtgctcatttttaagtggcatgggagaggccccaagcctagtaaagcctagtctgtgtcttcacagtgctggtagaatgtgtttgtgtgtataaatatatgatatagatttatatatgttgctaacgccatatattgaaggccaacataactggtggacagggtgggtgacagaaaatgaaagtctttttggtgattgttaaagcaagatgtgtataaagaaataaatagtttttctttca

SEQ ID NO: 367995 - DNA, 4965 bp, Homo sapiens
  misc_feature (4453)..(4453): n is a, c, g, or t
tggcgcgagctgcattcccagacactccagctcttacggaaagaagcactgtcttttgcgctagtgtttgtctaccgtcccctgtcctaaaataatgactgccctctacctgagggaaagggacttcaatggtggtaatctactcgcggctggctgcatccttaaaaaagcccatttctcttctactatcttcaagatcttggttaaccagattcacattgtatgtgccggactctttctcaggtgactgctctgtgcttttttatctaaagaagggcaagtcacccacgggtactaaccctcccccacccacatcaagggagaaacactcctctactcttttctggacattcctgttcagagtcgaggtaagggttgcacggccccgcccctccgttaccaagccttccctcgcctgcctcgcagcctcaggcccttagaacccaggcggggcggggccgggaaaggtgaggctgctggcgggaagcgggggcggcgcgcagcggtacctagcggcgctgccccgctggcagccggaggacgtggcactgtccgagaatgcagggaggggattcgtctttctcctccccgcgaggaggagcctcgacatcctgcagaggcgggaggatccttgagggcactggtgcgactttcaggtgaggtcttagcagatgaaagcggctggctgtggcccgcgccagtagtgctttctgctccgcactcgccgtgagccaggtgtgcaaccggatttggggcgagggtcgcgctggctacctcgcatgcgcagagccggaagcccgctgaccggactacagctcccagaagagccttgtggaggccgcagacgcgaagccgctggcgccatcttgaaatctgatcctccatccccgaggctttgcgtctgcgcggccggccgctgctgctccgggagcccagtctgctaaaaggggaggacgttgaggacgcggcggctggcgggagagacagctggggagagacatggcagggtcggagcgcggcctgcgcctctgtcactcagcatcctcttaggcgtttccacgcccgccccctgcccgaggggcggggctgacggctctggtacccggagtcggcgcgcggggcaggggcgcgcccctgcagagtggggaccccactgggctgtgccatgctgaccggagaccaccgaggcgggagacagagcgcggcgaagagccattgagtggtcacccagtagccgccgccgccgccgcctcgggaagcttgccacccgctaggagggaagatgaaggagatttgcaggatctgtgcccgagagctgtgtggaaaccagcggcgctggatcttccacacggcgtccaagctcaatctccaggttctgctttcgcacgtcttgggcaaggatgtcccccgcgatggcaaagccgagttcgcttgcagcaagtgtgctttcatgcttgatcgaatctatcgattcgacacagttattgcccggattgaagcgctttctattgagcgcttgcaaaagctgctactggagaaggatcgcctcaagttctgcattgccagtatgtatcggaagaataacgatgactctggcgcggagatcaaggcggggaatgggacggttgacatgtccgtcttacccgatgcgagatactctgcactgctccaggaggacttcgcctattcagggtttgagtgctgggtggagaatgaggatcagatccaggagccacacagctgccatggttcagaaggccctggaaaccgacccaggagatgccgtggttgtgccgctttgcgggttgctgattctgactatgaagccatttgtaaggtacctcgaaaggtggccagaagtatctcctgcggcccttctagcaggtggtcgaccagcatttgcactgaagaaccagcgttgtctgaggttgggccacccgacttagcaagcacaaaggtacccccagatggagaaagcatggaggaagagacgcctggttcctctgtggaatctttggatgcaagcgtccaggctagccctccacaacagaaagatgaggagactgagagaagtgcaaaggaacttggaaagtgtgactgttgttcagatgatcaggctccgcagcatgggtgtaatcacaagctggaattagctcttagcatgattaaaggtcttgattataagcccatccagagcccccgagggagcaggcttccgattccagtgaaatccagcctacctggagccaagcctggccctagcatgacagatggagttagttccggtttccttaacaggtctttgaaacccctttacaagacacctgtgagttatcccttggagctttcagacctgcaggagctgtgggatgatctctgtgaagattatttgccgctccgggtccagcccatgactgaagagttgctgaaacaacaaaagctgaattcacatgagaccactataactcagcagtctgtatctgattcccacttggcagaactccaggaaaaaatccagcaaacagaggccaccaacaagattcttcaagagaaacttaatgaaatgagctatgaactaaagtgtgctcaggagtcgtctcaaaagcaagatggtacaattcagaacctcaaggaaactctgaaaagcagggaacgtgagactgaggagttgtaccaggtaattgaaggtcaaaatgacacaatggcaaagcttcgagaaatgctgcaccaaagccagcttggacaacttcacagctcagagggtacttctccagctcagcaacaggtagctctgcttgatcttcagagtgctttattctgcagccaacttgaaatacagaagctccagagggtggtacgacagaaagagcgccaactggctgatgccaaacaatgtgtgcaatttgtagaggctgcagcacacgagagtgaacagcagaaagaggcttcttggaaacataaccaggaattgcgaaaagccttgcagcagctacaagaagaattgcagaataagagccaacagcttcgtgcctgggaggctgaaaaatacaatgagattcgaacccaggaacaaaacatccagcacctaaaccatagtctgagtcacaaggagcagttgcttcaggaatttcgggagctcctacagtatcgagataactcagacaaaacccttgaagcaaatgaaatgttgcttgagaaacttcgccagcgaatacatgataaagctgttgctctggagcgggctatagatgaaaaattctctgctctagaagagaaagaaaaagaactgcgccagcttcgtcttgctgtgagagagcgagatcatgacttagagagactgcgcgatgtcctctcctccaatgaagctactatgcaaagtatggagagtctcctgagggccaaaggcctggaagtggaacagttatctactacctgtcaaaacctccagtggctgaaagaagaaatggaaaccaaatttagccgttggcagaaggaacaagagagtatcattcagcagttacagacgtctcttcatgataggaacaaagaagtggaggatcttagtgcaacactgctctgcaaacttggaccagggcagagtgagatagcagaggagctgtgccagcgtctacagcgaaaggaaaggatgctgcaggaccttctaagtgatcgaaataaacaagtgctggaacatgaaatggagattcaaggcctgcttcagtctgtgagcaccagggagcaggaaagccaagctgctgcagagaagttggtgcaagccttaatggaaagaaattcagaattacaggccctgcgccaatatttaggagggagagactccctgatgtcccaagcacccatctctaaccaacaagctgaagttacccccactggccgtcttggaaaacagactgatcaaggttcaatgcagataccttccagagatgatagcacttcattgactgccaaagaggatgtcagcatacccagatccacattaggagacttggacacagttgcagggctggaaaaagaactgagtaatgccaaagaggaacttgaactcatggctaaaaaagaaagagaaagtcagatggaactttctgctctacagtccatgatggctgtgcaggaagaagagctgcaggtgcaggctgctgatatggagtctctgaccaggaacatacagattaaagaagatctcataaaggacctgcaaatgcaactggttgatcctgaagacataccagctatggaacgcctgacccaggaagtcttacttcttcgggaaaaagttgcttcagtagaatcccagggtcaagaaatttcaggaaaccgaagacaacaggtaagttactggaatataaaccttatttatttatttacatttttttgtattcttttttttttttttagtagagatggagtttcaccatgttggtcaggctagtcttgnactcctgactgcaagtgatccatcctcctcggcccctcaaagtgctggaattacatacaagcatgagtcaccacattgagacaaggtctcactgtgtcacccaggcaggagtgcagtggtatgatcacagctcactgcagcctcaaactctggggctcaaggaatcttcctgcctcagcctcctgagtagctggagctgcaggtgcacaccaccacgcccggctcaaaccttatttttctactgtgaaataaaccatggtaaagctgtcaatctcagctatttgtggagggttagttgatggtatttcctagagaaactgtgctctaaaatttcctactttggtcggtagcagctatagatgcccctttctgacatttgtagttctgaaaagagcagcagttcttttggacacataccaatagttatccctcacactcatacctaagtcacctccctcaactgaatctttctcttttatctgcatttaaccatgttcagatctctcccagtt

SEQ ID NO: 367996 - DNA, 673 bp, Homo sapiens
ggctagtgcaacttggacatttggttttatttaattttagttgatgtagtataaagtggccatatgtggctgctaactaccttattggacagtacaggtctagggtcttgggactctaaattagttcagctccattcaacatttattgaacccctgcggataaagcacttgccagcttcaatggggctgctagagatgatagtgtacaatccctgacttacagatatctggtcccaactaaagcctgggttatctgaaggggagataatggcaaatgcaggctcctcctttggaaagaaattctgcttcctggagctggtgatctcttctcccaccagttcagagaagcttctctcccactgtggatctgccttccgtgcctcaaaaggttagggtatgtgccattgaggctgagggcatatgtgggaaattcagacattctgtaacacctgcttctcttcccaagcaggtgaatccttggtgaagcaggacagcaagcagatccaggtggacctccaggacctgggctatgagacttgtggccgaagcgagaatgaggctgaacgggaggaaaccaccagtcctggtaagagcacagggtgtggggctcacccctccctggagtcagctgtcacatttggatgctgttggccaattccacacctgacaagta

SEQ ID NO: 367997 - DNA, 752 bp, Homo sapiens
atatgacattgatttgaaaactataaaatagtatcaaaagcttaagtactaagatagtgggctttttaagtcatagtacatgctaatgcattttcttgtttcttattcatgtctcactgtgccatttgcgtattgcttcctctctcttctttactcagttgctgctgatgctagaaggactagtagatgaacggagtcggctcaatgaggccttacaagcagagagacagctctatagcagtctggtgaagttccatgcccatccagagaggtaagagagaggctgttttttcttttattctttattgaaatttttatttcttttactattgtatttatgccttttattcttcattaagtgcagatgcttatgatactgaagaggggagaaaaaagagggacaattaccggggctacccactttgtcatttgttttatggattgctctgagcctcagtgtcaaaatcttaagttgggattagtgcctgtttcacacagctattgcagagattaaataagaagacagcttttgtgtctaaaacaatgccttgcatgtagtaagcactcaatgtatgttcatttcttttctgtgatccatgtcctgttaaaggctgttctattataaacgtaaggctatgccctgtctctactaaaaatacaaaaattagctgggtgaggtagcgcgcgcctgtagtcccagctactcgggaagctgaggcaggagacacacttgaacctgggaggcagaggtt

SEQ ID NO: 367998 - DNA, 6304 bp, Homo sapiens
tggcgcgagctgcattcccagacactccagctcttacggaaagaagcactgtcttttgcgctagtgtttgtctaccgtcccctgtcctaaaataatgactgccctctacctgagggaaagggacttcaatggtggtaatctactcgcggctggctgcatccttaaaaaagcccatttctcttctactatcttcaagatcttggttaaccagattcacattgtatgtgccggactctttctcaggtgactgctctgtgcttttttatctaaagaagggcaagtcacccacgggtactaaccctcccccacccacatcaagggagaaacactcctctactcttttctggacattcctgttcagagtcgaggtaagggttgcacggccccgcccctccgttaccaagccttccctcgcctgcctcgcagcctcaggcccttagaacccaggcggggcggggccgggaaaggtgaggctgctggcgggaagcgggggcggcgcgcagcggtacctagcggcgctgccccgctggcagccggaggacgtggcactgtccgagaatgcagggaggggattcgtctttctcctccccgcgaggaggagcctcgacatcctgcagaggcgggaggatccttgagggcactggtgcgactttcaggtgaggtcttagcagatgaaagcggctggctgtggcccgcgccagtagtgctttctgctccgcactcgccgtgagccaggtgtgcaaccggatttggggcgagggtcgcgctggctacctcgcatgcgcagagccggaagcccgctgaccggactacagctcccagaagagccttgtggaggccgcagacgcgaagccgctggcgccatcttgaaatctgatcctccatccccgaggctttgcgtctgcgcggccggccgctgctgctccgggagcccagtctgctaaaaggggaggacgttgaggacgcggcggctggcgggagagacagctggggagagacatggcagggtcggagcgcggcctgcgcctctgtcactcagcatcctcttaggcgtttccacgcccgccccctgcccgaggggcggggctgacggctctggtacccggagtcggcgcgcggggcaggggcgcgcccctgcagagtggggaccccactgggctgtgccatgctgaccggagaccaccgaggcgggagacagagcgcggcgaagagccattgagtggtcacccagtagccgccgccgccgccgcctcgggaagcttgccacccgctaggagggaagatgaaggagatttgcaggatctgtgcccgagagctgtgtggaaaccagcggcgctggatcttccacacggcgtccaagctcaatctccaggttctgctttcgcacgtcttgggcaaggatgtcccccgcgatggcaaagccgagttcgcttgcagcaagtgtgctttcatgcttgatcgaatctatcgattcgacacagttattgcccggattgaagcgctttctattgagcgcttgcaaaagctgctactggagaaggatcgcctcaagttctgcattgccagtatgtatcggaagaataacgatgactctggcgcggagatcaaggcggggaatgggacggttgacatgtccgtcttacccgatgcgagatactctgcactgctccaggaggacttcgcctattcagggtttgagtgctgggtggagaatgaggatcagatccaggagccacacagctgccatggttcagaaggccctggaaaccgacccaggagatgccgtggttgtgccgctttgcgggttgctgattctgactatgaagccatttgtaaggtacctcgaaaggtggccagaagtatctcctgcggcccttctagcaggtggtcgaccagcatttgcactgaagaaccagcgttgtctgaggttgggccacccgacttagcaagcacaaaggtacccccagatggagaaagcatggaggaagagacgcctggttcctctgtggaatctttggatgcaagcgtccaggctagccctccacaacagaaagatgaggagactgagagaagtgcaaaggaacttggaaagtgtgactgttgttcagatgatcaggctccgcagcatgggtgtaatcacaagctggaattagctcttagcatgattaaaggtcttgattataagcccatccagagcccccgagggagcaggcttccgattccagtgaaatccagcctacctggagccaagcctggccctagcatgacagatggagttagttccggtttccttaacaggtctttgaaacccctttacaagacacctgtgagttatcccttggagctttcagacctgcaggagctgtgggatgatctctgtgaagattatttgccgctccgggtccagcccatgactgaagagttgctgaaacaacaaaagctgaattcacatgagaccactataactcagcagtctgtatctgattcccacttggcagaactccaggaaaaaatccagcaaacagaggccaccaacaagattcttcaagagaaacttaatgaaatgagctatgaactaaagtgtgctcaggagtcgtctcaaaagcaagatggtacaattcagaacctcaaggaaactctgaaaagcagggaacgtgagactgaggagttgtaccaggtaattgaaggtcaaaatgacacaatggcaaagcttcgagaaatgctgcaccaaagccagcttggacaacttcacagctcagagggtacttctccagctcagcaacaggtagctctgcttgatcttcagagtgctttattctgcagccaacttgaaatacagaagctccagagggtggtacgacagaaagagcgccaactggctgatgccaaacaatgtgtgcaatttgtagaggctgcagcacacgagagtgaacagcagaaagaggcttcttggaaacataaccaggaattgcgaaaagccttgcagcagctacaagaagaattgcagaataagagccaacagcttcgtgcctgggaggctgaaaaatacaatgagattcgaacccaggaacaaaacatccagcacctaaaccatagtctgagtcacaaggagcagttgcttcaggaatttcgggagctcctacagtatcgagataactcagacaaaacccttgaagcaaatgaaatgttgcttgagaaacttcgccagcgaatacatgataaagctgttgctctggagcgggctatagatgaaaaattctctgctctagaagagaaagaaaaagaactgcgccagcttcgtcttgctgtgagagagcgagatcatgacttagagagactgcgcgatgtcctctcctccaatgaagctactatgcaaagtatggagagtctcctgagggccaaaggcctggaagtggaacagttatctactacctgtcaaaacctccagtggctgaaagaagaaatggaaaccaaatttagccgttggcagaaggaacaagagagtatcattcagcagttacagacgtctcttcatgataggaacaaagaagtggaggatcttagtgcaacactgctctgcaaacttggaccagggcagagtgagatagcagaggagctgtgccagcgtctacagcgaaaggaaaggatgctgcaggaccttctaagtgatcgaaataaacaagtgctggaacatgaaatggagattcaaggcctgcttcagtctgtgagcaccagggagcaggaaagccaagctgctgcagagaagttggtgcaagccttaatggaaagaaattcagaattacaggccctgcgccaatatttaggagggagagactccctgatgtcccaagcacccatctctaaccaacaagctgaagttacccccactggccgtcttggaaaacagactgatcaaggttcaatgcagataccttccagagatgatagcacttcattgactgccaaagaggatgtcagcatacccagatccacattaggagacttggacacagttgcagggctggaaaaagaactgagtaatgccaaagaggaacttgaactcatggctaaaaaagaaagagaaagtcagatggaactttctgctctacagtccatgatggctgtgcaggaagaagagctgcaggtgcaggctgctgatatggagtctctgaccaggaacatacagattaaagaagatctcataaaggacctgcaaatgcaactggttgatcctgaagacataccagctatggaacgcctgacccaggaagtcttacttcttcgggaaaaagttgcttcagtagaatcccagggtcaagaaatttcaggaaaccgaagacaacagttgctgctgatgctagaaggactagtagatgaacggagtcggctcaatgaggccttacaagcagagagacagctctatagcagtctggtgaagttccatgcccatccagagagctctgagagagaccgaactctgcaggtggaactggaaggggctcaggtgttacgcagtcggctagaagaagttcttggaagaagcttggagcgcttaaacaggctggagaccctggccgccattggaggtgcagctgcaggggatgacaccgaagatacaagcactgagttcactgacagtattgaggaggaggctgcacaccatagtcaccagcaactatagcttcagaagcatttttacttgcaagacgatggacacattccccttgggctttttgtaactgaaacgcaccacagaagacagggagtcatcgaagggctgctcggggaggtggcagggcggaggacctgcttgggaagaaactccaagaagattggaatgcttccaaagcaagaatctttctcagtgaaatctcattatacaaagagaaccttatgcaacctgacaaaccactgaggtcatggtgactcagtgatcagcagatggtacttcaacagcaatcccctgtcaaacctcagaacttgaggctgaaacattgcttccacccaccatcagtgaagatgtaactagcatgttacaagagtgaataatctggacttcagagattaagtcaccaatagtgatctcacaagcactcaccggaactcctataatgtctccactttgtccatgccatttagcaatctcatctcctaaatggactgtgcctatgattcttaaggagaaagtgaatcattggtagatatcctgcacaagcagctggactttccagtaatagctttcttggggctattaggaaaattaaacaagaaatgaggctttctgggtctgcctgtatgtcttctgcataagacaaagaagagacatcgaatcaaccaataagaagagcccaaataagcatcctcaaatcttttgggatttggcacttggggacatgagtagttgtctgggatacgtcatattctcaacagtttctttgtagtagtaggatcaccttcttataataggatcaccttcttgttgctatagctgtacccgaccttcccttctcccttgagtgcttgcatgagctccacttttccttttgcttgaacagcttctcctgagtcctccttaccgatggttgtgactttaattatatacatctctgtccctccagacagatccctctgtcctcactctctgatttcattgaggatcttgggtgagagagagggacctgcaggatgaacaaatgtctactctaagacagctagattgggaggttggctggtcactgatggttataatgactgtgggacaggattaacttcagaataaatgaacaggagacacagatatgaagaaagtttctgattgatatggtctgaagtactcctggtattgcaagtcatttgctctaattctcaattgtaggcaaactgatttgtaaatttgcttcttcagccttctttcctgtagcctagcatggagaatctgaccagaccccattttgagaaggtcagcctacactggaatgaactttttacattagggcatttgtatttccctcacaatacttgccacattacttggcataggagagatgcttagtgtaattataagttaacaagcctttggatcagggcttgactcatgatagacaaagtatatgcctgctggatggaagaatctcttgggcgagcaccatttttctttccatcacctttccttgaaaatatatcttcagctttgggtaggaggaatcttggtgtatgaaatcattgcaaatttacttcatcttttctggagtttgaagttgtgactctcctgctaccaattaaataaagcttactttgccataac

SEQ ID NO: 367999 - DNA, 7172 bp, Homo sapiens
tctcctgctgtcgagctggtaagtaccctctgacgctgtgaaggttgtccaagctggctttggtgcagcatttctcgaagcttgcaacaggtagctctgcttgatcttcagagtgctttattctgcagccaacttgaaatacagaagctccagagggtggtacgacagaaagagcgccaactggctgatgccaaacaatgtgtgcaatttgtagaggctgcagcacacgagagtgaacagcagaaagaggcttcttggaaacataaccaggaattgcgaaaagccttgcagcagctacaagaagaattgcagaataagagccaacagcttcgtgcctgggaggctgaaaaatacaatgagattcgaacccaggaacaaaacatccagcacctaaaccatagtctgagtcacaaggagcagttgcttcaggaatttcgggagctcctacagtatcgagataactcagacaaaacccttgaagcaaatgaaatgttgcttgagaaacttcgccagcgaatacatgataaagctgttgctctggagcgggctatagatgaaaaattctctgctctagaagagaaagaaaaagaactgcgccagcttcgtcttgctgtgagagagcgagatcatgacttagagagactgcgcgatgtcctctcctccaatgaagctactatgcaaagtatggagagtctcctgagggccaaaggcctggaagtggaacagttatctactacctgtcaaaacctccagtggctgaaagaagaaatggaaaccaaatttagccgttggcagaaggaacaagagagtatcattcagcagttacagacgtctcttcatgataggaacaaagaagtggaggatcttagtgcaacactgctctgcaaacttggaccagggcagagtgagatagcagaggagctgtgccagcgtctacagcgaaaggaaaggatgctgcaggaccttctaagtgatcgaaataaacaagtgctggaacatgaaatggagattcaaggcctgcttcagtctgtgagcaccagggagcaggaaagccaagctgctgcagagaagttggtgcaagccttaatggaaagaaattcagaattacaggccctgcgccaatatttaggagggagagactccctgatgtcccaagcacccatctctaaccaacaagctgaagttacccccactggccgtcttggaaaacagactgatcaaggttcaatgcagataccttccagagatgatagcacttcattgactgccaaagaggatgtcagcatacccagatccacattaggagacttggacacagttgcagggctggaaaaagaactgagtaatgccaaagaggaacttgaactcatggctaaaaaagaaagagaaagtcagatggaactttctgctctacagtccatgatggctgtgcaggaagaagagctgcaggtgcaggctgctgatatggagtctctgaccaggaacatacagattaaagaagatctcataaaggacctgcaaatgcaactggttgatcctgaagacataccagctatggaacgcctgacccaggaagtcttacttcttcgggaaaaagttgcttcagtagaatcccagggtcaagaaatttcaggaaaccgaagacaacagttgctgctgatgctagaaggactagtagatgaacggagtcggctcaatgaggccttacaagcagagagacagctctatagcagtctggtgaagttccatgcccatccagagagctctgagagagaccgaactctgcaggtggaactggaaggggctcaggtgttacgcagtcggctagaagaagttcttggaagaagcttggagcgcttaaacaggctggagaccctggccgccattggaggtgcagctgcaggggatgacaccgaagatacaagcactgagttcactgacagtattgaggaggaggctgcacaccatagtcaccagcaacttgtcaaggtggctttggagaaaagtctggcaactgtggagacccagaacccatctttttcccctccttctccgatgggaggggacagtaacaggtgtcttcaggaagaaatgctccacctgagggctgagttccaccagcacttagaagagaagaggaaagctgaggaggaactgaaggagctaaaggctcaaattgaggaagcaggattctcctcagtgtcccacatcaggaacaccatgctgagcctttgccttgagaatgcggagctgaaagagcagatgggagaagcaatgtctgatggatgggagatcgaggaagacaaggagaagggcgaggtgatggttgagactgtggtaaccaaagagggtctgagtgagagtagccttcaggctgagttcagaaagctccagggaaaactgaagaatgcccacaatatcatcaacctcctcaaagaacaacttgtgctgagtagcaaggaagggaatagtaaacttactccagagctccttgtgcatctgaccagcaccattgaaagaataaacacagaactggttggttcccctgggaagcaccaacaccaagaggaggggaatgtgactgtgaggcctttccccagaccccagagccttgaccttggggctaccttcacagtggatgcccaccaattggataaccagtcccagcctcgtgaccctgggcctcagtcagcgtttagcctaccagggtccacccagcacctgcgctcccagctgtcacaatgcaaacaacgctatcaagatctccaggagaagctgctgctatcagaagccactgtctttgctcaggctaacgagctggagaaatacagagttatgcttacaggtgaatccttggtgaagcaggacagcaagcagatccaggtggacctccaggacctgggctatgagacttgtggccgaagcgagaatgaggctgaacgggaggaaaccaccagtcctgagtgtgaggagcacaacagcctcaaggaaatggtcctgatggaggggctgtgctctgagcagggacgccggggctcaacactggctagttcctctgagaggaagcccttggagaaccagctagggaagcaggaagagttccgggtatatggaaagtcagaaaacatcttggtcctacgaaaggacatcaaagatctgaaggcccagctgcagaatgccaacaaggtcattcaaaacctcaagagccgggtccggtccctctcagttacaagtgattattcgtctagtctggaaagaccccggaagctgagagctgttggcaccttggaggggtcttcacctcatagtgtccctgatgaggatgaggggtggctgtctgatggcactggggctttctactctccagggcttcaggccaaaaaggacctggagagtctcatccagagagtatcccagctggaggcccagctcccaaaaaatggactagaagagaagctggctgaggagctgagatcagcctcgtggcctgggaaatatgattccctgattcaggatcaggcccgggaactgtcttacctacggcaaaaaatacgagaagggagaggtatttgttatcttatcacccggcatgcaaaagatacagtaaaatcttttgaggatctcctaaggagcaatgacattgactactacctgggacagagcttccgggagcaactcgcccagggaagccagctgacagagaggctcaccagcaaactcagcaccaaggatcataaaagtgagaaagatcaagctggacttgagccactggccctcaggctcagcagggagctgcaggagaaggagaaagtgattgaagtcctgcaggccaagctggatgctcggtccctcacaccctccagcagccatgccttgtctgactcccaccgctctcccagcagcacctctttcctgtctgatgaactggaagcctgctctgacatggacatagtcagcgagtacacacactatgaagagaagaaagcttctcccagtcactcagattccatccatcattcgagtcattctgctgtgttgtcttctaaaccatcatcaaccagtgcatctcagggggctaaggccgaatccaacagcaaccccatcagcttgccaactccccagaatacccccaaggaggccaaccaggcccattcaggctttcattttcactccatacccaagctggctagccttcctcaggcaccattgccctcagctccatccagcttcctgcctttcagccccactggccctctcctccttggctgctgtgagacaccagtggtctccttggctgaggctcagcaggagctacagatgctgcagaagcagttgggagaaagtgccagcactgttcctcctgcttccacagctacattgctgagcaacgacttggaagccgactcttcctactacctcaactctgcccagcctcactctcctccaaggggcaccatagaactgggaagaatcctagagcctgggtacctgggcagcagtggcaagtgggatgtgatgaggcctcagaaagggagtgtatctggggacctatcctcaggctcctctgtgtaccagcttaactccaaacccacaggggctgacctgctggaagagcatcttggtgaaatccggaacctgcgccagcgcctggaggaatccatctgcatcaatgaccgcctacgggagcaactggaacaccggctgacctctactgctcgtggaaggggatccacttctaacttctacagtcagggcctggagtccatacctcagctctgcaatgagaacagagtcctcagggaagacaatcgaagacttcaggctcaactgagtcatgtttccagagagcactcccaggaaacagaaagcctgagggaggctctgctgtcctctcgatcccaccttcaagagctggaaaaggagctggagcaccagaaggtggaaaggcagcagcttttggaagacttgagggagaagcagcaagaggtcttgcatttcagggaggaacgtctttccctccaggaaaacgactccagtgggccttgcctctccctggtcagactgcagcacaagctggttctcctgcagcaacagtgtgaagagaaacagcagctctttgagtccctccagtcagagctacaaatctacgaggcactttatggcaattccaagaaggggctgaaagcttacagcctggatgcctgtcaccaaatccctttgagcagtgacctgagccacctggtggcagaggtacgagctctgagagggcagctggagcagagcattcaggggaacaattgtctgcgactgcagctgcaacagcagctggagagcggtgctggcaaagccagcctcagcccctcctccattaaccagaacttcccagccagcactgaccctggaaacaagcagctgctcctccaagattcagctgtgtcccctccagtccgggatgttggtatgaattccccagctctggtcttccccagctctgcttcctctactcctggctcagaaacgcccataatcaacagagcaaatggcttgggtttggatacttctccagtaatgaagacccctcccaagctagagggtgatgctactgatggctcctttgccaataagcatggccgccatgtcattggccacattgatgactacagtgccctaagacagcagattgcggagggcaagctgctggtcaaaaagatagtgtctcttgtgagatcagcgtgcagcttccctggccttgaagcccaaggcacagaggtgctaggcagcaaaggtattcatgagcttcggagcagcaccagtgccctgcaccatgccctagaggagtcagcttccctcctcaccatgttctggagagcggccctgccaagcacccacatccctgtgctgcctggcaaagtgggagaatcaacagaaagggaacttctggaactgagaaccaaagtatccaaacaggagcgactccttcagagcacaactgagcatctgaagaacgccaaccagcagaaggagagcatggaacagttcattgtcagccagctaaccagaacacatgatgttttaaagaaggcaaggactaacttagaggtgaaatccctaagggctctgccatgtactccagccttgtgacccttgccttccaggaaccatgcaagaagcgcagccaccagaagtccttaaaacagcaggaaaggtgggcctgtcccccttttgtgcagctacctatctgctgaggagcatctgggcctcattcctccaagtccacgggagggtccagaagagggagtcagagatgtatcctggtggagctgggagaaaggcagaaagcctttctgacggctatggaatacgattagccaaggtccacttggcccagcactaagaaaaagatgcgtagtttgcacagaaggttttgtgatcctgcctctcaacagccccagcagcttgggaactagcaagagcacatttcttgcctcatcagctgtcctgagatggaaaactcagtgaatataggaccctgattccgatgaaaggggcacgtggtcccaatgctggagctcctctggcaggttctaaaagcacactactgagcagcggtgccctgccggacactgctggcgggggctcagtgagcactactcacagatccacacctgaccctgttgggtcgagtcaggctgggccttggtctgcactgtagcacctgtgttctttgagttcacatcatgaatgtggtgacttcccagataccatctcaggcttaacctagcacatcctatttcttttcttctatgatatccaaattggactgacctcacttcaaagttgctgtcccattttgtcaccctatcttatctcggggaaattgcagactgatggccagaccaactctgttgaaattcttgcatagagcaaacctgtgctcatttttaagtggcatgggagaggccccaagcctagtaaagcctagtctgtgtcttcacagtgctggtagaatgtgtttgtgtgtataaatatatgatatagatttatatatgttgctaacgccatatattgaaggccaacataactggtggacagggtgggtgacagaaaatgaaagtctttttggtgattgttaaagcaagatgtgtataaagaaataaatagtttttctttca

SEQ ID NO: 368000 - DNA, 9843 bp, Homo sapiens
tggcgcgagctgcattcccagacactccagctcttacggaaagaagcactgtcttttgcgctagtgtttgtctaccgtcccctgtcctaaaataatgactgccctctacctgagggaaagggacttcaatggtggtaatctactcgcggctggctgcatccttaaaaaagcccatttctcttctactatcttcaagatcttggttaaccagattcacattgtatgtgccggactctttctcaggtgactgctctgtgcttttttatctaaagaagggcaagtcacccacgggtactaaccctcccccacccacatcaagggagaaacactcctctactcttttctggacattcctgttcagagtcgaggtaagggttgcacggccccgcccctccgttaccaagccttccctcgcctgcctcgcagcctcaggcccttagaacccaggcggggcggggccgggaaaggtgaggctgctggcgggaagcgggggcggcgcgcagcggtacctagcggcgctgccccgctggcagccggaggacgtggcactgtccgagaatgcagggaggggattcgtctttctcctccccgcgaggaggagcctcgacatcctgcagaggcgggaggatccttgagggcactggtgcgactttcaggtgaggtcttagcagatgaaagcggctggctgtggcccgcgccagtagtgctttctgctccgcactcgccgtgagccaggtgtgcaaccggatttggggcgagggtcgcgctggctacctcgcatgcgcagagccggaagcccgctgaccggactacagctcccagaagagccttgtggaggccgcagacgcgaagccgctggcgccatcttgaaatctgatcctccatccccgaggctttgcgtctgcgcggccggccgctgctgctccgggagcccagtctgctaaaaggggaggacgttgaggacgcggcggctggcgggagagacagctggggagagacatggcagggtcggagcgcggcctgcgcctctgtcactcagcatcctcttaggcgtttccacgcccgccccctgcccgaggggcggggctgacggctctggtacccggagtcggcgcgcggggcaggggcgcgcccctgcagagtggggaccccactgggctgtgccatgctgaccggagaccaccgaggcgggagacagagcgcggcgaagagccattgagtggtcacccagtagccgccgccgccgccgcctcgggaagcttgccacccgctaggagggaagatgaaggagatttgcaggatctgtgcccgagagctgtgtggaaaccagcggcgctggatcttccacacggcgtccaagctcaatctccaggttctgctttcgcacgtcttgggcaaggatgtcccccgcgatggcaaagccgagttcgcttgcagcaagtgtgctttcatgcttgatcgaatctatcgattcgacacagttattgcccggattgaagcgctttctattgagcgcttgcaaaagctgctactggagaaggatcgcctcaagttctgcattgccagtatgtatcggaagaataacgatgactctggcgcggagatcaaggcggggaatgggacggttgacatgtccgtcttacccgatgcgagatactctgcactgctccaggaggacttcgcctattcagggtttgagtgctgggtggagaatgaggatcagatccaggagccacacagctgccatggttcagaaggccctggaaaccgacccaggagatgccgtggttgtgccgctttgcgggttgctgattctgactatgaagccatttgtaaggtacctcgaaaggtggccagaagtatctcctgcggcccttctagcaggtggtcgaccagcatttgcactgaagaaccagcgttgtctgaggttgggccacccgacttagcaagcacaaaggtacccccagatggagaaagcatggaggaagagacgcctggttcctctgtggaatctttggatgcaagcgtccaggctagccctccacaacagaaagatgaggagactgagagaagtgcaaaggaacttggaaagtgtgactgttgttcagatgatcaggctccgcagcatgggtgtaatcacaagctggaattagctcttagcatgattaaaggtcttgattataagcccatccagagcccccgagggagcaggcttccgattccagtgaaatccagcctacctggagccaagcctggccctagcatgacagatggagttagttccggtttccttaacaggtctttgaaacccctttacaagacacctgtgagttatcccttggagctttcagacctgcaggagctgtgggatgatctctgtgaagattatttgccgctccgggtccagcccatgactgaagagttgctgaaacaacaaaagctgaattcacatgagaccactataactcagcagtctgtatctgattcccacttggcagaactccaggaaaaaatccagcaaacagaggccaccaacaagattcttcaagagaaacttaatgaaatgagctatgaactaaagtgtgctcaggagtcgtctcaaaagcaagatggtacaattcagaacctcaaggaaactctgaaaagcagggaacgtgagactgaggagttgtaccaggtaattgaaggtcaaaatgacacaatggcaaagcttcgagaaatgctgcaccaaagccagcttggacaacttcacagctcagagggtacttctccagctcagcaacaggtagctctgcttgatcttcagagtgctttattctgcagccaacttgaaatacagaagctccagagggtggtacgacagaaagagcgccaactggctgatgccaaacaatgtgtgcaatttgtagaggctgcagcacacgagagtgaacagcagaaagaggcttcttggaaacataaccaggaattgcgaaaagccttgcagcagctacaagaagaattgcagaataagagccaacagcttcgtgcctgggaggctgaaaaatacaatgagattcgaacccaggaacaaaacatccagcacctaaaccatagtctgagtcacaaggagcagttgcttcaggaatttcgggagctcctacagtatcgagataactcagacaaaacccttgaagcaaatgaaatgttgcttgagaaacttcgccagcgaatacatgataaagctgttgctctggagcgggctatagatgaaaaattctctgctctagaagagaaagaaaaagaactgcgccagcttcgtcttgctgtgagagagcgagatcatgacttagagagactgcgcgatgtcctctcctccaatgaagctactatgcaaagtatggagagtctcctgagggccaaaggcctggaagtggaacagttatctactacctgtcaaaacctccagtggctgaaagaagaaatggaaaccaaatttagccgttggcagaaggaacaagagagtatcattcagcagttacagacgtctcttcatgataggaacaaagaagtggaggatcttagtgcaacactgctctgcaaacttggaccagggcagagtgagatagcagaggagctgtgccagcgtctacagcgaaaggaaaggatgctgcaggaccttctaagtgatcgaaataaacaagtgctggaacatgaaatggagattcaaggcctgcttcagtctgtgagcaccagggagcaggaaagccaagctgctgcagagaagttggtgcaagccttaatggaaagaaattcagaattacaggccctgcgccaatatttaggagggagagactccctgatgtcccaagcacccatctctaaccaacaagctgaagttacccccactggccgtcttggaaaacagactgatcaaggttcaatgcagataccttccagagatgatagcacttcattgactgccaaagaggatgtcagcatacccagatccacattaggagacttggacacagttgcagggctggaaaaagaactgagtaatgccaaagaggaacttgaactcatggctaaaaaagaaagagaaagtcagatggaactttctgctctacagtccatgatggctgtgcaggaagaagagctgcaggtgcaggctgctgatatggagtctctgaccaggaacatacagattaaagaagatctcataaaggacctgcaaatgcaactggttgatcctgaagacataccagctatggaacgcctgacccaggaagtcttacttcttcgggaaaaagttgcttcagtagaatcccagggtcaagaaatttcaggaaaccgaagacaacagttgctgctgatgctagaaggactagtagatgaacggagtcggctcaatgaggccttacaagcagagagacagctctatagcagtctggtgaagttccatgcccatccagagagctctgagagagaccgaactctgcaggtggaactggaaggggctcaggtgttacgcagtcggctagaagaagttcttggaagaagcttggagcgcttaaacaggctggagaccctggccgccattggaggtgcagctgcaggggatgacaccgaagatacaagcactgagttcactgacagtattgaggaggaggctgcacaccatagtcaccagcaacttgtcaaggtggctttggagaaaagtctggcaactgtggagacccagaacccatctttttcccctccttctccgatgggaggggacagtaacaggtgtcttcaggaagaaatgctccacctgagggctgagttccaccagcacttagaagagaagaggaaagctgaggaggaactgaaggagctaaaggctcaaattgaggaagcaggattctcctcagtgtcccacatcaggaacaccatgctgagcctttgccttgagaatgcggagctgaaagagcagatgggagaagcaatgtctgatggatgggagatcgaggaagacaaggagaagggcgaggtgatggttgagactgtggtaaccaaagagggtctgagtgagagtagccttcaggctgagttcagaaagctccagggaaaactgaagaatgcccacaatatcatcaacctcctcaaagaacaacttgtgctgagtagcaaggaagggaatagtaaacttactccagagctccttgtgcatctgaccagcaccattgaaagaataaacacagaactggttggttcccctgggaagcaccaacaccaagaggaggggaatgtgactgtgaggcctttccccagaccccagagccttgaccttggggctaccttcacagtggatgcccaccaattggataaccagtcccagcctcgtgaccctgggcctcagtcagcgtttagcctaccagggtccacccagcacctgcgctcccagctgtcacaatgcaaacaacgctatcaagatctccaggagaagctgctgctatcagaagccactgtctttgctcaggctaacgagctggagaaatacagagttatgcttacaggtgaatccttggtgaagcaggacagcaagcagatccaggtggacctccaggacctgggctatgagacttgtggccgaagcgagaatgaggctgaacgggaggaaaccaccagtcctgagtgtgaggagcacaacagcctcaaggaaatggtcctgatggaggggctgtgctctgagcagggacgccggggctcaacactggctagttcctctgagaggaagcccttggagaaccagctagggaagcaggaagagttccgggtatatggaaagtcagaaaacatcttggtcctacgaaaggacatcaaagatctgaaggcccagctgcagaatgccaacaaggtcattcaaaacctcaagagccgggtccggtccctctcagttacaagtgattattcgtctagtctggaaagaccccggaagctgagagctgttggcaccttggaggggtcttcacctcatagtgtccctgatgaggatgaggggtggctgtctgatggcactggggctttctactctccagggcttcaggccaaaaaggacctggagagtctcatccagagagtatcccagctggaggcccagctcccaaaaaatggactagaagagaagctggctgaggagctgagatcagcctcgtggcctgggaaatatgattccctgattcaggatcaggcccgggaactgtcttacctacggcaaaaaatacgagaagggagaggtatttgttatcttatcacccggcatgcaaaagatacagtaaaatcttttgaggatctcctaaggagcaatgacattgactactacctgggacagagcttccgggagcaactcgcccagggaagccagctgacagagaggctcaccagcaaactcagcaccaaggatcataaaagtgagaaagatcaagctggacttgagccactggccctcaggctcagcagggagctgcaggagaaggagaaagtgattgaagtcctgcaggccaagctggatgctcggtccctcacaccctccagcagccatgccttgtctgactcccaccgctctcccagcagcacctctttcctgtctgatgaactggaagcctgctctgacatggacatagtcagcgagtacacacactatgaagagaagaaagcttctcccagtcactcagattccatccatcattcgagtcattctgctgtgttgtcttctaaaccatcatcaaccagtgcatctcagggggctaaggccgaatccaacagcaaccccatcagcttgccaactccccagaatacccccaaggaggccaaccaggcccattcaggctttcattttcactccatacccaagctggctagccttcctcaggcaccattgccctcagctccatccagcttcctgcctttcagccccactggccctctcctccttggctgctgtgagacaccagtggtctccttggctgaggctcagcaggagctacagatgctgcagaagcagttgggagaaagtgccagcactgttcctcctgcttccacagctacattgctgagcaacgacttggaagccgactcttcctactacctcaactctgcccagcctcactctcctccaaggggcaccatagaactgggaagaatcctagagcctgggtacctgggcagcagtggcaagtgggatgtgatgaggcctcagaaagggagtgtatctggggacctatcctcaggctcctctgtgtaccagcttaactccaaacccacaggggctgacctgctggaagagcatcttggtgaaatccggaacctgcgccagcgcctggaggaatccatctgcatcaatgaccgcctacgggagcaactggaacaccggctgacctctactgctcgtggaaggggatccacttctaacttctacagtcagggcctggagtccatacctcagctctgcaatgagaacagagtcctcagggaagacaatcgaagacttcaggctcaactgagtcatgtttccagagagcactcccaggaaacagaaagcctgagggaggctctgctgtcctctcgatcccaccttcaagagctggaaaaggagctggagcaccagaaggtggaaaggcagcagcttttggaagacttgagggagaagcagcaagaggtcttgcatttcagggaggaacgtctttccctccaggaaaacgactccagactgcagcacaagctggttctcctgcagcaacagtgtgaagagaaacagcagctctttgagtccctccagtcagagctacaaatctacgaggcactttatggcaattccaagaaggggctgaaagcttacagcctggatgcctgtcaccaaatccctttgagcagtgacctgagccacctggtggcagaggtacgagctctgagagggcagctggagcagagcattcaggggaacaattgtctgcgactgcagctgcaacagcagctggagagcggtgctggcaaagccagcctcagcccctcctccattaaccagaacttcccagccagcactgaccctggaaacaagcagctgctcctccaagattcagctgtgtcccctccagtccgggatgttggtatgaattccccagctctggtcttccccagctctgcttcctctactcctggctcagaaacgcccataatcaacagagcaaatggcttgggtttggatacttctccagtaatgaagacccctcccaagctagagggtgatgctactgatggctcctttgccaataagcatggccgccatgtcattggccacattgatgactacagtgccctaagacagcagattgcggagggcaagctgctggtcaaaaagatagtgtctcttgtgagatcagcgtgcagcttccctggccttgaagcccaaggcacagaggtgctaggcagcaaaggtattcatgagcttcggagcagcaccagtgccctgcaccatgccctagaggagtcagcttccctcctcaccatgttctggagagcggccctgccaagcacccacatccctgtgctgcctggcaaagtgggagaatcaacagaaagggaacttctggaactgagaaccaaagtatccaaacaggagcgactccttcagagcacaactgagcatctgaagaacgccaaccagcagaaggagagcatggaacagttcattgtcagccagctaaccagaacacatgatgttttaaagaaggcaaggactaacttagaggtgaaatccctaagggctctgccatgtactccagccttgtgacccttgccttccaggaaccatgcaagaagcgcagccaccagaagtccttaaaacagcaggaaaggtgggcctgtcccccttttgtgcagctacctatctgctgaggagcatctgggcctcattcctccaagtccacgggagggtccagaagagggagtcagagatgtatcctggtggagctgggagaaaggcagaaagcctttctgacggctatggaatacgattagccaaggtccacttggcccagcactaagaaaaagatgcgtagtttgcacagaaggttttgtgatcctgcctctcaacagccccagcagcttgggaactagcaagagcacatttcttgcctcatcagctgtcctgagatggaaaactcagtgaatataggaccctgattccgatgaaaggggcacgtggtcccaatgctggagctcctctggcaggttctaaaagcacactactgagcagcggtgccctgccggacactgctggcgggggctcagtgagcactactcacagatccacacctgaccctgttgggtcgagtcaggctgggccttggtctgcactgtagcacctgtgttctttgagttcacatcatgaatgtggtgacttcccagataccatctcaggcttaacctagcacatcctatttcttttcttctatgatatccaaattggactgacctcacttcaaagttgctgtcccattttgtcaccctatcttatctcggggaaattgcagactgatggccagaccaactctgttgaaattcttgcatagagcaaacctgtgctcatttttaagtggcatgggagaggccccaagcctagtaaagcctagtctgtgtcttcacagtgctggtagaatgtgtttgtgtgtataaatatatgatatagatttatatatgttgctaacgccatatattgaaggccaacataactggtggacagggtgggtgacagaaaatgaaagtctttttggtgattgttaaagcaagatgtgtataaagaaataaatagtttttctttca

SEQ ID NO: 368001 - DNA, 9657 bp, Homo sapiens
tggcgcgagctgcattcccagacactccagctcttacggaaagaagcactgtcttttgcgctagtgtttgtctaccgtcccctgtcctaaaataatgactgccctctacctgagggaaagggacttcaatggtggtaatctactcgcggctggctgcatccttaaaaaagcccatttctcttctactatcttcaagatcttggttaaccagattcacattgtatgtgccggactctttctcaggtgactgctctgtgcttttttatctaaagaagggcaagtcacccacgggtactaaccctcccccacccacatcaagggagaaacactcctctactcttttctggacattcctgttcagagtcgaggtaagggttgcacggccccgcccctccgttaccaagccttccctcgcctgcctcgcagcctcaggcccttagaacccaggcggggcggggccgggaaaggtgaggctgctggcgggaagcgggggcggcgcgcagcggtacctagcggcgctgccccgctggcagccggaggacgtggcactgtccgagaatgcagggaggggattcgtctttctcctccccgcgaggaggagcctcgacatcctgcagaggcgggaggatccttgagggcactggtgcgactttcaggtgaggtcttagcagatgaaagcggctggctgtggcccgcgccagtagtgctttctgctccgcactcgccgtgagccaggtgtgcaaccggatttggggcgagggtcgcgctggctacctcgcatgcgcagagccggaagcccgctgaccggactacagctcccagaagagccttgtggaggccgcagacgcgaagccgctggcgccatcttgaaatctgatcctccatccccgaggctttgcgtctgcgcggccggccgctgctgctccgggagcccagtctgctaaaaggggaggacgttgaggacgcggcggctggcgggagagacagctggggagagacatggcagggtcggagcgcggcctgcgcctctgtcactcagcatcctcttaggcgtttccacgcccgccccctgcccgaggggcggggctgacggctctggtacccggagtcggcgcgcggggcaggggcgcgcccctgcagagtggggaccccactgggctgtgccatgctgaccggagaccaccgaggcgggagacagagcgcggcgaagagccattgagtggtcacccagtagccgccgccgccgccgcctcgggaagcttgccacccgctaggagggaagatgaaggagatttgcaggatctgtgcccgagagctgtgtggaaaccagcggcgctggatcttccacacggcgtccaagctcaatctccaggttctgctttcgcacgtcttgggcaaggatgtcccccgcgatggcaaagccgagttcgcttgcagcaagtgtgctttcatgcttgatcgaatctatcgattcgacacagttattgcccggattgaagcgctttctattgagcgcttgcaaaagctgctactggagaaggatcgcctcaagttctgcattgccagtatgtatcggaagaataacgatgactctggcgcggagatcaaggcggggaatgggacggttgacatgtccgtcttacccgatgcgagatactctgcactgctccaggaggacttcgcctattcagggtttgagtgctgggtggagaatgaggatcagatccaggagccacacagctgccatggttcagaaggccctggaaaccgacccaggagatgccgtggttgtgccgctttgcgggttgctgattctgactatgaagccatttgtaaggtacctcgaaaggtggccagaagtatctcctgcggcccttctagcaggtggtcgaccagcatttgcactgaagaaccagcgttgtctgaggttgggccacccgacttagcaagcacaaaggtacccccagatggagaaagcatggaggaagagacgcctggttcctctgtggaatctttggatgcaagcgtccaggctagccctccacaacagaaagatgaggagactgagagaagtgcaaaggaacttggaaagtgtgactgttgttcagatgatcaggctccgcagcatgggtgtaatcacaagctggaattagctcttagcatgattaaaggtcttgattataagcccatccagagcccccgagggagcaggcttccgattccagtgaaatccagcctacctggagccaagcctggccctagcatgacagatggagttagttccggtttccttaacaggtctttgaaacccctttacaagacacctgtgagttatcccttggagctttcagacctgcaggagctgtgggatgatctctgtgaagattatttgccgctccgggtccagcccatgactgaagagttgctgaaacaacaaaagctgaattcacatgagaccactataactcagcagtctgtatctgattcccacttggcagaactccaggaaaaaatccagcaaacagaggccaccaacaagattcttcaagagaaacttaatgaaatgagctatgaactaaagtgtgctcaggagtcgtctcaaaagcaagatggtacaattcagaacctcaaggaaactctgaaaagcagggaacgtgagactgaggagttgtaccaggtaattgaaggtcaaaatgacacaatggcaaagcttcgagaaatgctgcaccaaagccagcttggacaacttcacagctcagagggtacttctccagctcagcaacaggtagctctgcttgatcttcagagtgctttattctgcagccaacttgaaatacagaagctccagagggtggtacgacagaaagagcgccaactggctgatgccaaacaatgtgtgcaatttgtagaggctgcagcacacgagagtgaacagcagaaagaggcttcttggaaacataaccaggaattgcgaaaagccttgcagcagctacaagaagaattgcagaataagagccaacagcttcgtgcctgggaggctgaaaaatacaatgagattcgaacccaggaacaaaacatccagcacctaaaccatagtctgagtcacaaggagcagttgcttcaggaatttcgggagctcctacagtatcgagataactcagacaaaacccttgaagcaaatgaaatgttgcttgagaaacttcgccagcgaatacatgataaagctgttgctctggagcgggctatagatgaaaaattctctgctctagaagagaaagaaaaagaactgcgccagcttcgtcttgctgtgagagagcgagatcatgacttagagagactgcgcgatgtcctctcctccaatgaagctactatgcaaagtatggagagtctcctgagggccaaaggcctggaagtggaacagttatctactacctgtcaaaacctccagtggctgaaagaagaaatggaaaccaaatttagccgttggcagaaggaacaagagagtatcattcagcagttacagacgtctcttcatgataggaacaaagaagtggaggatcttagtgcaacactgctctgcaaacttggaccagggcagagtgagatagcagaggagctgtgccagcgtctacagcgaaaggaaaggatgctgcaggaccttctaagtgatcgaaataaacaagtgctggaacatgaaatggagattcaaggcctgcttcagtctgtgagcaccagggagcaggaaagccaagctgctgcagagaagttggtgcaagccttaatggaaagaaattcagaattacaggccctgcgccaatatttaggagggagagactccctgatgtcccaagcacccatctctaaccaacaagctgaagttacccccactggccgtcttggaaaacagactgatcaaggttcaatgcagataccttccagagatgatagcacttcattgactgccaaagaggatgtcagcatacccagatccacattaggagacttggacacagttgcagggctggaaaaagaactgagtaatgccaaagaggaacttgaactcatggctaaaaaagaaagagaaagtcagatggaactttctgctctacagtccatgatggctgtgcaggaagaagagctgcaggtgcaggctgctgatatggagtctctgaccaggaacatacagattaaagaagatctcataaaggacctgcaaatgcaactggttgatcctgaagacataccagctatggaacgcctgacccaggaagtcttacttcttcgggaaaaagttgcttcagtagaatcccagggtcaagaaatttcaggaaaccgaagacaacagttgctgctgatgctagaaggactagtagatgaacggagtcggctcaatgaggccttacaagcagagagacagctctatagcagtctggtgaagttccatgcccatccagagagctctgagagagaccgaactctgcaggtggaactggaaggggctcaggtgttacgcagtcggctagaagaagttcttggaagaagcttggagcgcttaaacaggctggagaccctggccgccattggaggtgcagctgcaggggatgacaccgaagatacaagcactgagttcactgacagtattgaggaggaggctgcacaccatagtcaccagcaacttgtcaaggtggctttggagaaaagtctggcaactgtggagacccagaacccatctttttcccctccttctccgatgggaggggacagtaacaggtgtcttcaggaagaaatgctccacctgagggctgagttccaccagcacttagaagagaagaggaaagctgaggaggaactgaaggagctaaaggctcaaattgaggaagcaggattctcctcagtgtcccacatcaggaacaccatgctgagcctttgccttgagaatgcggagctgaaagagcagatgggagaagcaatgtctgatggatgggagatcgaggaagacaaggagaagggcgaggtgatggttgagactgtggtaaccaaagagggtctgagtgagagtagccttcaggctgagttcagaaagctccagggaaaactgaagaatgcccacaatatcatcaacctcctcaaagaacaacttgtgctgagtagcaaggaagggaatagtaaacttactccagagctccttgtgcatctgaccagcaccattgaaagaataaacacagaactggttggttcccctgggaagcaccaacaccaagaggaggggaatgtgactgtgaggcctttccccagaccccagagccttgaccttggggctaccttcacagtggatgcccaccaattggataaccagtcccagcctcgtgaccctgggcctcagtcagcgtttagcctaccagggtccacccagcacctgcgctcccagctgtcacaatgcaaacaacgctatcaagatctccaggagaagctgctgctatcagaagccactgtctttgctcaggctaacgagctggagaaatacagagttatgcttacaggtgaatccttggtgaagcaggacagcaagcagatccaggtggacctccaggacctgggctatgagacttgtggccgaagcgagaatgaggctgaacgggaggaaaccaccagtcctgagtgtgaggagcacaacagcctcaaggaaatggtcctgatggaggggctgtgctctgagcagggacgccggggctcaacactggctagttcctctgagaggaagcccttggagaaccagctagggaagcaggaagagttccgggtatatggaaagtcagaaaacatcttggtcctacgaaaggacatcaaagatctgaaggcccagctgcagaatgccaacaaggtcattcaaaacctcaagagccgggtccggtccctctcagttacaagtgattattcgtctagtctggaaagaccccggaagctgagagctgttggcaccttggaggggtcttcacctcatagtgtccctgatgaggatgaggggtggctgtctgatggcactggggctttctactctccagggcttcaggccaaaaaggacctggagagtctcatccagagagtatcccagctggaggcccagctcccaaaaaatggactagaagagaagctggctgaggagctgagatcagcctcgtggcctgggaaatatgattccctgattcaggatcaggcccgggaactgtcttacctacggcaaaaaatacgagaagggagaggtatttgttatcttatcacccggcatgcaaaagatacagtaaaatcttttgaggatctcctaaggagcaatgacattgactactacctgggacagagcttccgggagcaactcgcccagggaagccagctgacagagaggctcaccagcaaactcagcaccaaggatcataaaagtgagaaagatcaagctggacttgagccactggccctcaggctcagcagggagctgcaggagaaggagaaagtgattgaagtcctgcaggccaagctggatgctcggtccctcacaccctccagcagccatgccttgtctgactcccaccgctctcccagcagcacctctttcctgtctgatgaactggaagcctgctctgacatggacatagtcagcgagtacacacactatgaagagaagaaagcttctcccagtcactcagattccatccatcattcgagtcattctgctgtgttgtcttctaaaccatcatcaaccagtgcatctcagggggctaaggccgaatccaacagcaaccccatcagcttgccaactccccagaatacccccaaggaggccaaccaggcccattcaggtgccagcactgttcctcctgcttccacagctacattgctgagcaacgacttggaagccgactcttcctactacctcaactctgcccagcctcactctcctccaaggggcaccatagaactgggaagaatcctagagcctgggtacctgggcagcagtggcaagtgggatgtgatgaggcctcagaaagggagtgtatctggggacctatcctcaggctcctctgtgtaccagcttaactccaaacccacaggggctgacctgctggaagagcatcttggtgaaatccggaacctgcgccagcgcctggaggaatccatctgcatcaatgaccgcctacgggagcaactggaacaccggctgacctctactgctcgtggaaggggatccacttctaacttctacagtcagggcctggagtccatacctcagctctgcaatgagaacagagtcctcagggaagacaatcgaagacttcaggctcaactgagtcatgtttccagagagcactcccaggaaacagaaagcctgagggaggctctgctgtcctctcgatcccaccttcaagagctggaaaaggagctggagcaccagaaggtggaaaggcagcagcttttggaagacttgagggagaagcagcaagaggtcttgcatttcagggaggaacgtctttccctccaggaaaacgactccagactgcagcacaagctggttctcctgcagcaacagtgtgaagagaaacagcagctctttgagtccctccagtcagagctacaaatctacgaggcactttatggcaattccaagaaggggctgaaagcttacagcctggatgcctgtcaccaaatccctttgagcagtgacctgagccacctggtggcagaggtacgagctctgagagggcagctggagcagagcattcaggggaacaattgtctgcgactgcagctgcaacagcagctggagagcggtgctggcaaagccagcctcagcccctcctccattaaccagaacttcccagccagcactgaccctggaaacaagcagctgctcctccaagattcagctgtgtcccctccagtccgggatgttggtatgaattccccagctctggtcttccccagctctgcttcctctactcctggctcagaaacgcccataatcaacagagcaaatggcttgggtttggatacttctccagtaatgaagacccctcccaagctagagggtgatgctactgatggctcctttgccaataagcatggccgccatgtcattggccacattgatgactacagtgccctaagacagcagattgcggagggcaagctgctggtcaaaaagatagtgtctcttgtgagatcagcgtgcagcttccctggccttgaagcccaaggcacagaggtgctaggcagcaaaggtattcatgagcttcggagcagcaccagtgccctgcaccatgccctagaggagtcagcttccctcctcaccatgttctggagagcggccctgccaagcacccacatccctgtgctgcctggcaaagtgggagaatcaacagaaagggaacttctggaactgagaaccaaagtatccaaacaggagcgactccttcagagcacaactgagcatctgaagaacgccaaccagcagaaggagagcatggaacagttcattgtcagccagctaaccagaacacatgatgttttaaagaaggcaaggactaacttagaggtgaaatccctaagggctctgccatgtactccagccttgtgacccttgccttccaggaaccatgcaagaagcgcagccaccagaagtccttaaaacagcaggaaaggtgggcctgtcccccttttgtgcagctacctatctgctgaggagcatctgggcctcattcctccaagtccacgggagggtccagaagagggagtcagagatgtatcctggtggagctgggagaaaggcagaaagcctttctgacggctatggaatacgattagccaaggtccacttggcccagcactaagaaaaagatgcgtagtttgcacagaaggttttgtgatcctgcctctcaacagccccagcagcttgggaactagcaagagcacatttcttgcctcatcagctgtcctgagatggaaaactcagtgaatataggaccctgattccgatgaaaggggcacgtggtcccaatgctggagctcctctggcaggttctaaaagcacactactgagcagcggtgccctgccggacactgctggcgggggctcagtgagcactactcacagatccacacctgaccctgttgggtcgagtcaggctgggccttggtctgcactgtagcacctgtgttctttgagttcacatcatgaatgtggtgacttcccagataccatctcaggcttaacctagcacatcctatttcttttcttctatgatatccaaattggactgacctcacttcaaagttgctgtcccattttgtcaccctatcttatctcggggaaattgcagactgatggccagaccaactctgttgaaattcttgcatagagcaaacctgtgctcatttttaagtggcatgggagaggccccaagcctagtaaagcctagtctgtgtcttcacagtgctggtagaatgtgtttgtgtgtataaatatatgatatagatttatatatgttgctaacgccatatattgaaggccaacataactggtggacagggtgggtgacagaaaatgaaagtctttttggtgattgttaaagcaagatgtgtataaagaaataaatagtttttctttca

SEQ ID NO: 368002 - DNA, 6699 bp, Homo sapiens
tagtttttgtatttttagtagagatgggtttcaccatgttggtcaggctggtctcgaactcctgacctcatgatccgcccacctcagcctcccaaagtgctgggattacaggtgtgagctaccacgcctggcctattatgatttttaatgaagtttgtcataaccaagtacttgtcattttctgatgagaacactgaaagtttagggcatgtagtgccaacttttggcagtatttcttcacaggtggtggcgtgttcttccatcaggagtcatgtaatgtttggtgatctctcgtgatgttagcagctgttgctgtttgatgccttatcccttaattcattaagggttgcaaaatggagatatcctaatgctatcattttttcatctgttaggtgaagttttacttacataaaaacttcatctcttcttgcttctgctaatggtaaccattctttttcagtatcataataagcttgttaaacaaatttgatgtgttttatagtgccagctaaagtagaagacatcattaagaacaactatgacatcttcccataaaacttcctttgttactatactgcatggattattggtttgatgctgtagagccctattcatgttctcattttcttttccattactggctgatagtaataggatatgcaaaagcatttgcctcagtgttaaaatgtaaacatggcagacattgtttcctcttttcacagatggaactttctgctctacagtccatgatggctgtgcaggaagaagagctgcaggtgcaggctgctgatatggagtctctgaccaggaacatacagattaaagaagatctcataaaggtctttcaaaactttttaaagaccactggaaatgttcacagctcagaatacctgtagggcctcttcagacaatatttgcacacatcgaatcccttggccagtgattatccatatcccacttgaaagtataggcagaatatttcaagacatttgttcccgtgctactctgctgaataatccttttattactattttcacatccatacttattttttgacttctaggacctgcaaatgcaactggttgatcctgaagacataccagctatggaacgcctgacccaggaagtcttacttcttcgggaaaaagttgcttcagtagaatcccagggtcaagaaatttcaggaaaccgaagacaacagttgctgctgatgctagaaggactagtagatgaacggagtcggctcaatgaggccttacaagcagagagacagctctatagcagtctggtgaagttccatgcccatccagagagctctgagagagaccgaactctgcaggtggaactggaaggggctcaggtgttacgcagtcggctagaagaagttcttggaagaagcttggagcgcttaaacaggctggagaccctggccgccattggaggtgcagctgcaggggatgacaccgaagatacaagcactgagttcactgacagtattgaggaggaggctgcacaccatagtcaccagcaacttgtcaaggtggctttggagaaaagtctggcaactgtggagacccagaacccatctttttcccctccttctccgatgggaggggacagtaacaggtgtcttcaggaagaaatgctccacctgagggctgagttccaccagcacttagaagagaagaggaaagctgaggaggaactgaaggagctaaaggctcaaattgaggaagcaggattctcctcagtgtcccacatcaggaacaccatgctgagcctttgccttgagaatgcggagctgaaagagcagatgggagaagcaatgtctgatggatgggagatcgaggaagacaaggagaagggcgaggtgatggttgagactgtggtaaccaaagagggtctgagtgagagtagccttcaggctgagttcagaaagctccagggaaaactgaagaatgcccacaatatcatcaacctcctcaaagaacaacttgtgctgagtagcaaggaagggaatagtaaacttactccagagctccttgtgcatctgaccagcaccattgaaagaataaacacagaactggttggttcccctgggaagcaccaacaccaagaggaggggaatgtgactgtgaggcctttccccagaccccagagccttgaccttggggctaccttcacagtggatgcccaccaattggataaccagtcccagcctcgtgaccctgggcctcagtcagcgtttagcctaccagggtccacccagcacctgcgctcccagctgtcacaatgcaaacaacgctatcaagatctccaggagaagctgctgctatcagaagccactgtctttgctcaggctaacgagctggagaaatacagagttatgcttacaggtgaatccttggtgaagcaggacagcaagcagatccaggtggacctccaggacctgggctatgagacttgtggccgaagcgagaatgaggctgaacgggaggaaaccaccagtcctgagtgtgaggagcacaacagcctcaaggaaatggtcctgatggaggggctgtgctctgagcagggacgccggggctcaacactggctagttcctctgagaggaagcccttggagaaccagctagggaagcaggaagagttccgggtatatggaaagtcagaaaacatcttggtcctacgaaaggacatcaaagatctgaaggcccagctgcagaatgccaacaaggtcattcaaaacctcaagagccgggtccggtccctctcagttacaagtgattattcgtctagtctggaaagaccccggaagctgagagctgttggcaccttggaggggtcttcacctcatagtgtccctgatgaggatgaggggtggctgtctgatggcactggggctttctactctccagggcttcaggccaaaaaggacctggagagtctcatccagagagtatcccagctggaggcccagctcccaaaaaatggactagaagagaagctggctgaggagctgagatcagcctcgtggcctgggaaatatgattccctgattcaggatcaggcccgggaactgtcttacctacggcaaaaaatacgagaagggagaggtatttgttatcttatcacccggcatgcaaaagatacagtaaaatcttttgaggatctcctaaggagcaatgacattgactactacctgggacagagcttccgggagcaactcgcccagggaagccagctgacagagaggctcaccagcaaactcagcaccaaggatcataaaagtgagaaagatcaagctggacttgagccactggccctcaggctcagcagggagctgcaggagaaggagaaagtgattgaagtcctgcaggccaagctggatgctcggtccctcacaccctccagcagccatgccttgtctgactcccaccgctctcccagcagcacctctttcctgtctgatgaactggaagcctgctctgacatggacatagtcagcgagtacacacactatgaagagaagaaagcttctcccagtcactcagattccatccatcattcgagtcattctgctgtgttgtcttctaaaccatcatcaaccagtgcatctcagggggctaaggccgaatccaacagcaaccccatcagcttgccaactccccagaatacccccaaggaggccaaccaggcccattcaggctttcattttcactccatacccaagctggctagccttcctcaggcaccattgccctcagctccatccagcttcctgcctttcagccccactggccctctcctccttggctgctgtgagacaccagtggtctccttggctgaggctcagcaggagctacagatgctgcagaagcagttgggagaaagtgccagcactgttcctcctgcttccacagctacattgctgagcaacgacttggaagccgactcttcctactacctcaactctgcccagcctcactctcctccaaggggcaccatagaactgggaagaatcctagagcctgggtacctgggcagcagtggcaagtgggatgtgatgaggcctcagaaagggagtgtatctggggacctatcctcaggctcctctgtgtaccagcttaactccaaacccacaggggctgacctgctggaagagcatcttggtgaaatccggaacctgcgccagcgcctggaggaatccatctgcatcaatgaccgcctacgggagcaactggaacaccggctgacctctactgctcgtggaaggggatccacttctaacttctacagtcagggcctggagtccatacctcagctctgcaatgagaacagagtcctcagggaagacaatcgaagacttcaggctcaactgagtcatgtttccagagagcactcccaggaaacagaaagcctgagggaggctctgctgtcctctcgatcccaccttcaagagctggaaaaggagctggagcaccagaaggtggaaaggcagcagcttttggaagacttgagggagaagcagcaagaggtcttgcatttcagggaggaacgtctttccctccaggaaaacgactccagactgcagcacaagctggttctcctgcagcaacagtgtgaagagaaacagcagctctttgagtccctccagtcagagctacaaatctacgaggcactttatggcaattccaagaaggggctgaaagcttacagcctggatgcctgtcaccaaatccctttgagcagtgacctgagccacctggtggcagaggtacgagctctgagagggcagctggagcagagcattcaggggaacaattgtctgcgactgcagctgcaacagcagctggagagcggtgctggcaaagccagcctcagcccctcctccattaaccagaacttcccagccagcactgaccctggaaacaagcagctgctcctccaagattcagctgtgtcccctccagtccgggatgttggtatgaattccccagctctggtcttccccagctctgcttcctctactcctggctcagaaacgcccataatcaacagagcaaatggcttgggtttggatacttctccagtaatgaagacccctcccaagctagagggtgatgctactgatggctcctttgccaataagcatggccgccatgtcattggccacattgatgactacagtgccctaagacagcagattgcggagggcaagctgctggtcaaaaagatagtgtctcttgtgagatcagcgtgcagcttccctggccttgaagcccaaggcacagaggtgctaggcagcaaaggtattcatgagcttcggagcagcaccagtgccctgcaccatgccctagaggagtcagcttccctcctcaccatgttctggagagcggccctgccaagcacccacatccctgtgctgcctggcaaagtgggagaatcaacagaaagggaacttctggaactgagaaccaaagtatccaaacaggagcgactccttcagagcacaactgagcatctgaagaacgccaaccagcagaaggagagcatggaacagttcattgtcagccagctaaccagaacacatgatgttttaaagaaggcaaggactaacttagaggtgaaatccctaagggctctgccatgtactccagccttgtgacccttgccttccaggaaccatgcaagaagcgcagccaccagaagtccttaaaacagcaggaaaggtgggcctgtcccccttttgtgcagctacctatctgctgaggagcatctgggcctcattcctccaagtccacgggagggtccagaagagggagtcagagatgtatcctggtggagctgggagaaaggcagaaagcctttctgacggctatggaatacgattagccaaggtccacttggcccagcactaagaaaaagatgcgtagtttgcacagaaggttttgtgatcctgcctctcaacagccccagcagcttgggaactagcaagagcacatttcttgcctcatcagctgtcctgagatggaaaactcagtgaatataggaccctgattccgatgaaaggggcacgtggtcccaatgctggagctcctctggcaggttctaaaagcacactactgagcagcggtgccctgccggacactgctggcgggggctcagtgagcactactcacagatccacacctgaccctgttgggtcgagtcaggctgggccttggtctgcactgtagcacctgtgttctttgagttcacatcatgaatgtggtgacttcccagataccatctcaggcttaacctagcacatcctatttcttttcttctatgatatccaaattggactgacctcacttcaaagttgctgtcccattttgtcaccctatcttatctcggggaaattgcagactgatggccagaccaactctgttgaaattcttgcatagagcaaacctgtgctcatttttaagtggcatgggagaggccccaagcctagtaaagcctagtctgtgtcttcacagtgctggtagaatgtgtttgtgtgtataaatatatgatatagatttatatatgttgctaacgccatatattgaaggccaacataactggtggacagggtgggtgacagaaaatgaaagtctttttggtgattgttaaagcaagatgtgtataaagaaataaatagtttttctttca

SEQ ID NO: 368003 - DNA, 5312 bp, Homo sapiens
tggcgcgagctgcattcccagacactccagctcttacggaaagaagcactgtcttttgcgctagtgtttgtctaccgtcccctgtcctaaaataatgactgccctctacctgagggaaagggacttcaatggtggtaatctactcgcggctggctgcatccttaaaaaagcccatttctcttctactatcttcaagatcttggttaaccagattcacattgtatgtgccggactctttctcaggtgactgctctgtgcttttttatctaaagaagggcaagtcacccacgggtactaaccctcccccacccacatcaagggagaaacactcctctactcttttctggacattcctgttcagagtcgaggtaagggttgcacggccccgcccctccgttaccaagccttccctcgcctgcctcgcagcctcaggcccttagaacccaggcggggcggggccgggaaaggtgaggctgctggcgggaagcgggggcggcgcgcagcggtacctagcggcgctgccccgctggcagccggaggacgtggcactgtccgagaatgcagggaggggattcgtctttctcctccccgcgaggaggagcctcgacatcctgcagaggcgggaggatccttgagggcactggtgcgactttcaggtgaggtcttagcagatgaaagcggctggctgtggcccgcgccagtagtgctttctgctccgcactcgccgtgagccaggtgtgcaaccggatttggggcgagggtcgcgctggctacctcgcatgcgcagagccggaagcccgctgaccggactacagctcccagaagagccttgtggaggccgcagacgcgaagccgctggcgccatcttgaaatctgatcctccatccccgaggctttgcgtctgcgcggccggccgctgctgctccgggagcccagtctgctaaaaggggaggacgttgaggacgcggcggctggcgggagagacagctggggagagacatggcagggtcggagcgcggcctgcgcctctgtcactcagcatcctcttaggcgtttccacgcccgccccctgcccgaggggcggggctgacggctctggtacccggagtcggcgcgcggggcaggggcgcgcccctgcagagtggggaccccactgggctgtgccatgctgaccggagaccaccgaggcgggagacagagcgcggcgaagagccattgagtggtcacccagtagccgccgccgccgccgcctcgggaagcttgccacccgctaggagggaagatgaaggagatttgcaggatctgtgcccgagagctgtgtggaaaccagcggcgctggatcttccacacggcgtccaagctcaatctccaggttctgctttcgcacgtcttgggcaaggatgtcccccgcgatggcaaagccgagttcgcttgcagcaagtgtgctttcatgcttgatcgaatctatcgattcgacacagttattgcccggattgaagcgctttctattgagcgcttgcaaaagctgctactggagaaggatcgcctcaagttctgcattgccagtatgtatcggaagaataacgatgactctggcgcggagatcaaggcggggaatgggacggttgacatgtccgtcttacccgatgcgagatactctgcactgctccaggaggacttcgcctattcagggtttgagtgctgggtggagaatgaggatcagatccaggagccacacagctgccatggttcagaaggccctggaaaccgacccaggagatgccgtggttgtgccgctttgcgggttgctgattctgactatgaagccatttgtaaggtacctcgaaaggtggccagaagtatctcctgcggcccttctagcaggtggtcgaccagcatttgcactgaagaaccagcgttgtctgaggttgggccacccgacttagcaagcacaaaggtacccccagatggagaaagcatggaggaagagacgcctggttcctctgtggaatctttggatgcaagcgtccaggctagccctccacaacagaaagatgaggagactgagagaagtgcaaaggaacttggaaagtgtgactgttgttcagatgatcaggctccgcagcatgggtgtaatcacaagctggaattagctcttagcatgattaaaggtcttgattataagcccatccagagcccccgagggagcaggcttccgattccagtgaaatccagcctacctggagccaagcctggccctagcatgacagatggagttagttccggtttccttaacaggtctttgaaacccctttacaagacacctgtgagttatcccttggagctttcagacctgcaggagctgtgggatgatctctgtgaagattatttgccgctccgggtccagcccatgactgaagagttgctgaaacaacaaaagctgaattcacatgagaccactataactcagcagtctgtatctgattcccacttggcagaactccaggaaaaaatccagcaaacagaggccaccaacaagattcttcaagagaaacttaatgaaatgagctatgaactaaagtgtgctcaggagtcgtctcaaaagcaagatggtacaattcagaacctcaaggaaactctgaaaagcagggaacgtgagactgaggagttgtaccaggtaattgaaggtcaaaatgacacaatggcaaagcttcgagaaatgctgcaccaaagccagcttggacaacttcacagctcagagggtacttctccagctcagcaacaggtagctctgcttgatcttcagagtgctttattctgcagccaacttgaaatacagaagctccagagggtggtacgacagaaagagcgccaactggctgatgccaaacaatgtgtgcaatttgtagaggctgcagcacacgagagtgaacagcagaaagaggcttcttggaaacataaccaggaattgcgaaaagccttgcagcagctacaagaagaattgcagaataagagccaacagcttcgtgcctgggaggctgaaaaatacaatgagattcgaacccaggaacaaaacatccagcacctaaaccatagtctgagtcacaaggagcagttgcttcaggaatttcgggagctcctacagtatcgagataactcagacaaaacccttgaagcaaatgaaatgttgcttgagaaacttcgccagcgaatacatgataaagctgttgctctggagcgggctatagatgaaaaattctctgctctagaagagaaagaaaaagaactgcgccagcttcgtcttgctgtgagagagcgagatcatgacttagagagactgcgcgatgtcctctcctccaatgaagctactatgcaaagtatggagagtctcctgagggccaaaggcctggaagtggaacagttatctactacctgtcaaaacctccagtggctgaaagaagaaatggaaaccaaatttagccgttggcagaaggaacaagagagtatcattcagcagttacagacgtctcttcatgataggaacaaagaagtggaggatcttagtgcaacactgctctgcaaacttggaccagggcagagtgagatagcagaggagctgtgccagcgtctacagcgaaaggaaaggatgctgcaggaccttctaagtgatcgaaataaacaagtgctggaacatgaaatggagattcaaggcctgcttcagtctgtgagcaccagggagcaggaaagccaagctgctgcagagaagttggtgcaagccttaatggaaagaaattcagaattacaggccctgcgccaatatttaggagggagagactccctgatgtcccaagcacccatctctaaccaacaagctgaagttacccccactggccgtcttggaaaacagactgatcaaggttcaatgcagataccttccagagatgatagcacttcattgactgccaaagaggatgtcagcatacccagatccacattaggagacttggacacagttgcagggctggaaaaagaactgagtaatgccaaagaggaacttgaactcatggctaaaaaagaaagagaaagtcagatggaactttctgctctacagtccatgatggctgtgcaggaagaagagctgcaggtgcaggctgctgatatggagtctctgaccaggaacatacagattaaagaagatctcataaaggacctgcaaatgcaactggttgatcctgaagacataccagctatggaacgcctgacccaggaagtcttacttcttcgggaaaaagttgcttcagtagaatcccagggtcaagaaatttcaggaaaccgaagacaacagttgctgctgatgctagaaggactagtagatgaacggagtcggctcaatgaggccttacaagcagagagacagctctatagcagtctggtgaagttccatgcccatccagagagctctgagagagaccgaactctgcaggtggaactggaaggggctcaggtgttacgcagtcggctagaagaagttcttggaagaagcttggagcgcttaaacaggctggagaccctggccgccattggaggtgcagctgcaggggatgacaccgaagatacaagcactgagttcactgacagtattgaggaggaggctgcacaccatagtcaccagcaacttgtcaaggtggctttggagaaaagtctggcaactgtggagacccagaacccatctttttcccctccttctccgatgggaggggacagtaacaggtgtcttcaggaagaaatgctccacctgagggctgagttccaccagcaacactactgagcagcggtgccctgccggacactgctggcgggggctcagtgagcactactcacagatccacacctgaccctgttgggtcgagtcaggctgggccttggtctgcactgtagcacctgtgttctttgagttcacatcatgaatgtggtgacttcccagataccatctcaggcttaacctagcacatcctatttcttttcttctatgatatccaactctgttgaaattcttgcatagagcaaacctgtgctcatttttaagtggcatgggagaggccccaagcctagtaaagcctagtctgtgtcttcacagtgctggtagaatgtgtttgtgtgtataaatatatgatatagatttatatatgttgctaacgccatatattgaaggccaacataactggtggacagggtgggtgacagaaaatgaaagtctttttggtgattgttaaagcaagatgtgtataaagaaataaatagtttttctttca

SEQ ID NO: 368004 - DNA, 783 bp, Homo sapiens
aatacatgataaagctgttgctctggaggtatgtatcatcatttcgcccactatgctatggattattctatctacataggtattatagaaatttgtgtttgcttaaatttgctgctttgggatttggttttctattctgccatcttgttgaataagagtgatcaggatagtaaatcttacagagctttaggagtcttcctttccttgcagcgggctatagatgaaaaattctctgctctagaagagaaagaaaaagaactgcgccagcttcgtcttgctgtgagagagcgagatcatgacttagagagactgcgcgatgtcctctcctccaatgaagctactatgcaagtaagagcaaaacctatctctgacttggtgttcctctcccacttgtatcctgagcctgaagcatgacccccttccatcattttctgaaaaccagggattttgctttataagggggaagaaaaccaaaaagagcagttactagttccatcattgtcaattagcaagtgagagattttagcgcttctacttttcttttgtaatatgaactttgtgaggagagccagtaaatattgatttctgtttacatagttctgatttatttccaattcttgttcatacataagtatacatacacacacgctcttctctctctctcttacttttactgaagcattaccagggtgcaattattaaattgtgtcttctacattaatattatctacatgtccatgaattgccataattagaacacttgtttatctatatttactgtgg

SEQ ID NO: 368005 - DNA, 650 bp, Homo sapiens
ttgtttgtttcttggcctgctcctccctgccctgcgccatacggaacacacagtaggtgctcactggggagtgaaggaaacgcccaccactgagtggctgctcaggggctgagaaccgaaactttgtttaggttttcttctgtgttttccttgcctcaggtttaaacttttttcttaatctttatcttcacaaaggttgaaaaagatcatctagcaaagccttttttcccagctacatataaggaatttgaaagtcgcataaaatggttaagaaaatgtgccaagattacctcagtaattctggtctgtgttctcaggagaccctggaaataaacaatggtaaggtacaatctcccatggcagaaagagtttccctcagagttagccaaaacaagggccaggcgcagtggcttacacttgtaatcccagcactctgggaggctgaggcagatgtatcacttgaggtcaggggttcaagaccagcctggccaacatgacaaaaccctaatacaaaaattagccgggcatggtggtacatgcctctaattccagttattcaggaggctgagacacaagaattcatttgaacctgggaggcgaaggttgcagtgagctgagattgtaccactgcactccagcatatgcgacag

SEQ ID NO: 368006 - DNA, 408 bp, Homo sapiens
gaaacagagttgttgcttaggttatgttggtggaatacctcccctaatgctggttttaaatagcataaactgtctgggtatggtagttcacacctgtaatcccaacactttgggaggccgaggtgggaggatcacttgagcccagaagtttgaggccagtctgggcaacacggtgagtccctgtctctactaaataaataaataaataaatacataaaattagccagttgtggtggtgtgcacctgtagtcccagctacttggggcgggggggctgatgtgggaggcttgttcgagcctggaggttgagcctgtgatgagctgtgaccatgccactgtactccagcctgaatgacagagcaagaccctgtttcaaaaaataaataaaataaatctcataaacttaata

SEQ ID NO: 368007 - DNA, 454 bp, Homo sapiens
tatttttctgaaaaagattttgtgaaattaatgttagacttctttaaaggtttggtagaattctccagtgagaccatatgggtctagagatttctttttgagattttaagctatcaattaagtttctttaatagttataggactattcaaattacccatttcatatggggtgtgttgtcacagtttatactcttccagagaattggtctgcttcattgaagttgtcaagtctatgtgtgtagagttgtttgtagtagtcctttattatccttttcatgtctgcagggtctgtaatggtatcttcagtttaattcctgatatttgtaatttgtgacttttgtctttttatttatttgtcaacatttccagagatttactgatcttttaaaagggaaagctttttgtttcaccgattttttctattgtttttctttcttcaatttcattaactttc

SEQ ID NO: 368008 - DNA, 368 bp, Homo sapiens
tgcattctccactctccccctctgaagattcagaattaagagaaatttggagatgaagatcacctgagtgtcctcattttactaatgatgaaactaggcctaccaagccccttttacagatgactgtatctcttctaaatcaaaactgagaaaaagaatgatgaatgcagctttgacaaacaatagagagaagaacagggacacatgtggaggcaccatgtcacagtttctctcacagaaagagccacatgcagtgggaggaagatagggaggcggggatgccagccagtgggaaactcttcctttagacataccgtacctccagacatttcgatgacataaatttattcattcatatatttaacaaa

SEQ ID NO: 368009 - DNA, 736 bp, Homo sapiens
  misc_feature (1)..(1): n is a, c, g, or t
  misc_feature (114)..(114): n is a, c, g, or t
ngggggagggtctaatagcaaacctggttagtgaccgtcagtccgctaacgatacggcaagctcgaattagccgggcggattccccggggttgcagaattcggcacgagctagnatcaagcctcccttctgtgtccccttgagggtaccctgggtcccctcatcaggggcagaggcatgaaagagtcggggctggatggccaggggcttctgggcccgacgcctagtgcagcccctggggtcgtggtttgacatttgtctgcctggtgcaaacaaggaatccttgcctttaaggtgacaggccctccacaggcttccagacttgaaggaaaaggtttaagaaagaaaacaaaaccaacagttagtggagtcaaagcccagacactgtaaatagaaccccctccaccaccccccgccgcccagcatcctacctggactgcggtgctacgagggcctgcgggcctttgctgtgtgccaccctccctgtaagtctatttaaaaacatcgacgatacattgaaatgtgtgaacgttttgaaaagctacagcttccagcagccaaaagcaactgttgttttggcaagacggtcctgatgtacaagcttgattgaaattcactgctcacttgatacgttattcagaaacccaaggaatggctgtccccatcctcatgtggctgtgtggagctcagctgtgttgtgtggcagtttattaaactgtcccccagatcgacacgca

SEQ ID NO: 368010 - DNA, 560 bp, Homo sapiens
tgtggaatcttggagaatccgacgtccgggcggttgaaatgaaagaggcaaggctggggcggaaggtcgagagggcgaggcctgtggcacggtggggctgctgctggagcactcatttgagatcgatgacagtgccaacttccggaagcggggctcactgctctggaaccagcaggatggtaccttgtccctgtcacagcggcagctcagcgaggaggagcggggccgactccgggatgtggcagccctgaatggcctgtaccgggtccggatcccaaggcgacccggggccctggatggccctccctgtaagtctatttaaaaacatcgacgatacattgaaatgtgtgaacgttttgaaaagctacagcttccagcagccaaaagcaactgttgttttggcaagacggtcctgatgtacaagcttgattgaaattcactgctcacttgatacgttattcagaaacccaaggaatggctgtccccatcctcatgtggctgtgtggagctcagctgtgttgtgtggcagtttattaaactgtcccccagatcgacacgca

SEQ ID NO: 368011 - DNA, 1953 bp, Homo sapiens
caacacaaaacacaaacaacagaaagtagtcataagatagaggccggggggtttataggggaagaagccgagatggcggcagccagcgctggggcaacccggctgctcctgctcttgctgatggcggtagcagcgcccagtcgagcccggggcagcggctgccgggccgggactggtgcgcgaggggctggggcggaaggtcgagagggcgaggcctgtggcacggtggggctgctgctggagcactcatttgagatcgatgacagtgccaacttccggaagcggggctcactgctctggaaccagcaggatggtaccttgtccctgtcacagcggcagctcagcgaggaggagcggggccgactccgggatgtggcagccctgaatggcctgtaccgggtccggatcccaaggcgacccggggccctggatggcctggaagctggtggctatgtctcctcctttgtccctgcgtgctccctggtggagtcgcacctgtcggaccagctgaccctgcacgtggatgtggccggcaacgtggtgggcgtgtcggtggtgacgcaccccgggggctgccggggccatgaggtggaggacgtggacctggagctgttcaacacctcggtgcagctgcagccgcccaccacagccccaggccctgagacggcggccttcattgagcgcctggagatggaacaggcccagaaggccaagaacccccaggagcagaagtccttcttcgccaaatactggatgtacatcattcccgtcgtcctgttcctcatgatgtcaggagcgccagacaccgggggccagggtgggggtgggggtgggggtggtggtgggggtagtggccggtgagggcccaggctggtcagcgtcccgtcttgcacacccaggggcctccctttctgctggagtcccctgtgtcctcagccatcccaagaagggtttgctggtccctcctttccccccgtcccacgaggccacctgggccagccccttgtcctctgccttctgctggcagaggagcagctggactggggcctttggcacagcagccggtgtctcctgcgcccgcctcccccatggccccatgcagccccaggggcttcccccctgcccatggagtagagcccgagatcctggccactatgccagttctgacctcgcatccccctaccccgagcccatgcagtctgggaacatgccgccttctctccagcctctgtgcctttgttccaggtggtctcaccctcctgtccctggctgggctaggtggtcctgtccaggctcctgcagcgcccccctcactttgacactggactaggatgcagcctcccttctgtgtccccttgagggtaccctgggtcccctcatcaggggcagaggcatgaaagagtcggggctggatggccaggggcttctgggcccgacgcctagtgcagcccctggggtcgtggtttgacatttgtctgcctggtgcaaacaaggaatccttgcctttaaggtgacaggccctccacaggcttccagacttgaaggaaaaggtttaagaaagaaaacaaaaccaacagttagtggagtcaaagcccagacactgtaaatagaaccccctccaccaccccccgccgcccagcatcctacctggactgcggtgctacgagggcctgcgggcctttgctgtgtgccaccctccctgtaagtctatttaaaaacatcgacgatacattgaaatgtgtgaacgttttgaaaagctacagcttccagcagccaaaagcaactgttgttttggcaagacggtcctgatgtacaagcttgattgaaattcactgctcacttgatacgttattcagaaacccaaggaatggctgtccccatcctcatgtggctgtgtggagctcagctgtgttgtgtggcagtttattaaactgtcccccagatcgacacgca

SEQ ID NO: 368012 - DNA, 2201 bp, Homo sapiens
caggccccaggtgcggacgggtgccagtgcgcaggtgccggggcccagcgcaggcgcacgggcgtcaggatgcggcctgttcctcccggcgtgctccgcggctcttggctcacagccgtcccttcgctggtgggaagaagccgagatggcggcagccagcgctggggcaacccggctgctcctgctcttgctgatggcggtagcagcgcccagtcgagcccggggcagcggctgccgggccgggactggtgcgcgaggggctggggcggaaggtcgagagggcgaggcctgtggcacggtggggctgctgctggagcactcatttgagatcgatgacagtgccaacttccggaagcggggctcactgctctggaaccagcaggatggtaccttgtccctgtcacagcggcagctcagcgaggaggagcggggccgactccgggatgtggcagccctgaatggcctgtaccgggtccggatcccaaggcgacccggggccctggatggcctggaagctggtggctatgtctcctcctttgtccctgcgtgctccctggtggagtcgcacctgtcggaccagctgaccctgcacgtggatgtggccggcaacgtggtgggcgtgtcggtggtgacgcaccccgggggctgccggggccatgaggtggaggacgtggacctggagctgttcaacacctcggtgcagctgcagccgcccaccacagccccaggccctgagacggcggccttcattgagcgcctggagatggaacaggcccagaaggccaagaacccccaggagcagaagtccttcttcgccaaatactggatgtacatcattcccgtcgtcctgttcctcatgatgtcaggagcgccagacaccgggggccagggtgggggtgggggtgggggtggtggtgggggtagtggccggtgagggcccaggctggtcagcgtcccgtcttgcacacccaggggcctccctttctgctggagtcccctgtgtcctcagccatcccaagaagggtttgctggtccctcctttccccccgtcccacgaggccacctgggccagccccttgtcctctgccttctgctggcagaggagcagctggactggggcctttggcacagcagccggtgtctcctgcgcccgcctcccccatggccccatgcagccccaggggcttcccccctgcccatggagtagagcccgagatcctggccactatgccagttctgacctcgcatccccctaccccgagcccatgcagtctgggaacatgccgccttctctccagcctctgtgcctttgttccaggtggtctcaccctcctgtccctggctgggctaggtggtcctgtccaggctcctgcagcgcccccctcactttgacactggactaggatgcagcctcccttctgtgtccccttgagggtaccctgggtcccctcatcaggggcagaggcatgaaagagtcggggctggatggccaggggcttctgggcccgacgcctagtgcagcccctggggtcgtggtttgacatttgtctgcctggtgcaaacaaggaatccttgcctttaaggtgacaggccctccacaggcttccagacttgaaggaaaaggtttaagaaagaaaacaaaaccaacagttagtggagtcaaagcccagacactgtaaatagaaccccctccaccaccccccgccgcccagcatcctacctggactgcggtgctacgagggcctgcgggcctttgctgtgtgccaccctccctgtaagtctatttaaaaacatcgacgatacattgaaatgtgtgaacgttttgaaaagctacagcttccagcagccaaaagcaactgttgttttggcaagacggtcctgatgtacaagcttgattgaaattcactgctcacttgatacgttattcagaaacccaaggaatggctgtccccatcctcatgtggctgtgtggagctcagctgtgttgtgtggcagtttattaaactgtcccccagatcgacacgcagctagcctcctgcattgtatggttataaatagcaccctagtgagtgctgtcgtccagtctctcttgggtgtggtttgaatgatctcgggatgcatgactaaaatggaattacgatggcagatcggaaacgcgtttataaacaagtgatggtttgtgagtcgactgtcaagaccag

SEQ ID NO: 368013 - DNA, 2179 bp, Homo sapiens
caggccccaggtgcggacgggtgccagtgcgcaggtgccggggcccagcgcaggcgcacgggcgtcaggatgcggcctgttcctcccggcgtgctccgcggctcttggctcacagccgtcccttcgctggtgggaagaagccgagatggcggcagccagcgctggggcaacccggctgctcctgctcttgctgatggcggtagcagcgcccagtcgagcccggggcagcggctgccgggccgggactggtgcgcgaggggtgagtgctctttagctgtgcatagcgggcgcggtctacggatgtcgcaggtcttgggtctttaggctggggcggaaggtcgagagggcgaggcctgtggcacggtggggctgctgctggagcactcatttgagatcgatgacagtgccaacttccggaagcggggctcactgctctggaaccagcaggatggtaccttgtccctgtcacagcggcagctcagcgaggaggagcggggccgactccgggatgtggcagccctgaatggcctgtaccgggtccggatcccaaggcgacccggggccctggatggcctggaagctggtggctatgtctcctcctttgtccctgcgtgctccctggtggagtcgcacctgtcggaccagctgaccctgcacgtggatgtggccggcaacgtggtgggcgtgtcggtggtgacgcaccccgggggctgccggggccatgaggtggaggacgtggacctggagctgttcaacacctcggtgcagctgcagccgcccaccacagccccaggccctgagacggcggccttcattgagcgcctggagatggaacaggcccagaaggccaagaacccccaggagcagaagtccttcttcgccaaatactggcacatcatcctgggggggggccgtgttgctcacagccctgcgtcctgctgcgccagggcccgcgccaccgccacaggaggcctgatggatgtacatcattcccgtcgtcctgttcctcatgatgtcaggagcgccagacaccgggggccagggtgggggtgggggtgggggtggtggtgggggtagtggccggtgagggcccaggctggtcagcgtcccgtcttgcacacccaggggcctccctttctgctggagtcccctgtgtcctcagccatcccaagaagggtttgctggtccctcctttccccccgtcccacgaggccacctgggccagccccttgtcctctgccttctgctggcagaggagcagctggactggggcctttggcacagcagccggtgtctcctgcgcccgcctcccccatggccccatgcagccccaggggcttcccccctgcccatggagtagagcccgagatcctggccactatgccagttctgacctcgcatccccctaccccgagcccatgcagtctgggaacatgccgccttctctccagcctctgtgcctttgttccaggtggtctcaccctcctgtccctggctgggctaggtggtcctgtccaggctcctgcagcgcccccctcactttgacactggactaggatgcagcctcccttctgtgtccccttgagggtaccctgggtcccctcatcaggggcagaggcatgaaagagtcggggctggatggccaggggcttctgggcccgacgcctagtgcagcccctggggtcgtggtttgacatttgtctgcctggtgcaaacaaggaatccttgcctttaaggtgacaggccctccacaggcttccagacttgaaggaaaaggtttaagaaagaaaacaaaaccaacagttagtggagtcaaagcccagacactgtaaatagaaccccctccaccaccccccgccgcccagcatcctacctggactgcggtgctacgagggcctgcgggcctttgctgtgtgccaccctccctgtaagtctatttaaaaacatcgacgatacattgaaatgtgtgaacgttttgaaaagctacagcttccagcagccaaaagcaactgttgttttggcaagacggtcctgatgtacaagcttgattgaaattcactgctcacttgatacgttattcagaaacccaaggaatggctgtccccatcctcatgtggctgtgtggagctcagctgtgttgtgtggcagtttattaaactgtcccccagatcgacacgca

SEQ ID NO: 368014 - DNA, 2091 bp, Homo sapiens
caggccccaggtgcggacgggtgccagtgcgcaggtgccggggcccagcgcaggcgcacgggcgtcaggatgcggcctgttcctcccggcgtgctccgcggctcttggctcacagccgtcccttcgctggtgggaagaagccgagatggcggcagccagcgctggggcaacccggctgctcctgctcttgctgatggcggtagcagcgcccagtcgagcccggggcagcggctgccgggccgggactggtgcgcgaggggtgagtgctctttagctgtgcatagcgggcgcggtctacggatgtcgcaggtcttgggtctttaggctggggcggaaggtcgagagggcgaggcctgtggcacggtggggctgctgctggagcactcatttgagatcgatgacagtgccaacttccggaagcggggctcactgctctggaaccagcaggatggtaccttgtccctgtcacagcggcagctcagcgaggaggagcggggccgactccgggatgtggcagccctgaatggcctgtaccgggtccggatcccaaggcgacccggggccctggatggcctggaagctggtggctatgtctcctcctttgtccctgcgtgctccctggtggagtcgcacctgtcggaccagctgaccctgcacgtggatgtggccggcaacgtggtgggcgtgtcggtggtgacgcaccccgggggctgccggggccatgaggtggaggacgtggacctggagctgttcaacacctcggtgcagctgcagccgcccaccacagccccaggccctgagacggcggccttcattgagcgcctggagatggaacaggcccagaaggccaagaacccccaggagcagaagtccttcttcgccaaatactggatgtacatcattcccgtcgtcctgttcctcatgatgtcaggagcgccagacaccgggggccagggtgggggtgggggtgggggtggtggtgggggtagtggccggtgagggcccaggctggtcagcgtcccgtcttgcacacccaggggcctccctttctgctggagtcccctgtgtcctcagccatcccaagaagggtttgctggtccctcctttccccccgtcccacgaggccacctgggccagccccttgtcctctgccttctgctggcagaggagcagctggactggggcctttggcacagcagccggtgtctcctgcgcccgcctcccccatggccccatgcagccccaggggcttcccccctgcccatggagtagagcccgagatcctggccactatgccagttctgacctcgcatccccctaccccgagcccatgcagtctgggaacatgccgccttctctccagcctctgtgcctttgttccaggtggtctcaccctcctgtccctggctgggctaggtggtcctgtccaggctcctgcagcgcccccctcactttgacactggactaggatgcagcctcccttctgtgtccccttgagggtaccctgggtcccctcatcaggggcagaggcatgaaagagtcggggctggatggccaggggcttctgggcccgacgcctagtgcagcccctggggtcgtggtttgacatttgtctgcctggtgcaaacaaggaatccttgcctttaaggtgacaggccctccacaggcttccagacttgaaggaaaaggtttaagaaagaaaacaaaaccaacagttagtggagtcaaagcccagacactgtaaatagaaccccctccaccaccccccgccgcccagcatcctacctggactgcggtgctacgagggcctgcgggcctttgctgtgtgccaccctccctgtaagtctatttaaaaacatcgacgatacattgaaatgtgtgaacgttttgaaaagctacagcttccagcagccaaaagcaactgttgttttggcaagacggtcctgatgtacaagcttgattgaaattcactgctcacttgatacgttattcagaaacccaaggaatggctgtccccatcctcatgtggctgtgtggagctcagctgtgttgtgtggcagtttattaaactgtcccccagatcgacacgca

SEQ ID NO: 368015 - DNA, 1661 bp, Homo sapiens
ccgcggttttaatttcattacgggctgggcgttttcattgttacattacgtgcggtggtcctacaatctacatccgggatgtggcagccctgaatggcctgtaccgggtccggatcccaaggcgacccggggccctggatggcctggaagctggtggctatgtctcctcctttgtccctgcgtgctccctggtggagtcgcacctgtcggaccagctgaccctgcacgtggatgtggccggcaacgtggtgggcgtgtcggtggtgacgcaccccgggggctgccggggccatgaggtggaggacgtggacctggagctgttcaacacctcggtgcagctgcagccgcccaccacagccccaggccctgagacggcggccttcattgagcgcctggagatggaacaggcccagaaggccaagaacccccaggagcagaagtccttcttcgccaaatactggatgtacatcattcccgtcgtcctgttcctcatgatgtcaggagcgccagacaccgggggccagggtgggggtgggggtgggggtggtggtgggggtagtggccggtgagggcccaggctggtcagcgtcccgtcttgcacacccaggggcctccctttctgctggagtcccctgtgtcctcagccatcccaagaagggtttgctggtccctcctttccccccgtcccacgaggccacctgggccagccccttgtcctctgccttctgctggcagaggagcagctggactggggcctttggcacagcagccggtgtctcctgcgcccgcctcccccatggccccatgcagccccaggggcttcccccctgcccatggagtagagcccgagatcctggccactatgccagttctgacctcgcatccccctaccccgagcccatgcagtctgggaacatgccgccttctctccagcctctgtgcctttgttccaggtggtctcaccctcctgtccctggctgggctaggtggtcctgtccaggctcctgcagcgcccccctcactttgacactggactaggatgcagcctcccttctgtgtccccttgagggtaccctgggtcccctcatcaggggcagaggcatgaaagagtcggggctggatggccaggggcttctgggcccgacgcctagtgcagcccctggggtcgtggtttgacatttgtctgcctggtgcaaacaaggaatccttgcctttaaggtgacaggccctccacaggcttccagacttgaaggaaaaggtttaagaaagaaaacaaaaccaacagttagtggagtcaaagcccagacactgtaaatagaaccccctccaccaccccccgccgcccagcatcctacctggactgcggtgctacgagggcctgcgggcctttgctgtgtgccaccctccctgtaagtctatttaaaaacatcgacgatacattgaaatgtgtgaacgttttgaaaagctacagcttccagcagccaaaagcaactgttgttttggcaagacggtcctgatgtacaagcttgattgaaattcactgctcacttgatacgttattcagaaacccaaggaatggctgtccccatcctcatgtggctgtgtggagctcagctgtgttgtgtggcagtttattaaactgtcccccagatcgacacgca

SEQ ID NO: 368016 - DNA, 2024 bp, Homo sapiens
caggccccaggtgcggacgggtgccagtgcgcaggtgccggggcccagcgcaggcgcacgggcgtcaggatgcggcctgttcctcccggcgtgctccgcggctcttggctcacagccgtcccttcgctggtgggaagaagccgagatggcggcagccagcgctggggcaacccggctgctcctgctcttgctgatggcggtagcagcgcccagtcgagcccggggcagcggctgccgggccgggactggtgcgcgaggggctggggcggaaggtcgagagggcgaggcctgtggcacggtggggctgctgctggagcactcatttgagatcgatgacagtgccaacttccggaagcggggctcactgctctggaaccagcaggatggtaccttgtccctgtcacagcggcagctcagcgaggaggagcggggccgactccgggatgtggcagccctgaatggcctgtaccgggtccggatcccaaggcgacccggggccctggatggcctggaagctggtggctatgtctcctcctttgtccctgcgtgctccctggtggagtcgcacctgtcggaccagctgaccctgcacgtggatgtggccggcaacgtggtgggcgtgtcggtggtgacgcaccccgggggctgccggggccatgaggtggaggacgtggacctggagctgttcaacacctcggtgcagctgcagccgcccaccacagccccaggccctgagacggcggccttcattgagcgcctggagatggaacaggcccagaaggccaagaacccccaggagcagaagtccttcttcgccaaatactggatgtacatcattcccgtcgtcctgttcctcatgatgtcaggagcgccagacaccgggggccagggtgggggtgggggtgggggtggtggtgggggtagtggccggtgagggcccaggctggtcagcgtcccgtcttgcacacccaggggcctccctttctgctggagtcccctgtgtcctcagccatcccaagaagggtttgctggtccctcctttccccccgtcccacgaggccacctgggccagccccttgtcctctgccttctgctggcagaggagcagctggactggggcctttggcacagcagccggtgtctcctgcgcccgcctcccccatggccccatgcagccccaggggcttcccccctgcccatggagtagagcccgagatcctggccactatgccagttctgacctcgcatccccctaccccgagcccatgcagtctgggaacatgccgccttctctccagcctctgtgcctttgttccaggtggtctcaccctcctgtccctggctgggctaggtggtcctgtccaggctcctgcagcgcccccctcactttgacactggactaggatgcagcctcccttctgtgtccccttgagggtaccctgggtcccctcatcaggggcagaggcatgaaagagtcggggctggatggccaggggcttctgggcccgacgcctagtgcagcccctggggtcgtggtttgacatttgtctgcctggtgcaaacaaggaatccttgcctttaaggtgacaggccctccacaggcttccagacttgaaggaaaaggtttaagaaagaaaacaaaaccaacagttagtggagtcaaagcccagacactgtaaatagaaccccctccaccaccccccgccgcccagcatcctacctggactgcggtgctacgagggcctgcgggcctttgctgtgtgccaccctccctgtaagtctatttaaaaacatcgacgatacattgaaatgtgtgaacgttttgaaaagctacagcttccagcagccaaaagcaactgttgttttggcaagacggtcctgatgtacaagcttgattgaaattcactgctcacttgatacgttattcagaaacccaaggaatggctgtccccatcctcatgtggctgtgtggagctcagctgtggttttttcttttgatttttcttttgggcagaggcgggggc

SEQ ID NO: 368017 - DNA, 1208 bp, Homo sapiens
caggccccaggtgcggacgggtgccagtgcgcaggtgccggggcccagcgcaggcgcacgggcgtcaggatgcggcctgttcctcccggcgtgctccgcggctcttggctcacagccgtcccttcgctggtgggaagaagccgagatggcggcagccagcgctggggcaacccggctgctcctgctcttgctgatggcgatgacagtgccaacttccggaagcggggctcactgctctggaaccagcaggatggtaccttgtcctctgccttctgctggcagaggagcagctggactggggcctttggcacagcagccggtgtctcctgcgcccgcctcccccatggccccatgcagccccaggggcttcccccctgcccatggagtagagcccgagatcctggccactatgccagttctgacctcgcatccccctaccccgagcccatgcagtctgggaacatgccgccttctctccagcctctgtgcctttgttccaggtggtctcaccctcctgtccctggctgggctaggtggtcctgtccaggctcctgcagcgcccccctcactttgacactggactaggatgcagcctcccttctgtgtccccttgagggtaccctgggtcccctcatcaggggcagaggcatgaaagagtcggggctggatggccaggggcttctgggcccgacgcctagtgcagcccctggggtcgtggtttgacatttgtctgcctggtgcaaacaaggaatccttgcctttaaggtgacaggccctccacaggcttccagacttgaaggaaaaggtttaagaaagaaaacaaaaccaacagttagtggagtcaaagcccagacactgtaaatagaaccccctccaccaccccccgccgcccagcatcctacctggactgcggtgctacgagggcctgcgggcctttgctgtgtgccaccctccctgtaagtctatttaaaaacatcgacgatacattgaaatgtgtgaacgttttgaaaagctacagcttccagcagccaaaagcaactgttgttttggcaagacggtcctgatgtacaagcttgattgaaattcactgctcacttgatacgttattcagaaacccaaggaatggctgtccccatcctcatgtggctgtgtggagctcagctgtgttgtgtggcagtttattaaactgtcccccagatcgacacgca

SEQ ID NO: 368018 - DNA, 1049 bp, Homo sapiens
caacacaaaacacaaacaacagaaagtagtcataagatagaggccggggggtttataggggaagaagccgagatggcggcagccagcgctggggcaacccggctgctcctgctcttgctgatggcggtagcagcgcccagtcgagcccggggcagcggctgccgggccgggactggtgcgcgaggggtgagtgctctttagctgtgcatagcgggcgcggtctacggatgtcgcaggtcttgggtctttaggctggggcggaaggtcgagagggcgaggcctgtggcacggtggggctgctgctggagcactcatttgagatcgctgtgcctttgttccaggtggtctcaccctcctgtccctggctgggctaggtggtcctgtccaggctcctgcagcgcccccctcactttgacactggactaggatgcagcctcccttctgtgtccccttgagggtaccctgggtcccctcatcaggggcagaggcatgaaagagtcggggctggatggccaggggcttctgggcccgacgcctagtgcagcccctggggtcgtggtttgacatttgtctgcctggtgcaaacaaggaatccttgcctttaaggtgacaggccctccacaggcttccagacttgaaggaaaaggtttaagaaagaaaacaaaaccaacagttagtggagtcaaagcccagacactgtaaatagaaccccctccaccaccccccgccgcccagcatcctacctggactgcggtgctacgagggcctgcgggcctttgctgtgtgccaccctccctgtaagtctatttaaaaacatcgacgatacattgaaatgtgtgaacgttttgaaaagctacagcttccagcagccaaaagcaactgttgttttggcaagacggtcctgatgtacaagcttgattgaaattcactgctcacttgatacgttattcagaaacccaaggaatggctgtccccatcctcatgtggctgtgtggagctcagctgtgttgtgtggcagtttattaaactgtcccccagatcgacacgca

SEQ ID NO: 368019 - DNA, 1042 bp, Homo sapiens
caacacaaaacacaaacaacagaaagtagtcataagatagaggccggggggtttataggggaagaagccgagatggcggcagccagcgctggggcaacccggctgctcctgctcttgctgatggcggtagcagcgcccagtcgagcccggggcagcggctgccgggccgggactggtgcgcgaggggctggggcggaaggtcgagagggcgaggcctgtggcacggtggggctgctgctggagcactcatttgagatcgatgacagtgccaacttccggaagcggggctcactgctctggaaccagcaggatggtaccttgtccctgtcacagcggcagctcagcgaggaggagcggggccgactccgggatgtggcagccctgaatggcctgtaccgggtccggatcccaaggcgacccggggccctggatggcctggaagctggtggctatgtctcctcctttgtccctgcgtgctccctggtggagtcgcacctgtcggaccagctgaccctgcacgtggatgtggccggcaacgtggtgggcgtgtcggtggtgacgcaccccgggggctgccggggccatgaggtggaggacgtggacctggagctgttcaacacctcggtgcagctgcagccgcccaccacagccccaggccctgagacggcggccttcattgagcgcctggagatggaacaggcccagaaggccaagaacccccaggagcagaagtccttcttcgccaaatactacgagggcctgcgggcctttgctgtgtgccaccctccctgtaagtctatttaaaaacatcgacgatacattgaaatgtgtgaacgttttgaaaagctacagcttccagcagccaaaagcaactgttgttttggcaagacggtcctgatgtacaagcttgattgaaattcactgctcacttgatacgttattcagaaacccaaggaatggctgtccccatcctcatgtggctgtgtggagctcagctgtgttgtgtggcagtttattaaactgtcccccagatcgacacgca

SEQ ID NO: 368020 - DNA, 812 bp, Homo sapiens
caacacaaaacacaaacaacagaaagtagtcataagatagaggccggggggtttataggggaagaagccgagatggcggcagccagcgctggggcaacccggctgctcctgctcttgctgatggcggtagcagcgcccagtcgagcccggggcagcggctgccgggccgggactggtgcgcgaggggctggggcggaaggtcgagagggcgaggcctgtggcacggtggggctgctgctggagcactcatttgagatcgatgacagtgccaacttccggaagcggggctcactgctctggaaccagcaggatggtaccttgtccctgtcacagcggcagctcagcgaggaggagcggggccgactccgggatgtggcagccctgaatggcctgtaccgggtccggatcccaaggcgacccggggccctggatggcctggaagctggtggctatgtctcctcctttgtccctgcgtgctccctggtggagtcgcacctgtcggaccagctgaccctgcacgtacgagggcctgcgggcctttgctgtgtgccaccctccctgtaagtctatttaaaaacatcgacgatacattgaaatgtgtgaacgttttgaaaagctacagcttccagcagccaaaagcaactgttgttttggcaagacggtcctgatgtacaagcttgattgaaattcactgctcacttgatacgttattcagaaacccaaggaatggctgtccccatcctcatgtggctgtgtggagctcagctgtgttgtgtggcagtttattaaactgtcccccagatcgacacgca

SEQ ID NO: 368021 - DNA, 766 bp, Homo sapiens
caacacaaaacacaaacaacagaaagtagtcataagatagaggccggggggtttataggggaagaagccgagatggcggcagccagcgctggggcaacccggctgctcctgctcttgctgatggcggtagcagcgcccagtcgagcccggggcagcggctgccgggccgggactggtgcgcgaggggctggggcggaaggtcgagagggcgaggcctgtggcacggtggggctgctgctggagcactcatttgagatcgatgacagtgccaacttccggaagcggggctcactgctctggaaccagcaggatggtaccttgtccctgtcacagcggcagctcagcgaggaggagcggggccgactccgggatgtggcagccctgaatggcctgtaccgggtccggatcccaaggcgacccggggccctggatggcctggaagctggtggctatgtctcctcctttgtccctgcgtacgagggcctgcgggcctttgctgtgtgccaccctccctgtaagtctatttaaaaacatcgacgatacattgaaatgtgtgaacgttttgaaaagctacagcttccagcagccaaaagcaactgttgttttggcaagacggtcctgatgtacaagcttgattgaaattcactgctcacttgatacgttattcagaaacccaaggaatggctgtccccatcctcatgtggctgtgtggagctcagctgtgttgtgtggcagtttattaaactgtcccccagatcgacacgca

SEQ ID NO: 368022 - DNA, 2026 bp, Homo sapiens
caggccccaggtgcggacgggtgccagtgcgcaggtgccggggcccagcgcaggcgcacgggcgtcaggatgcggcctgttcctcccggcgtgctccgcggctcttggctcacagccgtcccttcgctggtgggaagaagccgagatggcggcagccagcgctggggcaacccggctgctcctgctcttgctgatggcggtagcagcgcccagtcgagcccggggcagcggctgccgggccgggactggtgcgcgaggggctggggcggaaggtcgagagggcgaggcctgtggcacggtggggctgctgctggagcactcatttgagatcgatgacagtgccaacttccggaagcggggctcactgctctggaaccagcaggatggtaccttgtccctgtcacagcggcagctcagcgaggaggagcggggccgactccgggatgtggcagccctgaatggcctgtaccgggtccggatcccaaggcgacccggggccctggatggcctggaagctggtggctatgtctcctcctttgtccctgcgtgctccctggtggagtcgcacctgtcggaccagctgaccctgcacgtggatgtggccggcaacgtggtgggcgtgtcggtggtgacgcaccccgggggctgccggggccatgaggtggaggacgtggacctggagctgttcaacacctcggtgcagctgcagccgcccaccacagccccaggccctgagacggcggccttcattgagcgcctggagatggaacaggcccagaaggccaagaacccccaggagcagaagtccttcttcgccaaatactggatgtacatcattcccgtcgtcctgttcctcatgatgtcaggagcgccagacaccgggggccagggtgggggtgggggtgggggtggtggtgggggtagtggccggtgagggcccaggctggtcagcgtcccgtcttgcacacccaggggcctccctttctgctggagtcccctgtgtcctcagccatcccaagaagggtttgctggtccctcctttccccccgtcccacgaggccacctgggccagccccttgtcctctgccttctgctggcagaggagcagctggactggggcctttggcacagcagccggtgtctcctgcgcccgcctcccccatggccccatgcagccccaggggcttcccccctgcccatggagtagagcccgagatcctggccactatgccagttctgacctcgcatccccctaccccgagcccatgcagtctgggaacatgccgccttctctccagcctctgtgcctttgttccaggtggtctcaccctcctgtccctggctgggctaggtggtcctgtccaggctcctgcagcgcccccctcactttgacactggactaggatgcagcctcccttctgtgtccccttgagggtaccctgggtcccctcatcaggggcagaggcatgaaagagtcggggctggatggccaggggcttctgggcccgacgcctagtgcagcccctggggtcgtggtttgacatttgtctgcctggtgcaaacaaggaatccttgcctttaaggtgacaggccctccacaggcttccagacttgaaggaaaaggtttaagaaagaaaacaaaaccaacagttagtggagtcaaagcccagacactgtaaatagaaccccctccaccaccccccgccgcccagcatcctacctggactgcggtgctacgagggcctgcgggcctttgctgtgtgccaccctccctgtaagtctatttaaaaacatcgacgatacattgaaatgtgtgaacgttttgaaaagctacagcttccagcagccaaaagcaactgttgttttggcaagacggtcctgatgtacaagcttgattgaaattcactgctcacttgatacgttattcagaaacccaaggaatggctgtccccatcctcatgtggctgtgtggagctcagctgtgttgtgtggcagtttattaaactgtcccccagatcgacacgca

SEQ ID NO: 368023 - DNA, 2041 bp, Homo sapiens
caacacaaaacacaaacaacagaaagtagtcataagatagaggccggggggtttataggggaagaagccgagatggcggcagccagcgctggggcaacccggctgctcctgctcttgctgatggcggtagcagcgcccagtcgagcccggggcagcggctgccgggccgggactggtgcgcgaggggctggggcggaaggtcgagagggcgaggcctgtggcacggtggggctgctgctggagcactcatttgagatcgatgacagtgccaacttccggaagcggggctcactgctctggaaccagcaggatggtaccttgtccctgtcacagcggcagctcagcgaggaggagcggggccgactccgggatgtggcagccctgaatggcctgtaccgggtccggatcccaaggcgacccggggccctggatggcctggaagctggtggctatgtctcctcctttgtccctgcgtgctccctggtggagtcgcacctgtcggaccagctgaccctgcacgtggatgtggccggcaacgtggtgggcgtgtcggtggtgacgcaccccgggggctgccggggccatgaggtggaggacgtggacctggagctgttcaacacctcggtgcagctgcagccgcccaccacagccccaggccctgagacggcggccttcattgagcgcctggagatggaacaggcccagaaggccaagaacccccaggagcagaagtccttcttcgccaaatactggcacatcatcctgggggggggccgtgttgctcacagccctgcgtcctgctgcgccagggcccgcgccaccgccacaggaggcctgatggatgtacatcattcccgtcgtcctgttcctcatgatgtcaggagcgccagacaccgggggccagggtgggggtgggggtgggggtggtggtgggggtagtggccggtgagggcccaggctggtcagcgtcccgtcttgcacacccaggggcctccctttctgctggagtcccctgtgtcctcagccatcccaagaagggtttgctggtccctcctttccccccgtcccacgaggccacctgggccagccccttgtcctctgccttctgctggcagaggagcagctggactggggcctttggcacagcagccggtgtctcctgcgcccgcctcccccatggccccatgcagccccaggggcttcccccctgcccatggagtagagcccgagatcctggccactatgccagttctgacctcgcatccccctaccccgagcccatgcagtctgggaacatgccgccttctctccagcctctgtgcctttgttccaggtggtctcaccctcctgtccctggctgggctaggtggtcctgtccaggctcctgcagcgcccccctcactttgacactggactaggatgcagcctcccttctgtgtccccttgagggtaccctgggtcccctcatcaggggcagaggcatgaaagagtcggggctggatggccaggggcttctgggcccgacgcctagtgcagcccctggggtcgtggtttgacatttgtctgcctggtgcaaacaaggaatccttgcctttaaggtgacaggccctccacaggcttccagacttgaaggaaaaggtttaagaaagaaaacaaaaccaacagttagtggagtcaaagcccagacactgtaaatagaaccccctccaccaccccccgccgcccagcatcctacctggactgcggtgctacgagggcctgcgggcctttgctgtgtgccaccctccctgtaagtctatttaaaaacatcgacgatacattgaaatgtgtgaacgttttgaaaagctacagcttccagcagccaaaagcaactgttgttttggcaagacggtcctgatgtacaagcttgattgaaattcactgctcacttgatacgttattcagaaacccaaggaatggctgtccccatcctcatgtggctgtgtggagctcagctgtgttgtgtggcagtttattaaactgtcccccagatcgacacgca

SEQ ID NO: 368024 - DNA, 1994 bp, Homo sapiens
caggccccaggtgcggacgggtgccagtgcgcaggtgccggggcccagcgcaggcgcacgggcgtcaggatgcggcctgttcctcccggcgtgctccgcggctcttggctcacagccgtcccttcgctggtgggaagaagccgagatggcggcagccagcgctggggcaacccggctgctcctgctcttgctgatggcggtagcagcgcccagtcgagcccggggcagcggctgccgggccgggactggtgcgcgaggggctggggcggaaggtcgagagggcgaggcctgtggcacggtggggctgctgctggagcactcatttgagatcgatgacagtgccaacttccggaagcggggctcactgctctggaaccagcaggatggtaccttgtccctgtcacagcggcagctcagcgaggaggagcggggccgactccgggatgtggcagccctgaatggcctgtaccgggtccggatcccaaggcgacccggggccctggatggcctggaagctggtggctatgtctcctcctttgtccctgcgtgctccctggtggagtcgcacctgtcggaccagctgaccctgcacgtggatgtggccggcaacgtggtgggcgtgtcggtggtgacgcaccccgggggctgccggggccatgaggtggaggacgtggacctggagctgttcaacacctcggtgcagctgcagccgcccaccacagccccaggccctgagacggcggccttcattgagcgcctggagatggaacaggcccagaaggccaagaacccccaggagcagaagtccttcttcgccaaatactggatgtacatcattcccgtcgtcctgttcctcatgatgtcaggagcgccagacaccgggggccagggtgggggtgggggtgggggtggtggtgggggtagtggccggtgagggcccaggctggtcagcgtcccgtcttgcacacccaggggcctccctttctgctggagtcccctgtgtcctcagccatcccaagaagggtttgctggtccctcctttccccccgtcccacgaggccacctgggccagccccttgtcctctgccttctgctggcagaggagcagctggactggggcctttggcacagcagccggtgtctcctgcgcccgcctcccccatggccccatgcagccccaggggcttcccccctgcccatggagtagagcccgagatcctggccactatgccagttctgacctcgcatccccctaccccgagcccatgcagtctgggaacatgccgccttctctccagcctctgtgcctttgttccaggtggtctcaccctcctgtccctggctgggctaggtggtcctgtccaggctcctgcagcgcccccctcactttgacactggactaggatgcagcctcccctcatcaggggcagaggcatgaaagagtcggggctggatggccaggggcttctgggcccgacgcctagtgcagcccctggggtcgtggtttgacatttgtctgcctggtgcaaacaaggaatccttgcctttaaggtgacaggccctccacaggcttccagacttgaaggaaaaggtttaagaaagaaaacaaaaccaacagttagtggagtcaaagcccagacactgtaaatagaaccccctccaccaccccccgccgcccagcatcctacctggactgcggtgctacgagggcctgcgggcctttgctgtgtgccaccctccctgtaagtctatttaaaaacatcgacgatacattgaaatgtgtgaacgttttgaaaagctacagcttccagcagccaaaagcaactgttgttttggcaagacggtcctgatgtacaagcttgattgaaattcactgctcacttgatacgttattcagaaacccaaggaatggctgtccccatcctcatgtggctgtgtggagctcagctgtgttgtgtggcagtttattaaactgtcccccagatcgacacgca

SEQ ID NO: 368025 - DNA, 2695 bp, Homo sapiens
caggccccaggtgcggacgggtgccagtgcgcaggtgccggggcccagcgcaggcgcacgggcgtcaggatgcggcctgttcctcccggcgtgctccgcggctcttggctcacagccgtcccttcgctggtgggaagaagccgagatggcggcagccagcgctggggcaacccggctgctcctgctcttgctgatggcggtagcagcgcccagtcgagcccggggcagcggctgccgggccgggactggtgcgcgaggggctggggcggaaggtcgagagggcgaggcctgtggcacggtggggctgctgctggagcactcatttgagatcgatgacagtgccaacttccggaagcggggctcactgctctggaaccagcaggatggtaccttgtccctgtcacagcggcagctcagcgaggaggagcggggccgactccgggatgtggcagccctgaatggcctgtaccgggtccggatcccaaggcgacccggggccctggatggcctggaagctggtggctatgtctcctcctttgtccctgcgtgctccctggtggagtcgcacctgtcggaccagctgaccctgcacgtggatgtggccggcaacgtggtgggcgtgtcggtggtgacgcaccccgggggctgccggggccatgaggtggaggacgtggacctggagctgttcaacacctcggtgcagctgcagccgcccaccacagccccaggccctgagacggcggccttcattgagcgcctggagatggaacaggcccagaaggccaagaacccccaggagcagaagtccttcttcgccaaatactggatgtacatcattcccgtcgtcctgttcctcatgatgtcaggagcgccagacaccgggggccagggtgggggtgggggtgggggtggtggtgggggtagtggccggtgagggcccaggctggtcagcgtcccgtcttgcacacccaggggcctccctttctgctggagtcccctgtgtcctcagccatcccaagaagggtttgctggtccctcctttccccccgtcccacgaggccacctgggccagccccttgtcctctgccttctgctggcagaggagcagctggactggggcctttggcacagcagccggtgtctcctgcgcccgcctcccccatggccccatgcagccccaggggcttcccccctgcccatggagtagagcccgagatcctggccactatgccagttctgacctcgcatccccctaccccgagcccatgcagtctgggaacatgccgccttctctccagcctctgtgcctttgttccaggtggtctcaccctcctgtccctggctgggctaggtggtcctgtccaggctcctgcagcgcccccctcactttgacactggactaggatgcagcctcccttctgtgtccccttgagggtaccctgggtcccctcatcaggggcagaggcatgaaagagtcggggctggatggccaggggcttctgggcccgacgcctagtgcagcccctggggtcgtggtttgacatttgtctgcctggtgcaaacaaggaatccttgcctttaaggtgacaggccctccacaggcttccagacttgaaggaaaaggtttaagaaagaaaacaaaaccaacagttagtggagtcaaagcccagacactgtaaatagaaccccctccaccaccccccgccgcccagcatcctacctggactgcggtgctacgagggcctgcgggcctttgctgtgtgccaccctccctgtaagtctatttaaaaacatcgacgatacattgaaatgtgtgaacgttttgaaaagctacagcttccagcagccaaaagcaactgttgttttggcaagacggtcctgatgtacaagcttgattgaaattcactgctcacttgatacgttattcagaaacccaaggaatggctgtccccatcctcatgtggctgtgtggagctcagctgtgttgtgtggcagtttattaaactgtcccccagatcgacacgcaaaaaaaaaaaaaaaaaaaataaaaaaaaaaaaaaaaaaaaaaaaaaaaaaaaaaaaaaaaaaaaaaaaaaaaaaaaaaaaaaaaaaaaaaaaaaaaaaaaaaaaaaaaaaaaaaaaaaaaaaaaaaaaaaaaaaaaaaaaacaaaaaaaaaaaaaaagaagagaggacgcgcggagaaggagagacaagcaaactacaaacataatagagggaccaagagaaaaggaaaaaagaagagaaagaaagagagggaagcgaaagacaaaaaagaaaaaaaaaaaaaaaaaacaaaaaaaaaacgaaagaaaacaacaagaaaaaaaaacaaaaaagagaaaagaaagaaaaagaaagaaaaaagacaaaaaaaacagaaaaaaaaagagaacagaacaagaaagagagaaaaacagcaaaagaaagaagaaacaaagaagaagaaaacagaaaagaaaaaaagaagaaaaaaaaaaaaaaaagaaaaaaaaaagaaaaaaaaggagagaaaagaaaaagagaagagagaaaaaaagagaggaagaagagagacagaaaagacgaaaaaaagaacgagaagaagagaagagaaagagagaacaaaaggagaaagaaaaaaggagaaagaggagagcgagaagagagaaaaaagaaaaaaaaacaaaaagaaca

SEQ ID NO: 368026 - DNA, 1834 bp, Homo sapiens
caacacaaaacacaaacaacagaaagtagtcataagatagaggccggggggtttataggggaagaagccgagatggcggcagccagcgctggggcaacccggctgctcctgctcttgctgatggcggtagcagcgcccagtcgagcccggggcagcggctgccgggccgggactggtgcgcgaggggctggggcggaaggtcgagagggcgaggcctgtggcacggtggggctgctgctggagcactcatttgagatcgatgacagtgccaacttccggaagcggggctcactgctctggaaccagcaggatggtaccttgtccctgtcacagcggcagctcagcgaggaggagcggggccgactccgggatgtggcagccctgaatggcctgtaccgggtccggatcccaaggcgacccggggccctggatggcctggaagctggtggctatgtctcctcctttgtccctgcgtgctccctggtggagtcgcacctgtcggaccagctgaccctgcacgtggatgtggccggcaacgtggtgggcgtgtcggtggtgacgcaccctggagatggaacaggcccagaaggccaagaacccccaggagcagaagtccttcttcgccaaatactggatgtacatcattcccgtcgtcctgttcctcatgatgtcaggagcgccagacaccgggggccagggtgggggtgggggtgggggtggtggtgggggtagtggccggtgagggcccaggctggtcagcgtcccgtcttgcacacccaggggcctccctttctgctggagtcccctgtgtcctcagccatcccaagaagggtttgctggtccctcctttccccccgtcccacgaggccacctgggccagccccttgtcctctgccttctgctggcagaggagcagctggactggggcctttggcacagcagccggtgtctcctgcgcccgcctcccccatggccccatgcagccccaggggcttcccccctgcccatggagtagagcccgagatcctggccactatgccagttctgacctcgcatccccctaccccgagcccatgcagtctgggaacatgccgccttctctccagcctctgtgcctttgttccaggtggtctcaccctcctgtccctggctgggctaggtggtcctgtccaggctcctgcagcgcccccctcactttgacactggactaggatgcagcctcccttctgtgtccccttgagggtaccctgggtcccctcatcaggggcagaggcatgaaagagtcggggctggatggccaggggcttctgggcccgacgcctagtgcagcccctggggtcgtggtttgacatttgtctgcctggtgcaaacaaggaatccttgcctttaaggtgacaggccctccacaggcttccagacttgaaggaaaaggtttaagaaagaaaacaaaaccaacagttagtggagtcaaagcccagacactgtaaatagaaccccctccaccaccccccgccgcccagcatcctacctggactgcggtgctacgagggcctgcgggcctttgctgtgtgccaccctccctgtaagtctatttaaaaacatcgacgatacattgaaatgtgtgaacgttttgaaaagctacagcttccagcagccaaaagcaactgttgttttggcaagacggtcctgatgtacaagcttgattgaaattcactgctcacttgatacgttattcagaaacccaaggaatggctgtccccatcctcatgtggctgtgtggagctcagctgtgttgtgtggcagtttattaaactgtcccccagatcgacacgca

SEQ ID NO: 368027 - DNA, 2006 bp, Homo sapiens
caggccccaggtgcggacgggtgccagtgcgcaggtgccggggcccagcgcaggcgcacgggcgtcaggatgcggcctgttcctcccggcgtgctccgcggctcttggctcacagccgtcccttcgctggtgggaagaagccgagatggcggcagccagcgctggggcaacccggctgctcctgctcttgctgatggcggtagcagcgcccagtcgagcccggggcagcggctgccgggccgggactggtgcgcgaggggctggggcggaaggtcgagagggcgaggcctgtggcacggtggggctgctgctggagcactcatttgagatcgatgacagtgccaacttccggaagcggggctcactgctctggaaccagcaggatggtaccttgtccctgtcacagcggcagctcagcgaggaggagcggggccgactccgggatgtggcagccctgaatggcctgtaccgggtccggatcccaaggcgacccggggccctggatggcctggaagctggtggctatgtctcctcctttgtccctgcgtgctccctggtggagtcgcacctgtcggaccagctgaccctgcacgtggatgtggccggcaacgtggtgggcgtgtcggtggtgacgcaccccgggggctgccggggccatgaggtggaggacgtggacctggagctgttcaacacctcggtgcagctgcagccgcccaccacagccccaggccctgagacggcggccttcattgagcgcctggagatggaacaggcccagaaggccaagaacccccaggagcagaagtccttcttcgccaaatactggatgtacatcattcccgtcgtcctgttcctcatgatgtcaggagcgccagacaccgggggccagggtgggggtgggggtgggggtggtggtgggggtagtggccggtgagggcccaggctggtcagcgtcccgtcttgcacacccaggggcctccctttctgctggagtcccctgtgtcctcagccatcccaagaagggtttgctggtccctcctttccccccgtcccacgaggccacctgggccagccccttgtcctctgccttctgctggcagaggagcagctggactggggcctttggcacagcagccggtgtctcctgcgcccgcctcccccatggccccatgcagccccaggggcttcccccctgcccatggagtagagcccgagatcctggccactatgccagttctgacctcgcatccccctaccccgagcccatgcagtctgggaacatgccgccttctctccagcctctgtgcctttgttccaggtggtctcaccctcctgtccctggctgggctaggtggtcctgtccaggctcctgcagcgcccccctcactttgacactggactaggatgcagcctcccttctgtgtccccttgagggtaccctgggtcccctcatcaggggcagaggcatgaaagagtcggggctggatggccaggggcttctgggcccgacgcctagtgcagcccctggggtcgtggtttgacatttgtctgcctggtgcaaacaaggaatccttgcctttaaggtgacaggccctccacaggcttccagacttgaaggaaaaggtttaagaaagaaaacaaaaccaacagttagtggccggtgagggcccaggctggtcagcgtcccgtcttgcacacccagggcctccctttctacgagggcctgcgggcctttgctgtgtgccaccctccctgtaagtctatttaaaaacatcgacgatacattgaaatgtgtgaacgttttgaaaagctacagcttccagcagccaaaagcaactgttgttttggcaagacggtcctgatgtacaagcttgattgaaattcactgctcacttgatacgttattcagaaacccaaggaatggctgtccccatcctcatgtggctgtgtggagctcagctgtgttgtgtggcagtttattaaactgtcccccagatcgacacgca

SEQ ID NO: 368028 - DNA, 1398 bp, Homo sapiens
caggccccaggtgcggacgggtgccagtgcgcaggtgccggggcccagcgcaggcgcacgggcgtcaggatgcggcctgttcctcccggcgtgctccgcggctcttggctcacagccgtcccttcgctggtgggaagaagccgagatggcggcagccagcgctggggcaacccggctgctcctgctcttgctgatggcggtagcagcgcccagtcgagcccggggcagcggctgccgggccgggactggtgcgcgaggggctggggcggaaggtcgagagggcgaggcctgtggcacggtggggctgctgctggagcactcatttgagatcgatgacagtgccaacttccggaagcggggctcactgctctggaaccagcaggatggtaccttgtccctgtcacagcggcagctcagcgaggaggagcggggccgactccgggatgtggcagccctgaatggcctgtaccgggtccggatcccaaggcgacccggggccctggatggcctggaagctggtggctatgtctcctcctttgtccctgcgtgctccctggtggagtcgcacctgtcggaccagctgaccctgcacgtggatgtggccggcaacgtggtgggcgtgtcggtggtgacgcaccccgggggctgccggggccatgaggtggaggacgtggacctggagctgttcaacacctcggtgcagctgcagccgcccaccacagccccaggccctgagacggcggccttcattgagcgcctggagatggaacaggcccagaaggccaagaacccccaggagcagaagtccttcttcgccaaatactggatgtacatcattcccgtcgtcctgttcctcatgatgtcaggagcgccagacaccgggggccagggtgggggtgggggtgggggtggtggtgggggtagtggccggtgagggcccaggctggtcagcgtcccgtcttgcacacccaggggcctccctttctgctggagtcccctgtgtcctcagccatcccaagaagggtttgctggtccctcctttccccccgtcccacgaggccacctgggccagccccttgtcctctgccttctgctggcagaggagcagctggactggggcctttggcacagcagccggtgtctcctgcgcccgcctcccccatggccccatgcagccccaggggcttcccccctgcccatggagtagagcccgagatcctggccactatgccagttctgacctcgcatccccctaccccgagcccatgcagtctgggaacatgccgccttctctccagcctctgtgcctttgttccaggtggtctcaccctcctgtccctggctgggctaggtggtcctgtccagcccctatccgctatccaataaggtcctctagag

SEQ ID NO: 368029 - DNA, 821 bp, Homo sapiens
caacacaaaacacaaacaacagaaagtagtcataagatagaggccggggggtttataggggaagaagccgagatggcggcagccagcgctggggcaacccggctgctcctgctcttgctgatggcggtagcagcgcccagtcgagcccggggcagcggctgccgggccgggactggtgcgcgaggggctggggcggaaggtcgagagggcgaggcctgtggcacggtggggctgctgctggagcactcatttgagatcgatgacagtgccaacttccggaagcggggctcactgctctggaaccagcaggatggtaccttgtccctgtcacagcggcagctcagcgaggaggagcggggccgactccgggatgtggcagccctgaatggcctgtaccgggtccggatcccaaggcgacccggggccctggatggcctggaagctggtggctatgtctcctcctttgtccctgcgtgctccctggtggagtcgcacctgtcggaccagctgaccctgcacgtggatgtggccggcaacgtggtgggcgtgtcggtggtgacgcaccccgggggctgccggggccatgaggtggaggacgtggacctggagctgttcaacacctcggtgcagctgcagccgcccaccacagccccaggccctgagacggcggccttcattgagcgcctggagatggaacaggcccagaaggccaagaacccccaggagcagaagtccttcttcgccaaatactggatgtacatcattcccgtcgtctgttctatgatgtccagacgcagaaacagggcacgtggacgcggaaa

SEQ ID NO: 368030 - DNA, 2057 bp, Homo sapiens
cgcgacgccgcgcctacgcattttcctgggcgggaacagcaaaatggcgccagaactagtggcgggctgaggacgccgtacccctcggaaggcagccctgcggtccctttgccgcccgttccctcccggacatggaggacgtggaggcgcgcttcgcccacctcttgcagcccatccgcgacctcaccaagaactgggaggtggacgtggcggcccagctgggcgagtatctggaggagctggatcagatctgcatttcttttgacgaaggcaagaccacaatgaacttcattgaggcagcgttgttgatccagggctctgcctgcgtctacagtaagaaggtggaatacctctactcactcgtctaccaggcccttgatttcatctctggaaagaggcgggccaagcagctctcttcggtgcaggaggacagggccaatggggttgccagctccggggtcccccaggaggcagagaatgagttcctgtcgctggatgacttccctgactcccggactaacgtggatctcaagaatgatcagacgcccagtgaggtcctcatcatccccctcctgcccatggccctggtggcccctgatgaaatggagaagaacaacaatcccctgtacagccgtcagggtgaggtcctggccagccggaaggatttcaggatgaacacgtgcgttccccaccccagaggggccttcatgttggagccagagggcatgtcccccatggaaccagcgggcgtttcccccatgccagggacccagaaggacaccgggaggactgaggagcagccaatggaagtttccgtgtgcaggagccctgtcccagcactcggcttctcccaggagccaggcccctctccagaaggcccgatgcccctgggtgggggcgaggacgaggatgcagaggaggcagtagagcttcctgaggcctcggcccccaaggccgctctggagcccaaggagtccaggagcccgcagcagagtgctgccctgcccaggaggtacatgctgcgggagcgggagggggccccagagcctgcatcctgcgtgaaggagactccagacccctggcagagcctggacccctttgactccttggagtctaagcccttcaagaaaggtaggccttactctgtgcccccctgtgtggaggaggctctgggacagaagcgcaagaggaagggcgctgccaagctgcaggacttccaccagtggtacctggctgcctatgcagaccatgccgacagcaggcggcttcggcgaaagggtccgtcctttgcagacatggaggtcctgtactggacacacgtgaaggagcagttggaaactctccggaagctgcagaggagggaggtggctgagcagtggctgcggcctgcagaggaggaccacctggaggattccctggaagacctgggggcagcagatgactttctagagcctgaggagtacatggagcccgagggagcagaccccagggaagccgctgaccttgacgcagtgccgatgtccctgagctacgaggagctggttcgaaggaatgtggagctcttcatcgccacctcccagaagtttgtccaggagacagagctgagccagcgcatcagggactgggaggacacagtgcagcctctgctccaggagcaggagcagcatgtgccctttgacatccacacctatggggaccagctggtctcacggttcccccagctcaatgagtggtgtccctttgcggagctggtggctggccagccggccttcgaggtgtgtcgttccatgctggcctccctgcagctggccaatgactacacagtggagataacccagcagcccgggctggagatggccgtggacaccatgtccctgagactgctcacgcaccagcgagcgcacaagcgcttccagacctacgctgccccctccatggcccagccctgagtggggagcaccgaggcaggggtgggggaatgtgtactgaggagccgtgcgtctgctcctggctggcccggcctaataaagcagtgttgccatctcatcttcccccta

SEQ ID NO: 368031 - DNA, 1418 bp, Homo sapiens
cgcgacgccgcgcctacgcattttcctgggcgggaacagcaaaatggcgccagaactagtggcgggctgaggacgccgtacccctcggaaggcagccctgcggtccctttgccgcccgttccctcccggacatggaggacgtggaggcgcgcttcgcccacctcttgcagcccatccgcgacctcaccaagaactgggaggtggacgtggcggcccagctgggcgagtatctggaggagctggatcagatctgcatttcttttgacgaaggcaagaccacaatgaacttcattgaggcagcgttgttgatccagggctctgcctgcgtctacagtaagaaggtggaatacctctactcactcgtctaccaggcccttgatttcatctctggaaagaggcgggccaagcagctctcttcggtgcaggaggacagggccaatggggttgccagctccggggtcccccaggaggcagagaatgagttcctgtcgctggatgacttccctgactcccggactaacgtggatctcaagaatgatcagacgcccagtgaggtcctcatcatccccctcctgcccatggccctggtggcccctgatgaaatggagaagaacaacaatcccctgtacagccgtcagggtgaggtcctggccagccggaaggatttcaggatgaacacgtgcgttccccaccccagaggggccttcatgttggagccagagggcatgtcccccatggaaccagcgggcgtttcccccatgccagggacccagaaggacaccgggaggactgaggagcagccaatggaagtttccgtgtgcaggagccctgtcccagcactcggcttctcccaggagccaggcccctctccagaaggcccgatgcccctgggtgggggcgaggacgaggatgcagaggaggcagtagagcttcctgaggcctcggcccccaaggccgctctggagcccaaggagtccaggagcccgcagcaggtgggacccacatggaggcctgcagaacctgagctgtgaactggcaaccctggctctggggccgagtcaccttgcacaaggaggacagtggtatggccttggccccagaccactggtctggggcagaagcccacctgtcttgcagcccgtcctgcaaccagcccttttgaagagcagcttctgtgttcctcccctctctgagcagaactgatgctcctcagagtagtgggctggcgtccaaggatttgagccctgtcgagctcacggcaacctgggatggccgccggttgccaaggcgcctctctgcagtcgggctggtaggagggagtgtctggaggccattgctgcctccctcaacccccggggtcaactgtacccagcctagagccaagaaatccttcctttttattcattaaaacaaaatca

SEQ ID NO: 368032 - DNA, 940 bp, Homo sapiens
cgcgacgccgcgcctacgcattttcctgggcgggaacagcaaaatggcgccagaactagtggcgggctgaggacgccgtacccctcggaaggcagccctgcggtccctttgccgcccgttccctcccggacatggaggacgtggaggcgcgcttcgcccacctcttgcagcccatccgcgacctcaccaagaactgggaggtggacgtggcggcccagctgggcgagtatctggaggagctggatcagatctgcatttcttttgacgaaggcaagaccacaatgaacttcattgaggcagcgttgttgatccagggctctgcctgcgtctacagtaagaaggtggaatacctctactcactcgtctaccaggcccttgatttcatctctggaaagaggcgggccaagcagctctcttcggtgcaggaggacagggccaatggggttgccagctccggggtcccccaggaggcagagaatgagttcctgtcgctggatgacttccctgactcccggactaacgtggatctcaagaatgatcagacgcccagtgaggtcctcatcatccccctcctgcccatggccctggtggcccctgatgaaatggagaagaacaacaatcccctgtacagccgtcagggtgaggtcctggccagccggaaggatttcaggatgaacacgtgcgttccccaccccagaggggccttcatgttggagccagagggcatgtcccccatggaacagggggttcccatgcagaccagaggacacggaggctggggagcaggaattcggggagacctgtcaagactcggttccagagcaaggcttcagaagcggtgcggggggtggaacagttgagggaaagtgaggcgcaagggtgacaggttaggccgaagggcacaagaagggaggggcagtgggcccactttcaccggacc

SEQ ID NO: 368033 - DNA, 3617 bp, Homo sapiens
cgcgacgccgcgcctacgcattttcctgggcgggaacagcaaaatggcgccagaactagtggcgggctgaggacgccgtacccctcggaaggcagccctgcggtccctttgccgcccgttccctcccggacatggaggacgtggaggcgcgcttcgcccacctcttgcagcccatccgcgacctcaccaagaactgggaggtggacgtggcggcccagctgggcgagtatctggaggagctggatcagatctgcatttcttttgacgaaggcaagaccacaatgaacttcattgaggcagcgttgttgatccagggctctgcctgcgtctacagtaagaaggtggaatacctctactcactcgtctaccaggcccttgatttcatctctggaaagaggcgggccaagcagctctcttcggtgcaggaggacagggccaatggggttgccagctccggggtcccccaggaggcagagaatgagttcctgtcgctggatgacttccctgactcccggactaacgtggatctcaagaatgatcagacgcccagtgaggtcctcatcatccccctcctgcccatggccctggtggcccctgatgaaatggagaagaacaacaatcccctgtacagccgtcagggtgaggtcctggccagccggaaggatttcaggatgaacacgtgcgttccccaccccagaggggccttcatgttggagccagagggcatgtcccccatggaaccagcgggcgtttcccccatgccagggacccagaaggacaccgggaggactgaggagcagccaatggaagtttccgtgtgcaggagccctgtcccagcactcggcttctcccaggagccaggcccctctccagaaggcccgatgcccctgggtgggggcgaggacgaggatgcagaggaggcagtagagcttcctgaggcctcggcccccaaggccgctctggagcccaaggagtccaggagcccgcagcagagtgctgccctgcccaggaggtacatgctgcgggagcgggagggggccccagagcctgcatcctgcgtgaaggagactccagacccctggcagagcctggacccctttgactccttggagtctaagcccttcaagaaaggtaggccttactctgtgcccccctgtgtggaggaggctctgggacagaagcgcaagaggaagggcgctgccaagctgcaggacttccaccagtggtacctggctgcctatgcagaccatgccgacagcaggcggcttcggcgaaagggtccgtcctttgcagacatggaggtcctgtactggacacacgtgaaggagcagttggaaactctccggaagctgcagaggagggaggtggctgagcagtggctgcggcctgcagaggaggaccacctggaggattccctggaagacctgggggcagcagatgactttctagagcctgaggagtacatggagcccgagggagcagaccccagggaagccgctgaccttgacgcagtgccgatgtccctgagctacgaggagctggttcgaaggaatgtggagctcttcatcgccacctcccagaagtttgtccaggagacagagctgagccagcgcatcagggactgggaggacacagtgcagcctctgctccaggagcaggagcagcatgtgccctttgacatccacacctatggggaccagctggtctcacggttcccccagctcaatgagtggtgtccctttgcggagctggtggctggccagccggccttcgaggtgtgtcgttccatgctggcctccctgcagctggccaatgactacacagtggagataacccagcagcccgggctggagatggccgtggacaccatgtccctgagactgctcacgcaccagcgagcgcacaagcgcttccagacctacgctgccccctccatggcccagccctgagtggggagcaccgaggcaggggtgggggaatgtgtactgaggagccgtgcgtctgctcctggctggcccggcctaataaagcagtgttgccatctcatcttccccctaaaaacccttttatgtacacctgcgcagagaagagggctgcctggcctccctgggccgctggtacagatcacacacacacacagattaaacgcagcccgtttaatgatggggcccagactgcagtggctcaagacaggacactgcggaaagccgccatgtgccgccgcacactgtctgagatctgctcagccgatctgctccggccgtagtaatccgtgaagaggccgtcagggttgagcaggtagatggcaatggagtggtccacgatgtagtcctggtcctcatccttggggcctgcattgtagtacacgcggtaactgtgactagcctgggcaacctgtttggtggagccggtcagacccaacagtcttgggtggaagtcctggacgtagcgggccatggcttcaacgtcgtcccgctcggggtccacagtgatgaagacaggctgcactggaggcaaaccaggctctgcttccagctgccgcaccacctgcaccagcttctccagctcgtctgggcagatgtcagggcagtgagtgaagccaaagtacatcagcacccactggccccggaagtcagccttgcagcgagcccggcctctgtgatccagcaggtggaagtcgccctggcccacagctgcctggcgcagggcttctgttcgcttttgctgctgcagcctctccttctcagccctcagggccagccaggccccaccgagtccagccccgaacaggcctgtgatcagcagccgggttcgaagcccagggccctggggctggccctgcccacctgtctctgcagggccctgccttgacaaaagccaggacctcagatgcagggcctggcctcccagggtcccagggaggaccggaggcttgagctgagagagcctgtgccaagctgtggggctccgagtcagcagcagcatggatctgatgctcctggaaacaagcacaggcgtcaggagccagaagggaaggcccaggacagtgcctgggctgcccctgcgacttgagaccagccacccatctgaaggacccagcccacgttcaggcttaacaggcatttgcagctgctcacctgagctcagaactccacctccaccaaacatccacacctgggcaaccacacctgtcactcctgtcctctacctgggatcaccagcctgtcaccgcaccctgccctgcacctgcacctcagcaaggtgaacctcttgctgacggaaagcattccaagtgcatgccttgcctgaactaaccacgttatctatttgcaataaacccatttcttaaaaggaggtgggtaactctctggcttgcaatccccgagagcaaccgattcctccaacactttcctgttacctccagccacttcaaccaaccgcggccttcctccacactcccagcagaaaacctgcacgacctacccccggagctcagactctgcccgccggctgtgtttaacctctcctggcagagacgcacgacacttccacccgccacaaaaccccaccctcctcacatccaggcttcccagcagctcctccgggctcacagccga

SEQ ID NO: 368034 - DNA, 1487 bp, Homo sapiens
cgcgacgccgcgcctacgcattttcctgggcgggaacagcaaaatggcgccagaactagtggcgggctgaggacgccgtacccctcggaaggcagccctgcggtccctttgccgcccgttccctcccggacatggaggacgtggaggcgcgcttcgcccacctcttgcagcccatccgcgacctcaccaagaactgggaggtggacgtggcggcccagctgggcgagtatctggaggagctggatcagatctgcatttcttttgacgaaggcaagaccacaatgaacttcattgaggcagcgttgttgatccagggctctgcctgcgtctacagtaagaaggtggaatacctctactcactcgtctaccaggcccttgatttcatctctggaaagaggcgggccaagcagctctcttcggtgcaggaggacagggccaatggggttgccagctccggggtcccccaggaggcagagaatgagttcctgtcgctggatgacttccctgactcccggactaacgtggatctcaagaatgatcagacgcccagtgaggtcctcatcatccccctcctgcccatggccctggtggcccctgatgaaatggagaagaacaacaatcccctgtacagccgtcagggtgaggtcctggccagccggaaggatttcaggatgaacacgtgcgttccccaccccagaggggccttcatgttggagccagagggcatgtcccccatggaaccagcgggcgtttcccccatgccagggacccagaaggacaccgggaggactgaggagcagccaatggaagtttccgtgtgcaggagccctgtcccagcactcggcttctcccaggagccaggcccctctccagaaggcccgatgcccctgggtgggggcgaggacgaggatgcagaggaggcagtagagcttcctgaggcctcggcccccaaggccgctctggagcccaaggagtccaggagcccgcagcagagtgctgccctgcccaggaggtacatgctgcgggagcgggagggggccccagagcctgcatcctgcgtgaaggagactccagacccctggcagagcctggacccctttgactccttggagtctaagcccttcaagaaaggtaggccttactctgtgcccccctgtgtggaggaggctctgggacagaagcgcaagaggaagggcgctgccaagctgcaggacttccaccagtggtacctggctgcctatgcagaccatgccgacagcaggcggcttcggcgaaagggtccgtcctttgcagacatggaggtcctgtactggacacacgtgaaggagcagttggaaactctccggaagctgcagaggagggaggtggctgagcagtggctgcggcctgcagaggaggaccacctggaggattccctggaagacctgggggcagcagatgactttctagagcctaataaagcagtgttgccatctcaaaaaaaaaaa

SEQ ID NO: 368035 - DNA, 2112 bp, Homo sapiens
cgcgacgccgcgcctacgcattttcctgggcgggaacagcaaaatggcgccagaactagtggcgggctgaggacgccgtacccctcggaaggcagccctgcggtccctttgccgcccgttccctcccggacatggaggacgtggaggcgcgcttcgcccacctcttgcagcccatccgcgacctcaccaagaactgggaggtggacgtggcggcccagctgggcgagtatctggaggagtgtcatttgctgagaaggaatacaggagatgagccagcgttggggaagatgttggctggatcagatctgcatttcttttgacgaaggcaagaccacaatgaacttcattgaggcagcgttgttgatccagggctctgcctgcgtctacagtaagaaggtggaatacctctactcactcgtctaccaggcccttgatttcatctctggaaagaggcgggccaagcagctctcttcggtgcaggaggacagggccaatggggttgccagctccggggtcccccaggaggcagagaatgagttcctgtcgctggatgacttccctgactcccggactaacgtggatctcaagaatgatcagacgcccagtgaggtcctcatcatccccctcctgcccatggccctggtggcccctgatgaaatggagaagaacaacaatcccctgtacagccgtcagggtgaggtcctggccagccggaaggatttcaggatgaacacgtgcgttccccaccccagaggggccttcatgttggagccagagggcatgtcccccatggaaccagcgggcgtttcccccatgccagggacccagaaggacaccgggaggactgaggagcagccaatggaagtttccgtgtgcaggagccctgtcccagcactcggcttctcccaggagccaggcccctctccagaaggcccgatgcccctgggtgggggcgaggacgaggatgcagaggaggcagtagagcttcctgaggcctcggcccccaaggccgctctggagcccaaggagtccaggagcccgcagcagagtgctgccctgcccaggaggtacatgctgcgggagcgggagggggccccagagcctgcatcctgcgtgaaggagactccagacccctggcagagcctggacccctttgactccttggagtctaagcccttcaagaaaggtaggccttactctgtgcccccctgtgtggaggaggctctgggacagaagcgcaagaggaagggcgctgccaagctgcaggacttccaccagtggtacctggctgcctatgcagaccatgccgacagcaggcggcttcggcgaaagggtccgtcctttgcagacatggaggtcctgtactggacacacgtgaaggagcagttggaaactctccggaagctgcagaggagggaggtggctgagcagtggctgcggcctgcagaggaggaccacctggaggattccctggaagacctgggggcagcagatgactttctagagcctgaggagtacatggagcccgagggagcagaccccagggaagccgctgaccttgacgcagtgccgatgtccctgagctacgaggagctggttcgaaggaatgtggagctcttcatcgccacctcccagaagtttgtccaggagacagagctgagccagcgcatcagggactgggaggacacagtgcagcctctgctccaggagcaggagcagcatgtgccctttgacatccacacctatggggaccagctggtctcacggttcccccagctcaatgagtggtgtccctttgcggagctggtggctggccagccggccttcgaggtgtgtcgttccatgctggcctccctgcagctggccaatgactacacagtggagataacccagcagcccgggctggagatggccgtggacaccatgtccctgagactgctcacgcaccagcgagcgcacaagcgcttccagacctacgctgccccctccatggcccagccctgagtggggagcaccgaggcaggggtgggggaatgtgtactgaggagccgtgcgtctgctcctggctggcccggcctaataaagcagtgttgccatctcatcttcccccta

SEQ ID NO: 368036 - DNA, 2490 bp, Homo sapiens
cgcgacgccgcgcctacgcattttcctgggcgggaacagcaaaatggcgccagaactagtggcgggctgaggacgccgtacccctcggaaggcagccctgcggtccctttgccgcccgttccctcccggacatggaggacgtggaggcgcgcttcgcccacctcttgcagcccatccgcgacctcaccaagaactgggaggtggacgtggcggcccagctgggcgagtatctggaggagctggatcagatctgcatttcttttgacgaaggcaagaccacaatgaacttcattgaggcagcgttgttgatccagggctctgcctgcgtctacagtaagaaggtggaatacctctactcactcgtctaccaggcccttgatttcatctctggaaagaggcgggccaagcagctctcttcggtgcaggaggacagggccaatggggttgccagctccggggtcccccaggaggcagagaatgagttcctgtcgctggatgacttccctgactcccggactaacgtggatctcaagaatgatcagacgcccagtgaggtcctcatcatccccctcctgcccatggccctggtggcccctgatgaaatggagaagaacaacaatcccctgtacagccgtcagggtgaggtcctggccagccggaaggatttcaggatgaacacgtgcgttccccacgagctcttcatcgccacctcccagaagtttgtccaggagacagagctgagccagcgcatcagggactgggaggacacagtgcagcctctgctccaggagcaggagcagcatgtgccctttgacatccacacctatggggaccagctggtctcacggttcccccagctcaatgagtggtgtccctttgcggagctggtggctggccagccggccttcgaggtgtgtcgttccatgctggcctccctgcagctggccaatgactacacagtggagataacccagcagcccgggctggagatggccgtggacaccatgtccctgagactgctcacgcaccagcgagcgcacaagcgcttccagacctacgctgccccctccatggcccagccctgagtggggagcaccgaggcaggggtgggggaatgtgtactgaggagccgtgcgtctgctcctggctggcccggcctaataaagcagtgttgccatctcatcttccccctaaaaacccttttatgtacacctgcgcagagaagagggctgcctggcctccctgggccgctggtacagatcacacacacacacagattaaacgcagcccgtttaatgatggggcccagactgcagtggctcaagacaggacactgcggaaagccgccatgtgccgccgcacactgtctgagatctgctcagccgatctgctccggccgtagtaatccgtgaagaggccgtcagggttgagcaggtagatggcaatggagtggtccacgatgtagtcctggtcctcatccttggggcctgcattgtagtacacgcggtaactgtgactagcctgggcaacctgtttggtggagccggtcagacccaacagtcttgggtggaagtcctggacgtagcgggccatggcttcaacgtcgtcccgctcggggtccacagtgatgaagacaggctgcactggaggcaaaccaggctctgcttccagctgccgcaccacctgcaccagcttctccagctcgtctgggcagatgtcagggcagtgagtgaagccaaagtacatcagcacccactggccccggaagtcagccttgcagcgagcccggcctctgtgatccagcaggtggaagtcgccctggcccacagctgcctggcgcagggcttctgttcgcttttgctgctgcagcctctccttctcagccctcagggccagccaggccccaccgagtccagccccgaacaggcctgtgatcagcagccgggttcgaagcccagggccctggggctggccctgcccacctgtctctgcagggccctgccttgacaaaagccaggacctcagatgcagggcctggcctcccagggtcccagggaggaccggaggcttgagctgagagagcctgtgccaagctgtggggctccgagtcagcagcagcatggatctgatgctcctggaaacaagcacaggcgtcaggagccagaagggaaggcccaggacagtgcctgggctgcccctgcgacttgagaccagccacccatctgaaggacccagcccacgttcaggcttaacaggcatttgcagctgctcacctgagctcagaactccacctccaccaaacatccacacctgggcaaccacacctgtcactcctgtcctctacctgggatcaccagcctgtcaccgcaccctgccctgcacctgcacctcagcaaggtgaacctcttgctgacggaaagcattccaagtgcatgccttgcctgaactaaccacgttatctatttgcaataaacccatttcttaaaagga

SEQ ID NO: 368037 - DNA, 1193 bp, Homo sapiens
cgcgacgccgcgcctacgcattttcctgggcgggaacagcaaaatggcgccagaactagtggcgggctgaggacgccgtacccctcggaaggcagccctgcggtccctttgccgcccgttccctcccggacatggaggacgtggaggcgcgcttcgcccacctcttgcagcccatccgcgacctcaccaagaactgggaggtggacgtggcggcccagctgggcgagtatctggaggagctggatcagatctgcatttcttttgacgaaggcaagaccacaatgaacttcattgaggcagcgttgttgatccagggctctgcctgcgtctacagtaagaaggtggaatacctctactcactcgtctaccaggcccttgatttcatctctggaaagaggcgggccaagcagctctcttcggtgcaggaggacagggccaatggggttgccagctccggggtcccccaggaggcagagaatgagttcctgtcgctggatgacttccctgactcccggactaacgtggatctcaagaatgatcagacgcccagtgaggtcctcatcatccccctcctgcccatggccctggtggcccctgatgaaatggagaagaacaacaatcccctgtacagccgtcagggtgaggtcctggccagccggaaggatttcaggatgaacacgtgcgttccccacgagctcttcatcgccacctcccagaagtttgtccaggagacagagctgagccagcgcatcagggactgggaggacacagtgcagcctctgctccaggagcaggagcagcatgtgccctttgacatccacacctatggggaccagctggtctcacggttcccccagctcaatgagtggtgtccctttgcggagctggtggctggccagccggccttcgaggtgtgtcgttccatgctggcctccctgcagctggccaatgactacacagtggagataacccagcagcccgggctggagatggccgtggacaccatgtccctgagactgctcacgcaccagcgagcgcacaagcgcttccagacctacgctgccccctccatggcccagccctgagtggggagcaccgaggcaggggtgggggaatgtgtactgaggagccgtgcgtctgctcctggctggcccggcctaataaagcagtgttgccatctcatcttcccccta

SEQ ID NO: 368038 - DNA, 2125 bp, Homo sapiens
  misc_feature (1846)..(1846): n is a, c, g, or t
cgcgacgccgcgcctacgcattttcctgggcgggaacagcaaaatggcgccagaactagtggcgggctgaggacgccgtacccctcggaaggcagccctgcggtccctttgccgcccgttccctcccggacatggaggacgtggaggcgcgcttcgcccacctcttgcagcccatccgcgacctcaccaagaactgggaggtggacgtggcggcccagctgggcgagtatctggaggagctggatcagatctgcatttcttttgacgaaggcaagaccacaatgaacttcattgaggcagcgttgttgatccagggctctgcctgcgtctacagtaagaaggtggaatacctctactcactcgtctaccaggcccttgatttcatctctggaaagaggcgggccaagcagctctcttcggtgcaggaggacagggccaatggggttgccagctccggggtcccccaggaggcagagaatgagttcctgtcgctggatgacttccctgactcccggactaacgtggatctcaagaatgatcagacgcccagtgaggtcctcatcatccccctcctgcccatggccctggtggcccctgatgaaatggagaagaacaacaatcccctgtacagccgtcagggtgaggtcctggccagccggaaggatttcaggatgaacacgtgcgttccccaccccagaggggccttcatgttggagccagagggcatgtcccccatggaaccagcgggcgtttcccccatgccagggacccagaaggacaccgggaggactgaggagcagccaatggaagtttccgtgtgcaggagccctgtcccagcactcggcttctcccaggagccaggcccctctccagaaggcccgatgcccctgggtgggggcgaggacgaggatgcagaggaggcagtagagcttcctgaggcctcggcccccaaggccgctctggagcccaaggagtccaggagcccgcagcagagtgctgccctgcccaggaggtacatgctgcgggagcgggagggggccccagagcctgcatcctgcgtgaaggagactccagacccctggcagagcctggacccctttgactccttggagtctaagcccttcaagaaaggtaggccttactctgtgcccccctgtgtggaggaggctctgggacagaagcgcaagaggaagggcgctgccaagctgcaggacttccaccagtggtacctggctgcctatgcagaccatgccgacagcaggcggcttcggcgaaagggtccgtcctttgcagacatggaggtcctgtactggacacacgtgaaggagcagttggaaactctccggaagctgcagaggagggaggtggctgagcagtggctgcggcctgcagaggaggaccacctggaggattccctggaagacctgggggcagcagatgactttctagagcctgaggagtacatggagcccgagggagcagaccccagggaagccgctgaccttgacgcagtgccgatgtccctgagctacgaggagctggttcgaaggaatgtggagctcttcatcgccacctcccagaagtttgtccaggagacagagctgagccagcgcatcagggactgggaggacacagtgcagcctctgctccaggagcaggagcagcatgtgccctttgacatccacacctatggggaccagctggtctcacggttcccccagctcaatgagtggtgtccctttgcggagctggtggctggccagccggccttcgaggtgtgtcgttccatgctggcctccctgcagctggtgagtagcctgggatacgtgggagggggagacggtcnccagaccctgctgatgtgccacccctgcaggccaatgactacacagtggagataacccagcagcccgggctggagatggccgtggacaccatgtccctgagactgctcacgcaccagcgagcgcacaagcgcttccagacctacgctgccccctccatggcccagccctgagtggggagcaccgaggcaggggtgggggaatgtgtactgaggagccgtgcgtctgctcctggctggcccggcctaataaagcagtgttgccatctcatcttcccccta

SEQ ID NO: 368039 - DNA, 3354 bp, Homo sapiens
cgcgacgccgcgcctacgcattttcctgggcgggaacagcaaaatggcgccagaactagtggcgggctgaggacgccgtacccctcggaaggcagccctgcggtccctttgccgcccgttccctcccggacatggaggacgtggaggcgcgcttcgcccacctcttgcagcccatccgcgacctcaccaagaactgggaggtggacgtggcggcccagctgggcgagtatctggaggagctggatcagatctgcatttcttttgacgaaggcaagaccacaatgaacttcattgaggcagcgttgttgatccagggctctgcctgcgtctacagtaagaaggtggaatacctctactcactcgtctaccaggcccttgatttcatctctggaaagaggcgggccaagcagctctcttcggtgcaggaggacagggccaatggggttgccagctccggggtcccccaggaggcagagaatgagttcctgtcgctggatgacttccctgactcccggactaacgtggatctcaagaatgatcagacgcccagtgaggtcctcatcatccccctcctgcccatggccctggtggcccctgatgaaatggagaagaacaacaatcccctgtacagccgtcagggtgaggtcctggccagccggaaggatttcaggatgaacacgtgcgttccccaccccagaggggccttcatgttggagccagagggcatgtcccccatggaaccagcgggcgtttcccccatgccagggacccagaaggacaccgggaggactgaggagcagccaatggaagtttccgtgtgcaggagccctgtcccagcactcggcttctcccaggagccaggcccctctccagaaggcccgatgcccctgggtgggggcgaggacgaggatgcagaggaggcagtagagcttcctgaggcctcggcccccaaggccgctctggagcccaaggagtccaggagcccgcagcagagtgctgccctgcccaggaggtacatgctgcgggagcgggagggggccccagagcctgcatcctgcgtgaaggagactccagacccctggcagagcctggacccctttgactccttggagtctaagcccttcaagaaaggtaggccttactctgtgcccccctgtgtggaggaggctctgggacagaagcgcaagaggaagggcgctgccaagctgcaggacttccaccagtggtacctggctgcctatgcagaccatgccgacagcaggcggcttcggcgaaagggtccgtcctttgcagacatggaggtcctgtactggacacacgtgaaggagcagttggaaactctccggaagctgcagaggagggaggtggctgagcagtggctgcggcctgcagaggaggaccacctggaggattccctggaagacctgggggcagcagatgactttctagagcctgaggagtacatggagcccgagggagcagaccccagggaagccgctgaccttgacgcagtgccgatgtccctgagctacgaggagctggttcgaaggaatgtggagctcttcatcgccacctcccagaagtttgtccaggagacagagctgagccagcgcatcagggactgggaggacacagtgcagcctctgctccaggagcaggagcagcatgtgccctttgacatccacacctatggggaccagctggtctcacggttcccccagctcaatgagtggtgtccctttgcggagctggtggctggccagccggccttcgaggtgtgtcgttccatgctggcctccctgcagctggccaatgactacacagtggagataacccagcagcccgggctggagatggccgtggacaccatgtccctgagactgctcacgcaccagcgagcgcacaagcgcttccagacctacgctgccccctccatggcccagccctgagtggggagcaccgaggcaggggtgggggaatgtgtactgaggagccgtgcgtctgctcctggctggcccggcctaataaagcagtgttgccatctcatcttccccctaaaaacccttttatgtacacctgcgcagagaagagggctgcctggcctccctgggccgctggtacagatcacacacacacacagattaaacgcagcccgtttaatgatggggcccagactgcagtggctcaagacaggacactgcggaaagccgccatgtgccgccgcacactgtctgagatctgctcagccgatctgctccggccgtagtaatccgtgaagaggccgtcagggttgagcaggtagatggcaatggagtggtccacgatgtagtcctggtcctcatccttggggcctgcattgtagtacacgcggtaactgtgactagcctgggcaacctgtttggtggagccggtcagacccaacagtcttgggtggaagtcctggacgtagcgggccatggcttcaacgtcgtcccgctcggggtccacagtgatgaagacaggctgcactggaggcaaaccaggctctgcttccagctgccgcaccacctgcaccagcttctccagctcgtctgggcagatgtcagggcagtgagtgaagccaaagtacatcagcacccactggccccggaagtcagccttgcagcgagcccggcctctgtgatccagcaggtggaagtcgccctggcccacagctgcctggcgcagggcttctgttcgcttttgctgctgcagcctctccttctcagccctcagggccagccaggccccaccgagtccagccccgaacaggcctgtgatcagcagccgggttcgaagcccagggccctggggctggccctgcccacctgtctctgcagggccctgccttgacaaaagccaggacctcagatgcagggcctggcctcccagggtcccagggaggaccggaggcttgagctgagagagcctgtgccaagctgtggggctccgagtcagcagcagcatggatctgatgctcctggaaacaagcacaggcgtcaggagccagaagggaaggcccaggacagtgcctgggctgcccctgcgacttgagaccagccacccatctgaaggacccagcccacgttcaggcttaacaggcatttgcagctgctcacctgagctcagaactccacctccaccaaacatccacacctgggcaaccacacctgtcactcctgtcctctacctgggatcaccagcctgtcaccgcaccctgccctgcacctgcacctcagcaaggtgaacctcttgctgacggaaagcattccaagtgcatgccttgcctgaactaaccacgttatctatttgcaataaacccatttcttaaaagga

SEQ ID NO: 368040 - DNA, 3444 bp, Homo sapiens
cgcgacgccgcgcctacgcattttcctgggcgggaacagcaaaatggcgccagaactagtggcgggctgaggacgccgtacccctcggaaggcagccctgcggtccctttgccgcccgttccctcccggacatggaggacgtggaggcgcgcttcgcccacctcttgcagcccatccgcgacctcaccaagaactgggaggtggacgtggcggcccagctgggcgagtatctggaggagctggatcagatctgcatttcttttgacgaaggcaagaccacaatgaacttcattgaggcagcgttgttgatccagggctctgcctgcgtctacagtaagaaggtggaatacctctactcactcgtctaccaggcccttgatttcatctctggaaagaggcgggccaagcagctctcttcggtgcaggaggacagggccaatggggttgccagctccggggtcccccaggaggcagagaatgagttcctgtcgctggatgacttccctgactcccggactaacgtggatctcaagaatgatcagacgcccagtgaggtcctcatcatccccctcctgcccatggccctggtggcccctgatgaaatggagaagaacaacaatcccctgtacagccgtcagggtgaggtcctggccagccggaaggatttcaggatgaacacgtgcgttccccaccccagaggggccttcatgttggagccagagggcatgtcccccatggaaccagcgggcgtttcccccatgccagggacccagaaggacaccgggaggactgaggagcagccaatggaagtttccgtgtgcaggagccctgtcccagcactcggcttctcccaggagccaggcccctctccagaaggcccgatgcccctgggtgggggcgaggacgaggatgcagaggaggcagtagagcttcctgaggcctcggcccccaaggccgctctggagcccaaggagtccaggagcccgcagcaggtgggacccacatggaggcctgcagaacctgagctgtgaactggcaaccctggctctggggccgagtcaccttgcacaaggaggacagtgagtgctgccctgcccaggaggtacatgctgcgggagcgggagggggccccagagcctgcatcctgcgtgaaggagactccagacccctggcagagcctggacccctttgactccttggagtctaagcccttcaagaaaggtaggccttactctgtgcccccctgtgtggaggaggctctgggacagaagcgcaagaggaagggcgctgccaagctgcaggacttccaccagtggtacctggctgcctatgcagaccatgccgacagcaggcggcttcggcgaaagggtccgtcctttgcagacatggaggtcctgtactggacacacgtgaaggagcagttggaaactctccggaagctgcagaggagggaggtggctgagcagtggctgcggcctgcagaggaggaccacctggaggattccctggaagacctgggggcagcagatgactttctagagcctgaggagtacatggagcccgagggagcagaccccagggaagccgctgaccttgacgcagtgccgatgtccctgagctacgaggagctggttcgaaggaatgtggagctcttcatcgccacctcccagaagtttgtccaggagacagagctgagccagcgcatcagggactgggaggacacagtgcagcctctgctccaggagcaggagcagcatgtgccctttgacatccacacctatggggaccagctggtctcacggttcccccagctcaatgagtggtgtccctttgcggagctggtggctggccagccggccttcgaggtgtgtcgttccatgctggcctccctgcagctggccaatgactacacagtggagataacccagcagcccgggctggagatggccgtggacaccatgtccctgagactgctcacgcaccagcgagcgcacaagcgcttccagacctacgctgccccctccatggcccagccctgagtggggagcaccgaggcaggggtgggggaatgtgtactgaggagccgtgcgtctgctcctggctggcccggcctaataaagcagtgttgccatctcatcttccccctaaaaacccttttatgtacacctgcgcagagaagagggctgcctggcctccctgggccgctggtacagatcacacacacacacagattaaacgcagcccgtttaatgatggggcccagactgcagtggctcaagacaggacactgcggaaagccgccatgtgccgccgcacactgtctgagatctgctcagccgatctgctccggccgtagtaatccgtgaagaggccgtcagggttgagcaggtagatggcaatggagtggtccacgatgtagtcctggtcctcatccttggggcctgcattgtagtacacgcggtaactgtgactagcctgggcaacctgtttggtggagccggtcagacccaacagtcttgggtggaagtcctggacgtagcgggccatggcttcaacgtcgtcccgctcggggtccacagtgatgaagacaggctgcactggaggcaaaccaggctctgcttccagctgccgcaccacctgcaccagcttctccagctcgtctgggcagatgtcagggcagtgagtgaagccaaagtacatcagcacccactggccccggaagtcagccttgcagcgagcccggcctctgtgatccagcaggtggaagtcgccctggcccacagctgcctggcgcagggcttctgttcgcttttgctgctgcagcctctccttctcagccctcagggccagccaggccccaccgagtccagccccgaacaggcctgtgatcagcagccgggttcgaagcccagggccctggggctggccctgcccacctgtctctgcagggccctgccttgacaaaagccaggacctcagatgcagggcctggcctcccagggtcccagggaggaccggaggcttgagctgagagagcctgtgccaagctgtggggctccgagtcagcagcagcatggatctgatgctcctggaaacaagcacaggcgtcaggagccagaagggaaggcccaggacagtgcctgggctgcccctgcgacttgagaccagccacccatctgaaggacccagcccacgttcaggcttaacaggcatttgcagctgctcacctgagctcagaactccacctccaccaaacatccacacctgggcaaccacacctgtcactcctgtcctctacctgggatcaccagcctgtcaccgcaccctgccctgcacctgcacctcagcaaggtgaacctcttgctgacggaaagcattccaagtgcatgccttgcctgaactaaccacgttatctatttgcaataaacccatttcttaaaagga

SEQ ID NO: 368041 - DNA, 1526 bp, Homo sapiens
cgcgacgccgcgcctacgcattttcctgggcgggaacagcaaaatggcgccagaactagtggcgggctgaggacgccgtacccctcggaaggcagccctgcggtccctttgccgcccgttccctcccggacatggaggacgtggaggcgcgcttcgcccacctcttgcagcccatccgcgacctcaccaagaactgggaggtggacgtggcggcccagctgggcgagtatctggaggagctggatcagatctgcatttcttttgacgaaggcaagaccacaatgaacttcattgaggcagcgttgttgatccagggctctgcctgcgtctacagtaagaaggtggaatacctctactcactcgtctaccaggcccttgatttcatctctggaaagaggcgggccaagcagctctcttcggtgcaggaggacagggccaatggggttgccagctccggggtcccccaggaggcagagaatgagttcctgtcgctggatgacttccctgactcccggactaacgtggatctcaagaatgatcagacgcccagtgaggtcctcatcatccccctcctgcccatggccctggtggcccctgatgaaatggagaagaacaacaatcccctgtacagccgtcagggtgaggtcctggccagccggaaggatttcaggatgaacacgtgcgttccccaccccagaggggccttcatgttggagccagagggcatgtcccccatggaaccagcgggcgtttcccccatgccagggacccagaaggacaccgggaggactgaggagcagccaatggaagtttccgtgtgcaggagccctgtcccagcactcggcttctcccaggagccaggcccctctccagaaggcccgatgcccctgggtgggggcgaggacgaggatgcagaggaggcagtagagcttcctgaggcctcggcccccaaggccgctctggagcccaaggagtccaggagcccgcagcaggtgggacccacatggaggcctgcagaacctgagctgtgaactggcaaccctggctctggggccgagtcaccttgcacaaggaggacagtggtatggccttggccccagaccactggtctggggcagaagcccacctgtcttgcagcccgtcctgcaaccagcccttttgaagagcagcttctgtgttcctcccctctctgagcagaactgatgctcctcagagtagtgggctggcgtccaaggatttgagccctgtcgagctcacggcaacctgggatggccgccggttgccaaggcgcctctctgcagtcgggctggtaggagggagtgtctggaggccattgctgcctccctcaacccccggggtcaactgtacccagcctagagccaagaaatccttcctttttattcattaaaacaaaatcacctgatgcatacagaggaaatgttaacgtttcttcactctagttggtagatggcatggatatttgtcatattctattcatttttcctagttttgaagaagagtacccc

SEQ ID NO: 368042 - DNA, 2672 bp, Homo sapiens
ttcaagcgattctcctgcctcggcctcccgagtaggtgggattacaggtgtgcgccaccacacccggctaattttttttgcatttttagtagaggcgggggtttcaccatgttggccaggctggtctcaaactcttgacctcgggtgatctgcccgccttggcctcccaaagtgctgggattacaggcatgagccaccacgcccgacccttgtagggttcttgatgttaacccaaggtggagttcctggggtacccagagccttgaggggagaaagaggagaagtggggaccctgtgactgtctttgcagagtgctgccctgcccaggaggtacatgctgcgggagcgggagggggccccagagcctgcatcctgcgtgaaggagactccagacccctggcagagcctggacccctttgactccttggagtctaagcccttcaagaaaggtaggccttactctgtgcccccctgtgtggaggaggctctgggacagaagcgcaagaggaagggcgctgccaagctgcaggacttccaccagtggtacctggctgcctatgcagaccatgccgacagcaggcggcttcggcgaaagggtccgtcctttgcagacatggaggtcctgtactggacacacgtgaaggagcagttggaaactctccggaagctgcagaggagggaggtggctgagcagtggctgcggcctgcagaggaggaccacctggaggattccctggaagacctgggggcagcagatgactttctagagcctgaggagtacatggagcccgagggagcagaccccagggaagccgctgaccttgacgcagtgccgatgtccctgagctacgaggagctggttcgaaggaatgtggagctcttcatcgccacctcccagaagtttgtccaggagacagagctgagccagcgcatcagggactgggaggacacagtgcagcctctgctccaggagcaggagcagcatgtgccctttgacatccacacctatggggaccagctggtctcacggttcccccagctcaatgagtggtgtccctttgcggagctggtggctggccagccggccttcgaggtgtgtcgttccatgctggcctccctgcagctggccaatgactacacagtggagataacccagcagcccgggctggagatggccgtggacaccatgtccctgagactgctcacgcaccagcgagcgcacaagcgcttccagacctacgctgccccctccatggcccagccctgagtggggagcaccgaggcaggggtgggggaatgtgtactgaggagccgtgcgtctgctcctggctggcccggcctaataaagcagtgttgccatctcatcttccccctaaaaacccttttatgtacacctgcgcagagaagagggctgcctggcctccctgggccgctggtacagatcacacacacacacagattaaacgcagcccgtttaatgatggggcccagactgcagtggctcaagacaggacactgcggaaagccgccatgtgccgccgcacactgtctgagatctgctcagccgatctgctccggccgtagtaatccgtgaagaggccgtcagggttgagcaggtagatggcaatggagtggtccacgatgtagtcctggtcctcatccttggggcctgcattgtagtacacgcggtaactgtgactagcctgggcaacctgtttggtggagccggtcagacccaacagtcttgggtggaagtcctggacgtagcgggccatggcttcaacgtcgtcccgctcggggtccacagtgatgaagacaggctgcactggaggcaaaccaggctctgcttccagctgccgcaccacctgcaccagcttctccagctcgtctgggcagatgtcagggcagtgagtgaagccaaagtacatcagcacccactggccccggaagtcagccttgcagcgagcccggcctctgtgatccagcaggtggaagtcgccctggcccacagctgcctggcgcagggcttctgttcgcttttgctgctgcagcctctccttctcagccctcagggccagccaggccccaccgagtccagccccgaacaggcctgtgatcagcagccgggttcgaagcccagggccctggggctggccctgcccacctgtctctgcagggccctgccttgacaaaagccaggacctcagatgcagggcctggcctcccagggtcccagggaggaccggaggcttgagctgagagagcctgtgccaagctgtggggctccgagtcagcagcagcatggatctgatgctcctggaaacaagcacaggcgtcaggagccagaagggaaggcccaggacagtgcctgggctgcccctgcgacttgagaccagccacccatctgaaggacccagcccacgttcaggcttaacaggcatttgcagctgctcacctgagctcagaactccacctccaccaaacatccacacctgggcaaccacacctgtcactcctgtcctctacctgggatcaccagcctgtcaccgcaccctgccctgcacctgcacctcagcaaggtgaacctcttgctgacggaaagcattccaagtgcatgccttgcctgaactaaccacgttatctatttgcaataaacccatttcttaaaagga

SEQ ID NO: 368043 - DNA, 702 bp, Homo sapiens
cgcgacgccgcgcctacgcattttcctgggcgggaacagcaaaatggcgccagaactagtggcgggctgaggacgccgtacccctcggaaggcagccctgcggtccctttgccgcccgttccctcccggacatggaggacgtggaggcgcgcttcgcccacctcttgcagcccatccgcgacctcaccaagaactgggaggtggacgtggcggcccagctgggcgagtatctggaggagctggatcagatctgcatttcttttgacgaaggcaagaccacaatgaacttcattgaggcagcgttgttgatccagggctctgcctgcgtctacagtaagaaggtggaatacctctactcactcgtctaccaggcccttgatttcatctctggaaagaggcgggccaagcagctctcttcggtgcaggaggacagggccaatggggttgccagctccggggtcccccaggaggcagagaatgagttcctgtcgctggatgacttccctgactcccggactaacgtggatctcaagaatgatcagacgcccagtgtgagtcctggcctggcccctcccctccatggcccagccctgagtggggagcaccgaggcaggggtgggggaatgtgtactgaggagccgtgcgtctgctcctggctggcccggcctaataaagcagtgttgccatctcatcttcccccta

SEQ ID NO: 368044 - DNA, 1280 bp, Homo sapiens
taactatcacctttatttcaagacaatttacttgtgtcacaactcttaatatattgtctctcctcagcaggttaaagctgcaagtttctttcctggacaatggcaaatcctccaattctaagagagaaaaaagacagagagataggagagagaaagagaagagagtttacatttgaaaatacattccatatgaaagaacaataagagagaatattgcagctttatacaaaagggtcaagaaacatgaaattgaactacagaaaaagcagaacaattaagccacgttgccaaatcttcagagcccttgcctgcccggaggggctggcatctcacacgaaaataaactttcttcttagtcagtgggccaccagagtttgattaaagagcagggctttcaccagcaagaagcagagtgggtcgttaatgtaacacaatgaaccagtacaaacaaaaaggcacttgagaggacatagactagccagtgccaaggatttgtgtttttgttgttgcggttgtcagcagtatacccagtggccagccgtgttcagggatggcaccgttttctgtatggagttcacaagcacgaggtttagtacaacaccggaaaaacagcaagaaaactggacagtattgcttcgtaaacagagctgacacactacaccagtactgaggctacagtactttaaaaagaaaacagcctaatccttctttgcctatgcacgacgcgggcaattatacacaagtacaacttcaggagtccactgaaatgcggtgattctagtatattctgggcactgggtttcaggtagcatgtccatccaaagggccacacggaatacgcttggtgccagcatcttggatttcgctcagtttccaaaaagaatccacaaaggggagaggagagagagagagaggggcaggaggggtcgaaatgaatgattatgtcaatcatacttggtctcaacaccagcatctgattattcaaatgaaaccaacaggaaaaaagctgactgcacatgagtccgatggtgaacacagctccttgtccatgtctgtcggccatactcattgaagctcctgagaaaagcctggctcagtggtcatcaacacacttcccagcctgtatagtgaaagatcaacagctccccagctcactcccgtccttccacttccgtcctttgactgtcttttcatctctgtctgccttcatgcctccgaataagtactctgtgtattcagtttgtcttttttcaacttcacaccatccacaagttcaaagt

SEQ ID NO: 368045 - DNA, 2819 bp, Homo sapiens
tgtcacttcattactgtgctcttcgtctggcttcgcttctctctttcgttctgtcgtctcgcttttttcttctctctctgggcctctctttcctcttttttctgtttctttttcctttttgattggtttcttgtgtttttttctttgttttttgtttttttttgtgttattttatgaaaatgtttaattcaactgtttctttggaatgtagtagtcatagtttggaatttaagttacagttcagttctatgtggtttttatgctactcagtgtctgagaatacaaatgtcatttaaagttaaggcttcgctgttcattttgaaacaacaatttacaagtgtcatattgtcatagaaaataataatttctgtaaaaaaaatctgcacaaaatcttatgatggtacaaaacatgaagcaataatataccagtaaaatgaaaacattttactacagaaagttttatagatttccataaagaaaaaatatgttattttacacctttaaaaattacaaaacaatctaaaacaatataaactgaacattttgtaacactgcctttacaaattaataactttataaacatataatttttaaatatatttatcagtgcaagatactttaaattttaaagttgcagtatcatttttccttggctgaggacaactttaagtctgttgcctttaaaaacaacaaacgagtgtttcttagtgctttccttctggtaggattatatcaactaaatgaatgtctctggggacaaaaaactattcttctttcatggtgatcaatattttcctggaaacaaaaggcattctcaatccaatttaactaagatgaatggactgtctcgtctatgatgcaaatgtgactcccaacaaatgtctttgagtgagacgtctagcaatgtgggaaggaagatctaaaaaatctcatgtccaacatggcatgataaaaatccaccaaaaccaaccaaagcttctttgggttaattcataggctgcctggtaagatatttgcttccctgtgctgttagaggcttagatgttgccagccctaaggcaggcttattctttgtgagccgctggaagtttctagaagcattcatttaagtctattttttcaaggttgctgttatgaatttttaaaacatttgtttgactttatgtgtttttccccctcttatcttaaaatacttgacccccaggcatcaggatttatagtttcattcttaaattaactgttcttccttccacttcccttgtgtgactcagtagcaaaataagaaagttctcttgggtcatttttgcatatttggatagaaaaatctcatgcttttggatttggaagattttatccagttcttcctttgggtctcacttgaaagccaatttgtattatttctttcctcaacttatcactatttctactaaatgccaacatttctatcaaaggtcattttgaatagaatagataaggaaaaaagatactgtcactttaaccagttaacaagaaaaccaaagttagactttggagggcaaagttaggaatttcccttatttatttatttttaaacataaagtctagtaaaatcgtttgccattcccagcaggttaaagctgcaagtttctttcctggacaatggcaaatcctccaattctaagagagaaaaaagacagagagataggagagagaaagagaagagagtttacatttgaaaatacattccatatgaaagaacaataagagagaatattgcagctttatacaaaagggtcaagaaacatgaaattgaactacagaaaaagcagaacaattaagccacgttgccaaatcttcagagcccttgcctgcccggaggggctggcatctcacacgaaaataaactttcttcttagtcagtgggccaccagagtttgattaaagagcagggctttcaccagcaagaagcagagtgggtcgttaatgtaacacaatgaaccagtacaaacaaaaaggcacttgagaggacatagactagccagtgccaaggatttgtgtttttgttgttgcggttgtcagcagtatacccagtggccagccgtgttcagggatggcaccgttttctgtatggagttcacaagcacgaggtttagtacaacaccggaaaaacagcaagaaaactggacagtattgcttcgtaaacagagctgacacactacaccagtactgaggctacagtactttaaaaagaaaacagcctaatccttctttgcctatgcacgacgcgggcaattatacacaagtacaacttcaggagtccactgaaatgcggtgattctagtatattctgggcactgggtttcaggtagcatgtccatccaaagggccacacggaatacgcttggtgccagcatcttggatttcgctcagtttccaaaaagaatccacaaaggggagaggagagagagagagaggggcaggaggggtcgaaatgaatgattatgtcaatcatacttggtctcaacaccagcatctgattattcaaatgaaaccaacaggaaaaaagctgactgcacatgagtccgatggtgaacacagctccttgtccatgtctgtcggccatactcattgaagctcctgagaaaagcctggctcagtggtcatcaacacacttcccagcctgtatagtgaaagatcaacagctccccagctcactcccgtccttccacttccgtcctttgactgtcttttcatctctgtctgccttcatgcctccgaataagtactctgtgtattcagtttgtcttttttcaacttcacaccatccacaagttcaaagt

SEQ ID NO: 368046 - DNA, 1808 bp, Homo sapiens
tgtcacttcattactgtgctcttcgtctggcttcgcttctctctttcgttctgtcgtctcgcttttttcttctctctctgggcctctctttcctcttttttctgtttctttttcctttttgattggtttcttgtgtttttttctttgttttttgtttttttttgtgttattttatgaaaatgtttaattcaactgtttctttggaatgtagtagtcatagtttggaatttaagttacagttcagttctatgtggtttttatgctactcagtgtctgagaatacaaatgtcatttaaagttaaggcttcgctgttcattttgaaacaacaatttacaagtgtcatattgtcatagaaaataataatttctgtaaaaaaaatctgcacaaaatcttatgatggtacaaaacatgaagcaataatataccagtaaaatgaaaacattttactacagaaagttttatagatttccataaagaaaaaatatgttattttacacctttaaaaattacaaaacaatctaaaacaatataaactgaacattttgtaacactgcctttacaaattaataactttataaacatataatttttaaatatatttatcagtgcaagatactttaaattttaaagttgcagtatcatttttccttggctgaggacaactttaagtctgttgcctttaaaaacaacaaacgagtgtttcttagtgctttccttctggtaggattatatcaactaaatgaatgtctctggggacaaaaaactattcttctttcatggtgatcaatattttcctggaaacaaaaggcattctcaatccaatttaactaagatgaatggactgtctcgtctatgatgcaaatgtgactcccaacaaatgtctttgagtgagacgtctagcaatgtgggaaggaagatctaaaaaatctcatgtccaacatggcatgataaaaatccaccaaaaccaaccaaagcttctttgggttaattcataggctgcctggtaagatatttgcttccctgtgctgttagaggcttagatgttgccagccctaaggcaggcttattctttgtgagccgctggaagtttctagaagcattcatttaagtctattttttcaaggttgctgttatgaatttttaaaacatttgtttgactttatgtgtttttccccctcttatcttaaaatacttgacccccaggcatcaggatttatagtttcattcttaaattaactgttcttccttccacttcccttgtgtgactcagtagcaaaataagaaagttctcttgggtcatttttgcatatttggatagaaaaatctcatgcttttggatttggaagattttatccagttcttcctttgggtctcacttgaaagccaatttgtattatttctttcctcaacttatcactatttctactaaatgccaacatttctatcaaaggtcattttgaatagaatagataaggaaaaaagatactgtcactttaaccagttaacaagaaaaccaaagttagactttggagggcaaagttaggaatttcccttatttatttatttttaaacataaagtctagtaaaatcgtttgccattcccagcgagtgatgtataaacacgtgacatagatctttctatgcactgccacaaaggacttatctctccccacttttcgagagacgccggacgatctatgtatgtagatgagtgagaaatcaagacgaatgaagccgatggtacatggagctcattacagtttccatactatagagcacgatcagagagcatactggcaccgcgata

SEQ ID NO: 368047 - DNA, 321 bp, Homo sapiens
ttttttcttagaaactggacattgtagatatattgtagcagctcctagctctgcgtctcctctgtggcttgttactttcatttgccagtttgtttagtgactggctgaattattttagtaaagtctattatgtcccccagcccccaccgttgttccttagggaagcacagttttgggtctgccccagtcacgctgggagaacaatggttttggtagggcccccttcctgtctttccttgcccatgcccagctgttaaacttcactatttgctggctgattattgttttcaacaatgtcctggggtataaattgctttacaa

SEQ ID NO: 368048 - DNA, 291 bp, Homo sapiens
tactactaaattcgcggccgcgtcgacagaaaatttaaagccctttgcattttaagaaggttgtgtgcttgtagtaataacttacacttctgttgttgaattgatggcagttaaatgcttatttggatacattaagcagacataaagaaatacagacttttagcctggcatgttggcttgtgcctataatcccagctattcaggaggctgaagtgggaagatggcttgaagccaggaattcaagaccagtctgggcaacatagtaagactctgtctctgaaaaaaaaaaaa

SEQ ID NO: 368049 - DNA, 507 bp, Homo sapiens
actcttatttcatataaggagaaagtgcagtatggaaagtgtaaatgacttaagcatgaaatcactgacaggtctgtgaatgtctgttagaacaagattgtgagaatggtgaaagattgaagagtttgattagatctatttaattctgttagtagaccacaatttttgtgaaaattttaagaactattacagagcttccgtgttttatttaaaacgattaataaaaatggaaagtggtacatgagaaaatttaaagccctttgcattttaagaaggttgtgtgcttgtagtaataacttacacttctgttgttgaattgatggcagttaaatgcttatttggatacattaagcagacataaagaaatacagacttttagcctggcatgttggcttgtgcctataatcccagctattcaggaggctgaagtgggaagatggcttgaagccaggaattcaagaccagtctgggcaacatagtaagactctgtctctgaaaaaaaaaaaa

SEQ ID NO: 368050 - DNA, 1942 bp, Homo sapiens
ggggggccgtgcggacctggggaagaggattccaaacagaaaaatgccaagcatcacttttaaacttctggaacccgcctaccactgcccaagtcacgattgaagccgagccaaccaaagtttccaaggggaaggacgttcttctacttgtccacaatttgccccagaatcttgctggctacatctggtacaaagggcaaatgaaggacctctaccattacattacatcatacgtagtagatggtcaaataattatatatgggcctgcatacagtggacgagaaacagtatattccaatgcatccctgctgatccagaatgtcacccgggaggacgcaggatcctacaccttacacatcgtaaagcgaggtgatgggactagaggagaaactggacatttcaccttcaccttataccgtcattccttggactctgctctatctttagaggtcactggctcaagtcagccactatgagacacctgggaaaactgccccaccttgtggctccactgcctgatgactgaactgacctccggacttgactctgttctcccctgtgttatttctgctgaagtacccagtcccaggtcaggctttccagtatccaaagggtttaaagacaattggaagttccatcacccatctctaggatgtccttggcaagggaagctgcagagaaaacatacctcgggcggcaaagtaagactgaaactaagaagattccagcactgcatgctccaagtgaggaccacaagtggagactcccaagccctccatctccagcagcaacttataccccagggaggacatggaggctgtgagcttaacctgtgatcctgagactccggacgcaagctacctgtggtggatgaatggtcagagcctccctatgactcacagcttgcagttgtccaaaaacaaaaggaccctctttctatttggtgtcacaaagtacactgcaggaccctatgaatgtgaaatacggaacccagtgagtgccagccgcagtgacccagtcaccctgaatctcctcccgaagctgcccaagccctacatcaccatcaacaacttaaaccccagggagaataaggatgtcttagccttcacctgtgaacctaagagtgagaactacacctacatttggtggctaaatggtcagagcctcccggtcagtcccagggtaaagcgacccattgaaaacaggatcctcattctacccagtgtcacgagaaatgaaacaggaccctatcaatgtgaaatacaggaccgatatggtggcatccgcagttacccagtcaccctgaatgtcctctattactacaaagcatagcgggctctatgcttgctctgttcgtaactcagccactggcatggaaagctccaaatccatgacagtcaaagtctctgctccttcaggaacaggacatcttcctggccttaatccattatagcagccgtgatgtcatttctgtatttcaggaagactggcagacagttgctttcattcttcctcaaagtatttaccatcagctacagtccaaaattgctttttgttcaaggagatttatgaaaagactctgacaaggactcttgaatacaagttcctgataacttcaagatcataccactggactaagaactttcaaaattttaatgaacaggctgatacttcatgaaattcaagacaaagaaaaaaacccaattttattggactaaatagtcaaaacaatgttttcataattttctatttgaaaatgtgctgattctttgaatgttttattctccagatttatgcactttttttcttcagcaattggtaaagtatacttttgtaaacaaaaattgaaacatttgcttttgctccctaagtgccccagaattgggaaactattcaggagtattcatatgtttatggtaataaagttatctgcacaagttca

SEQ ID NO: 368051 - DNA, 2278 bp, Homo sapiens
  misc_feature (2021)..(2021): n is a, c, g, or t
gggcgggacaactggtctgagtactatggctgattttcgctgtctggcattgagaagccacacgccccttttgcttaggaggcctctctgctggaggatgacgatggcatggtttatctaaggccactgacaagtcatcaatatagggaaggacagcacagctgagagccatgctcaggaagtttctggatcctaggctcagctccacagaggagaacacgcaggcagcagagaccatggggcccctctcagcccctccctgcacacagcgcatcacctggaaggggctcctgctcacagcatcacttttaaacttctggaacccgcctaccactgcccaagtcacgattgaagccgagccaaccaaagtttccaaggggaaggacgttcttctacttgtccacaatttgccccagaatcttgctggctacatctggtacaaagggcaaatgaaggacctctaccattacattacatcatacgtagtagatggtcaaataattatatatgggcctgcatacagtggacgagaaacagtatattccaatgcatccctgctgatccagaatgtcacccgggaggacgcaggatcctacaccttacacatcgtaaagcgaggtgatgggactagaggagaaactggacatttcaccttcaccttatacctggagactcccaagccctccatctccagcagcaacttataccccagggaggacatggaggctgtgagcttaacctgtgatcctgagactccggacgcaagctacctgtggtggatgaatggtcagagcctccctatgactcacagcttgcagttgtccaaaaacaaaaggaccctctttctatttggtgtcacaaagtacactgcaggaccctatgaatgtgaaatacggaacccagtgagtgccagccgcagtgacccagtcaccctgaatctcctcccgaagctgcccaagccctacatcaccatcaacaacttaaaccccagggagaataaggatgtcttagccttcacctgtgaacctaagagtgagaactacacctacatttggtggctaaatggtcagagcctcccggtcagtcccagggtaaagcgacccattgaaaacaggatcctcattctacccagtgtcacgagaaatgaaacaggaccctatcaatgtgaaatacaggaccgatatggtggcatccgcagttacccagtcaccctgaatgtcctctatggtccagacctccccagaatttacccttcattcacctattaccattcaggagaaaacctctacttgtcctgcttcgcggactctaacccaccagcagaatattcttggacaattaatgggaagtttcagctatcaggacaaaagctctttatcccccagattactacaaagcatagcgggctctatgcttgctctgttcgtaactcagccactggcatggaaagctccaaatccatgacagtcaaagtctctgctccttcaggaacaggacatcttcctggccttaatccattatagcagccgtgatgtcatttctgtatttcaggaagactggcagacagttgctttcattcttcctcaaagtatttaccatcagctacagtccaaaattgctttttgttcaaggagatttatgaaaagactctgacaaggactcttgaatacaagttcctgataacttcaagatcataccactggactaagaactttcaaaattttaatgaacaggctgatacttcatgaaattcaagacaaagaaaaaaacccaattttattggactaaatagtcaaaacaatgttttcataattttctatttgaaaatgtgctgattctttgaatgttttattctccagatttatgcactttttttcttcagcaattggtaaagtatacttttgtaaacaaaaattgaaacatttgcttttgctccctaagtgccccagaattgggaaactattcaggagtattcatatgtttatggtaataaagttatctgcacaagttcaaaaaaaaanaaaaaaaaaaaaagaaaagcaacgacatacaacatcaatcacaccacaaacatgaaaacagacgcaagacaaagaaacgcagaaacacgaagacaacaaacgacgacagacacggcacacgagacaaacaacgatgacggcgcggcaggccagacgatcgatataataacggccaggccgcgacccatgtgagacacgagcgtccgccacgccacagccacgagaggatctaccacaaacgggcgcgcaccagaagt

SEQ ID NO: 368052 - DNA, 1348 bp, Homo sapiens
cctggctcttaactagggcagttgagaggcagatcatcatgcctctactttcttagcagagacaaggaagactgtgactgtatttcctaagttcagagccaggcctggctctgaacttaggggtcagagcctccctatgactcacagcttgcagttgtccaaaaacaaaaggaccctctttctatttggtgtcacaaagtacactgcaggaccctatgaatgtgaaatacggaacccagtgagtgccagccgcagtgacccagtcaccctgaatctcctcccgaagctgcccaagccctacatcaccatcaacaacttaaaccccagggagaataaggatgtcttagccttcacctgtgaacctaagagtgagaactacacctacatttggtggctaaatggtcagagcctcccggtcagtcccagggtaaagcgacccattgaaaacaggatcctcattctacccagtgtcacgagaaatgaaacaggaccctatcaatgtgaaatacaggaccgatatggtggcatccgcagttacccagtcaccctgaatgtcctctatggtccagacctccccagaatttacccttcattcacctattaccattcaggagaaaacctctacttgtcctgcttcgcggactctaacccaccagcagaatattcttggacaattaatgggaagtttcagctatcaggacaaaagctctttatcccccagattactacaaagcatagcgggctctatgcttgctctgttcgtaactcagccactggcatggaaagctccaaatccatgacagtcaaagtctctgctccttcaggaacaggacatcttcctggccttaatccattatagcagccgtgatgtcatttctgtatttcaggaagactggcagacagttgctttcattcttcctcaaagtatttaccatcagctacagtccaaaattgctttttgttcaaggagatttatgaaaagactctgacaaggactcttgaatacaagttcctgataacttcaagatcataccactggactaagaactttcaaaattttaatgaacaggctgatacttcatgaaattcaagacaaagaaaaaaacccaattttattggactaaatagtcaaaacaatgttttcataattttctatttgaaaatgtgctgattctttgaatgttttattctccagatttatgcactttttttcttcagcaattggtaaagtatacttttgtaaacaaaaattgaaacatttgcttttgctccctaagtgccccagaattgggaaactattcaggagtattcatatgtttatggtaataaagttatctgcacaagttca

SEQ ID NO: 368053 - DNA, 1303 bp, Homo sapiens
tgactcacagcttgaagctgtccgaaaccaacaggaccctctttctattgggtgtcacaaagtatactgcaggaccggtcagagcctccctatgactcacagcttgcagttgtccaaaaacaaaaggaccctctttctatttggtgtcacaaagtacactgcaggaccctatgaatgtgaaatacggaacccagtgagtgccagccgcagtgacccagtcaccctgaatctcctcccgaagctgcccaagccctacatcaccatcaacaacttaaaccccagggagaataaggatgtcttagccttcacctgtgaacctaagagtgagaactacacctacatttggtggctaaatggtcagagcctcccggtcagtcccagggtaaagcgacccattgaaaacaggatcctcattctacccagtgtcacgagaaatgaaacaggaccctatcaatgtgaaatacaggaccgatatggtggcatccgcagttacccagtcaccctgaatgtcctctatggtccagacctccccagaatttacccttcattcacctattaccattcaggagaaaacctctacttgtcctgcttcgcggactctaacccaccagcagaatattcttggacaattaatgggaagtttcagctatcaggacaaaagctctttatcccccagattactacaaagcatagcgggctctatgcttgctctgttcgtaactcagccactggcatggaaagctccaaatccatgacagtcaaagtctctgctccttcaggaacaggacatcttcctggccttaatccattatagcagccgtgatgtcatttctgtatttcaggaagactggcagacagttgctttcattcttcctcaaagtatttaccatcagctacagtccaaaattgctttttgttcaaggagatttatgaaaagactctgacaaggactcttgaatacaagttcctgataacttcaagatcataccactggactaagaactttcaaaattttaatgaacaggctgatacttcatgaaattcaagacaaagaaaaaaacccaattttattggactaaatagtcaaaacaatgttttcataattttctatttgaaaatgtgctgattctttgaatgttttattctccagatttatgcactttttttcttcagcaattggtaaagtatacttttgtaaacaaaaattgaaacatttgcttttgctccctaagtgccccagaattgggaaactattcaggagtattcatatgtttatggtaataaagttatctgcacaagttca

SEQ ID NO: 368054 - DNA, 1102 bp, Homo sapiens
tctgcaggacctgtgcagacacctgcatttcctcccgaagctgcccaagccctacatcaccatcaacaacttaaaccccagggagaataaggatgtcttagccttcacctgtgaacctaagagtgagaactacacctacatttggtggctaaatggtcagagcctcccggtcagtcccagggtaaagcgacccattgaaaacaggatcctcattctacccagtgtcacgagaaatgaaacaggaccctatcaatgtgaaatacaggaccgatatggtggcatccgcagttacccagtcaccctgaatgtcctctatggtccagacctccccagaatttacccttcattcacctattaccattcaggagaaaacctctacttgtcctgcttcgcggactctaacccaccagcagaatattcttggacaattaatgggaagtttcagctatcaggacaaaagctctttatcccccagattactacaaagcatagcgggctctatgcttgctctgttcgtaactcagccactggcatggaaagctccaaatccatgacagtcaaagtctctgctccttcaggaacaggacatcttcctggccttaatccattatagcagccgtgatgtcatttctgtatttcaggaagactggcagacagttgctttcattcttcctcaaagtatttaccatcagctacagtccaaaattgctttttgttcaaggagatttatgaaaagactctgacaaggactcttgaatacaagttcctgataacttcaagatcataccactggactaagaactttcaaaattttaatgaacaggctgatacttcatgaaattcaagacaaagaaaaaaacccaattttattggactaaatagtcaaaacaatgttttcataattttctatttgaaaatgtgctgattctttgaatgttttattctccagatttatgcactttttttcttcagcaattggtaaagtatacttttgtaaacaaaaattgaaacatttgcttttgctccctaagtgccccagaattgggaaactattcaggagtattcatatgtttatggtaataaagttatctgcacaagttca

SEQ ID NO: 368055 - DNA, 1667 bp, Homo sapiens
  misc_feature (45)..(45): n is a, c, g, or t
agagaattatgacaggtttgagaactaagtgaaccgtatgccatncatgaaaagaaagaagaggtatgagattaggggagaaaagagggagacaaaaataattcagtttgcacatgtttagtttcagatgccattaagacttctatcttctatgggccaatgtgcgtaaaacatccccctccccccacagagagagcgtcgacgatctatgggggcaaagtaggatggaatttggaaggggcccaccagttgcacattccaggtaaggaacccagggtgagccagccagtcaactgattatggagggactgggaggggtaccaggggctgtgactcccattgacgtgtctgtccatgacccaacactgctgctcaattgacacttgagaaagtctgtgcttccctaagacagagcagctggcctcacagtctttgagcccttagatcatcatgcatctgtcttgtgacacacgcaccagctattggctttcaaggactcgggtgggctgagaggtgggagatgccaactctgattgaaggatgccagtggaggaatcaaaggtgccacacaggacaatcttctctctgttatccacacagcgaagctgcccaagccctacatcaccatcaacaacttaaaccccagggagaataaggatgtcttagccttcacctgtgaacctaagagtgagaactacacctacatttggtggctaaatggtcagagcctcccggtcagtcccagggtaaagcgacccattgaaaacaggatcctcattctacccagtgtcacgagaaatgaaacaggaccctatcaatgtgaaatacaggaccgatatggtggcatccgcagttacccagtcaccctgaatgtcctctatggtccagacctccccagaatttacccttcattcacctattaccattcaggagaaaacctctacttgtcctgcttcgcggactctaacccaccagcagaatattcttggacaattaatgggaagtttcagctatcaggacaaaagctctttatcccccagattactacaaagcatagcgggctctatgcttgctctgttcgtaactcagccactggcatggaaagctccaaatccatgacagtcaaagtctctgctccttcaggaacaggacatcttcctggccttaatccattatagcagccgtgatgtcatttctgtatttcaggaagactggcagacagttgctttcattcttcctcaaagtatttaccatcagctacagtccaaaattgctttttgttcaaggagatttatgaaaagactctgacaaggactcttgaatacaagttcctgataacttcaagatcataccactggactaagaactttcaaaattttaatgaacaggctgatacttcatgaaattcaagacaaagaaaaaaacccaattttattggactaaatagtcaaaacaatgttttcataattttctatttgaaaatgtgctgattctttgaatgttttattctccagatttatgcactttttttcttcagcaattggtaaagtatacttttgtaaacaaaaattgaaacatttgcttttgctccctaagtgccccagaattgggaaactattcaggagtattcatatgtttatggtaataaagttatctgcacaagttca

SEQ ID NO: 368056 - DNA, 1573 bp, Homo sapiens
gggcgggacaactggtctgagtactatggctgattttcgctgtctggcattgagaagccacacgccccttttgcttaggaggcctctctgctggaggatgacgatggcatggtttatctaaggccactgacaagtcatcaatatagggaaggacagcacagctgagagccatgctcaggaagtttctggatcctaggctcagctccacagaggagaacacgcaggcagcagagaccatggggcccctctcagcccctccctgcacacagcgcatcacctggaaggggctcctgctcacagcatcacttttaaacttctggaacccgcctaccactgcccaagtcacgattgaagccgagccaaccaaagtttccaaggggaaggacgttcttctacttgtccacaatttgccccagaatcttgctggctacatctggtacaaagggcaaatgaaggacctctaccattacattacatcatacgtagtagatggtcaaataattatatatgggcctgcatacagtggacgagaaacagtatattccaatgcatccctgctgatccagaatgtcacccgggaggacgcaggatcctacaccttacacatcgtaaagcgaggtgatgggactagaggagaaactggacatttcaccttcaccttatacctggagactcccaagccctccatctccagcagcaacttataccccagggaggacatggaggctgtgagcttaacctgtgatcctgagactccggacgcaagctacctgtggtggatgaatatggtccagacctccccagaatttacccttcattcacctattaccattcaggagaaaacctctacttgtcctgcttcgcggactctaacccaccagcagaatattcttggacaattaatgggaagtttcagctatcaggacaaaagctctttatcccccagattactacaaagcatagcgggctctatgcttgctctgttcgtaactcagccactggcatggaaagctccaaatccatgacagtcaaagtctctgctccttcaggaacaggacatcttcctggccttaatccattatagcagccgtgatgtcatttctgtatttcaggaagactggcagacagttgctttcattcttcctcaaagtatttaccatcagctacagtccaaaattgctttttgttcaaggagatttatgaaaagactctgacaaggactcttgaatacaagttcctgataacttcaagatcataccactggactaagaactttcaaaattttaatgaacaggctgatacttcatgaaattcaagacaaagaaaaaaacccaattttattggactaaatagtcaaaacaatgttttcataattttctatttgaaaatgtgctgattctttgaatgttttattctccagatttatgcactttttttcttcagcaattggtaaagtatacttttgtaaacaaaaattgaaacatttgcttttgctccctaagtgccccagaattgggaaactattcaggagtattcatatgtttatggtaataaagttatctgcacaagttca

SEQ ID NO: 368057 - DNA, 843 bp, Homo sapiens
gggcaggtacgggatggtggggatcgaggttacccagtcaccctgaatgtcctctatggtccagacctccccagaatttacccttcattcacctattaccattcaggagaaaacctctacttgtcctgcttcgcggactctaacccaccagcagaatattcttggacaattaatgggaagtttcagctatcaggacaaaagctctttatcccccagattactacaaagcatagcgggctctatgcttgctctgttcgtaactcagccactggcatggaaagctccaaatccatgacagtcaaagtctctgctccttcaggaacaggacatcttcctggccttaatccattatagcagccgtgatgtcatttctgtatttcaggaagactggcagacagttgctttcattcttcctcaaagtatttaccatcagctacagtccaaaattgctttttgttcaaggagatttatgaaaagactctgacaaggactcttgaatacaagttcctgataacttcaagatcataccactggactaagaactttcaaaattttaatgaacaggctgatacttcatgaaattcaagacaaagaaaaaaacccaattttattggactaaatagtcaaaacaatgttttcataattttctatttgaaaatgtgctgattctttgaatgttttattctccagatttatgcactttttttcttcagcaattggtaaagtatacttttgtaaacaaaaattgaaacatttgcttttgctccctaagtgccccagaattgggaaactattcaggagtattcatatgtttatggtaataaagttatctgcacaagttca

SEQ ID NO: 368058 - DNA, 756 bp, Homo sapiens
aaatgttagtaacttagtttctttcttttttttaagatgaaaattatatatatatatccaccagcagaatattcttggacaattaatgggaagtttcagctatcaggacaaaagctctttatcccccagattactacaaagcatagcgggctctatgcttgctctgttcgtaactcagccactggcatggaaagctccaaatccatgacagtcaaagtctctgctccttcaggaacaggacatcttcctggccttaatccattatagcagccgtgatgtcatttctgtatttcaggaagactggcagacagttgctttcattcttcctcaaagtatttaccatcagctacagtccaaaattgctttttgttcaaggagatttatgaaaagactctgacaaggactcttgaatacaagttcctgataacttcaagatcataccactggactaagaactttcaaaattttaatgaacaggctgatacttcatgaaattcaagacaaagaaaaaaacccaattttattggactaaatagtcaaaacaatgttttcataattttctatttgaaaatgtgctgattctttgaatgttttattctccagatttatgcactttttttcttcagcaattggtaaagtatacttttgtaaacaaaaattgaaacatttgcttttgctccctaagtgccccagaattgggaaactattcaggagtattcatatgtttatggtaataaagttatctgcacaagttca

SEQ ID NO: 368059 - DNA, 1843 bp, Homo sapiens
gggcgggacaactggtctgagtactatggctgattttcgctgtctggcattgagaagccacacgccccttttgcttaggaggcctctctgctggaggatgacgatggcatggtttatctaaggccactgacaagtcatcaatatagggaaggacagcacagctgagagccatgctcaggaagtttctggatcctaggctcagctccacagaggagaacacgcaggcagcagagaccatggggcccctctcagcccctccctgcacacagcgcatcacctggaaggggctcctgctcacagcatcacttttaaacttctggaacccgcctaccactgcccaagtcacgattgaagccgagccaaccaaagtttccaaggggaaggacgttcttctacttgtccacaatttgccccagaatcttgctggctacatctggtacaaagggcaaatgaaggacctctaccattacattacatcatacgtagtagatggtcaaataattatatatgggcctgcatacagtggacgagaaacagtatattccaatgcatccctgctgatccagaatgtcacccgggaggacgcaggatcctacaccttacacatcgtaaagcgaggtgatgggactagaggagaaactggacatttcaccttcaccttatacctggagactcccaagccctccatctccagcagcaacttataccccagggaggacatggaggctgtgagcttaacctgtgatcctgagactccggacgcaagctacctgtggtggatgaatggtcagagcctccctatgactcacagcttgcagttgtccaaaaacaaaaggaccctctttctatttggtgtcacaaagtacactgcaggaccctatgaatgtgaaatacggaacccagtgagtgccagccgcagtgacccagtcaccctgaatctcctcccgaagctgcccaagccctacatcaccatcaacaacttaaaccccagggagaataaggatgtcttagccttcacctgtgaacctaagagtgagaactacacctacatttggtggctaaatggtcagagcctcccggtcagtcccagggtaaagcgacccattgaaaacaggatcctcattctacccagtgtcacgagaaatgaaacaggaccctatcaatgtgaaatacaggaccgatatggtggcatccgcagttacccagtcaccctgaatgtcctctatggtccagacctccccagaatttacccttcattcacctattaccattcaggagaaaacctctacttgtcctgcttcgcggactctaacccaccagcagaatattcttggacaattaatgggaagtttcagctatcaggacaaaagctctttatcccccagattactacaaagcatagcgggctctatgcttgctctgttcgtaactcagccactggcatggaaagctccaaatccatgacagtcaaagtctctgctccttcaggaacaggacatcttcctggccttaatccattatagcagccgtgatgtcatttctgtatttcaggaagactggcagacagttgctttcattcttcctcaaagtatttaccatcagctacagtccaaaattgctttttgttcaaggagatttatgaaaagactctgacaaggactcttgaatacaagttcctgatgctttcaataatccaacgtagcagccgtgatgtcatttttgtatttcaggaagactggcagacagttgctttgattcttcctcaaagtatttaaaatcagctacagtccaaagttgctttttgttcaaggagacttatgaaaagactctgacctaactctgc

SEQ ID NO: 368060 - DNA, 1944 bp, Homo sapiens
gggcgggacaactggtctgagtactatggctgattttcgctgtctggcattgagaagccacacgccccttttgcttaggaggcctctctgctggaggatgacgatggcatggtttatctaaggccactgacaagtcatcaatatagggaaggacagcacagctgagagccatgctcaggaagtttctggatcctaggctcagctccacagaggagaacacgcaggcagcagagaccatggggcccctctcagcccctccctgcacacagcgcatcacctggaaggggctcctgctcacagcatcacttttaaacttctggaacccgcctaccactgcccaagtcacgattgaagccgagccaaccaaagtttccaaggggaaggacgttcttctacttgtccacaatttgccccagaatcttgctggctacatctggtacaaagggcaaatgaaggacctctaccattacattacatcatacgtagtagatggtcaaataattatatatgggcctgcatacagtggacgagaaacagtatattccaatgcatccctgctgatccagaatgtcacccgggaggacgcaggatcctacaccttacacatcgtaaagcgaggtgatgggactagaggagaaactggacatttcaccttcaccttatacctggagactcccaagccctccatctccagcagcaacttataccccagggaggacatggaggctgtgagcttaacctgtgatcctgagactccggacgcaagctacctgtggtggatgaatggtcagagcctccctatgactcacagcttgcagttgtccaaaaacaaaaggaccctctttctatttggtgtcacaaagtacactgcaggaccctatgaatgtgaaatacggaacccagtgagtgccagccgcagtgacccagtcaccctgaatctcctcccgaagctgcccaagccctacatcaccatcaacaacttaaaccccagggagaataaggatgtcttagccttcacctgtgaacctaagagtgagaactacacctacatttggtggctaaatggtcagagcctcccggtcagtcccagggtaaagcgacccattgaaaacaggatcctcattctacccagtgtcacgagaaatgaaacaggaccctatcaatgtgaaatacaggaccgatatggtggcatccgcagttacccagtcaccctgaatgtcctctatggtccagacctccccagaatttacccttcattcacctattaccattcaggagaaaacctctacttgtcctgcttcgcggactctaacccaccagcagaatattcttggacaattaatgggaagtttcagctatcaggacaaaagctctttatcccccagattactacaaagcatagcgggctctatgcttgctctgttcgtaactcagccactggcatggaaagctccaaatccatgacagtcaaagtctctgctccttcaggaacaggacatcttcctggccttaatccattatagcagccgtgatgtcatttctgtatttcaggaagactggcaggagatttatgaaaagactctgacaaggactcttgaatacaagttcctgataacttcaagatcataccactggactaagaactttcaaaattttaatgaacaggctgatacttcatgaaattcaagacaaagaaaaaaacccaattttattggactaaatagtcaaaacaatgttttcataattttctatttgaaaatgtgctgattctttgaatgttttattctccagatttatgcactttttttcttcagcaattggtaaagtatacttttgtaaacaaaaattgaaacatttgcttttgctccctaagtgccccagaattgggaaactattcaggagtattcatatgtttatggtaataaagttatctgcacaagttca

SEQ ID NO: 368061 - DNA, 1606 bp, Homo sapiens
gggcgggacaactggtctgagtactatggctgattttcgctgtctggcattgagaagccacacgccccttttgcttaggaggcctctctgctggaggatgacgatggcatggtttatctaaggccactgacaagtcatcaatatagggaaggacagcacagctgagagccatgctcaggaagtttctggatcctaggctcagctccacagaggagaacacgcaggcagcagagaccatggggcccctctcagcccctccctgcacacagcgcatcacctggaaggggctcctgctcacagcatcacttttaaacttctggaacccgcctaccactgcccaagtcacgattgaagccgagccaaccaaagtttccaaggggaaggacgttcttctacttgtccacaatttgccccagaatcttgctggctacatctggtacaaagggcaaatgaaggacctctaccattacattacatcatacgtagtagatggtcaaataattatatatgggcctgcatacagtggacgagaaacagtatattccaatgcatccctgctgatccagaatgtcacccgggaggacgcaggatcctacaccttacacatcgtaaagcgaggtgatgggactagaggagaaactggacatttcaccttcaccttatacctggagactcccaagccctccatctccagcagcaacttataccccagggaggacatggaggctgtgagcttaacctgtgatcctgagactccggacgcaagctacctgtggtggatgaatggtcagagcctccctatgactcacagcttgcagttgtccaaaaacaaaaggaccctctttctatttggtgtcacaaagtacactgcaggaccctatgaatgtgaaatacggaacccagtgagtgccagccgcagtgacccagtcaccctgaatctcctcccgaagctgcccaagccctacatcaccatcaacaacttaaaccccagggagaataaggatgtcttagccttcacctgtgaacctaagagtgagaactacacctacatttggtggctaaatggtcagagcctcccggtcagtcccagggtaaagcgacccattgaaaacaggatcctcattctacccagtgtcacgagaaatgaaacaggaccctatcaatgtgaaatacaggaccgatatggtggcatccgcagttacccagtcaccctgaatgtcctctatggtccagacctccccagaatttacccttcattcacctattaccattcaggagaaaacctctacttgtcctgcttcgcggactctaacccaccagcagaatattcttggacaattaatgggaagtttcagctatcaggacaaaagctctttatcccccagattactacaaagcatagcgggctctatgcttgctctgttcgtaactcagccactggcatggaaagctccaaatccatgacagtcaaagtctctgctccttcaggaacaggacatcttcctggcccgcacatccgtactggccacgaggtattaagcccacacatgcaattagctgtttatcctgatgctctcccgtcccctcagccacatcacatactgct

SEQ ID NO: 368062 - DNA, 1681 bp, Homo sapiens
gggcgggacaactggtctgagtactatggctgattttcgctgtctggcattgagaagccacacgccccttttgcttaggaggcctctctgctggaggatgacgatggcatggtttatctaaggccactgacaagtcatcaatatagggaaggacagcacagctgagagccatgctcaggaagtttctggatcctaggctcagctccacagaggagaacacgcaggcagcagagaccatggggcccctctcagcccctccctgcacacagcgcatcacctggaaggggctcctgctcacagcatcacttttaaacttctggaacccgcctaccactgcccaagtcacgattgaagccgagccaaccaaagtttccaaggggaaggacgttcttctacttgtccacaatttgccccagaatcttgctggctacatctggtacaaagggcaaatgaaggacctctaccattacattacatcatacgtagtagatggtcaaataattatatatgggcctgcatacagtggacgagaaacagtatattccaatgcatccctgctgatccagaatgtcacccgggaggacgcaggatcctacaccttacacatcgtaaagcgaggtgatgggactagaggagaaactggacatttcaccttcaccttatacctggagactcccaagccctccatctccagcagcaacttataccccagggaggacatggaggctgtgagcttaacctgtgatcctgagactccggacgcaagctacctgtggtggatgaatggtcagagcctccctatgactcacagcttgcagttgtccaaaaacaaaaggaccctctttctatttggtgtcacaaagtacactgcaggaccctatgaatgtgaaatacggaacccagtgagtgccagccgcagtgacccagtcaccctgaatctcctcccgaagctgcccaagccctacatcaccatcaacaacttaaaccccagggagaataaggatgtcttagccttcacctgtgaacctaagagtgagaactacacctacatttggtggctaaatggtcagagcctcccggtcagtcccagggtaaagcgacccattgaaaacaggatcctcattctacccagtgtcacgagaaatgaaacaggaccctatcaatgtgaaatacaggaccgatatggtggcatccgcagttacccagtcaccctgaatgtcctctatggtccagacctccccagaatttacccttcattcacctattaccattcaggagaaaacctctacttgtcctgcttcgcggactctaacccaccagcagaatattcttggacaattaatgggaagtttcagctatcaggacaaaagctctttatcccccagattactacaaagcatagcgggctctatgcttgctctgttcgtaactcagccactggcatggaaagctccaaatccatgacagtcaaagtctctgtgtatgggatcagctcgaatcagggaggaggaccctggcagaacgtgacatcgaagagggagaccctataccccaggaaagcgagaaaggtaaaggagacgacagctggcgcgtgcagtttgtacgagcaagagagtcgaaacgtgcagacgccgcacgcgcttcgtaaacattctcagcgatcaagggaaagggtctcaca

SEQ ID NO: 368063 - DNA, 1052 bp, Homo sapiens
gggcgggacaactggtctgagtactatggctgattttcgctgtctggcattgagaagccacacgccccttttgcttaggaggcctctctgctggaggatgacgatggcatggtttatctaaggccactgacaagtcatcaatatagggaaggacagcacagctgagagccatgctcaggaagtttctggatcctaggctcagctccacagaggagaacacgcaggcagcagagaccatggggcccctctcagcccctccctgcacacagcgcatcacctggaaggggctcctgctcacagcatcacttttaaacttctggaacccgcctaccactgcccaagtcacgattgaagccgagccaaccaaagtttccaaggggaaggacgttcttctacttgtccacaatttgccccagaatcttgctggctacatctggtacaaagggcaaatgaaggacctctaccattacattacatcatacgtagtagatggtcaaataattatatatgggcctgcatacagtggacgagaaacagtatattccaatgcatccctgctgatccagaatgtcacccgggaggacgcaggatcctacaccttacacatcgtaaagcgaggtgatgggactagaggagaaactggacatttcaccttcaccttatacctggagactcccaagccctccatctccagcagcaacttataccccagggaggacatggaggctgtgagcttaacctgtgatcctgagactccggacgcaagctacctgtggtggatgaatggtcagagcctccctatgactcacagcttgcagttgtccaaaaacaaaaggaccctctttctatttggtgtcacaaagtacactgcaggaccctatgaatgtgaaatacggaacccagtgagtgccagccgcagtgacccagtcaccctgaatctcctcccgaagctgcccaagcctgtccctcggcacagcctcggcacaaaccacattgcctgggtgggggcccagtgttacttgaaataaagtcgtttccgataggacacgttc

SEQ ID NO: 368064 - DNA, 1051 bp, Homo sapiens
gggcgggacaactggtctgagtactatggctgattttcgctgtctggcattgagaagccacacgccccttttgcttaggaggcctctctgctggaggatgacgatggcatggtttatctaaggccactgacaagtcatcaatatagggaaggacagcacagctgagagccatgctcaggaagtttctggatcctaggctcagctccacagaggagaacacgcaggcagcagagaccatggggcccctctcagcccctccctgcacacagcgcatcacctggaaggggctcctgctcacagcatcacttttaaacttctggaacccgcctaccactgcccaagtcacgattgaagccgagccaaccaaagtttccaaggggaaggacgttcttctacttgtccacaatttgccccagaatcttgctggctacatctggtacaaagggcaaatgaaggacctctaccattacattacatcatacgtagtagatggtcaaataattatatatgggcctgcatacagtggacgagaaacagtatattccaatgcatccctgctgatccagaatgtcacccgggaggacgcaggatcctacaccttacacatcgtaaagcgaggtgatgggactagaggagaaactggacatttcaccttcaccttatacctggagactcccaagccctccatctccagcagcaacttataccccagggaggacatggaggctgtgagcttaacctgtgatcctgagactccggacgcaagctacctgtggtggatgaatggtcagagcctccctatgactcacagcttgcagttgtccaaaaacaaaaggaccctctttctatttggtgtcacaaagtacactgcaggaccctatgaatgtgaaatacggaacccagtgagtgccagccgcagtgacccagtcaccctgaatctcctcccgaagctgtacctcacccgtagctgtacctcacccgtagctgtacctcacccgtagctgtacctcacccgtagctgtacctcacccgtagctgtacctcacccgta

SEQ ID NO: 368065 - DNA, 270 bp, Homo sapiens
ctctctgttttctgcacagtggagactcccaagccctccatctccagcagcaacttataccccagggaggacatggaggctgtgagcttaacctgtgatcctgagactccggacgcaagctacctgtggtggatgaatggtcagagcctccctatgactcacagcttgcagttgtccaaaaacaaaaggaccctctttctatttggtgtcacaaagtacactgcaggaccctatgaatgtgaaatacggaacccagtgagtgccagccgc

SEQ ID NO: 368066 - DNA, 2012 bp, Homo sapiens
gggcgggacaactggtctgagtactatggctgattttcgctgtctggcattgagaagccacacgccccttttgcttaggaggcctctctgctggaggatgacgatggcatggtttatctaaggccactgacaagtcatcaatatagggaaggacagcacagctgagagccatgctcaggaagtttctggatcctaggctcagctccacagaggagaacacgcaggcagcagagaccatggggcccctctcagcccctccctgcacacagcgcatcacctggaaggggctcctgctcacagcatcacttttaaacttctggaacccgcctaccactgcccaagtcacgattgaagccgagccaaccaaagtttccaaggggaaggacgttcttctacttgtccacaatttgccccagaatcttgctggctacatctggtacaaagggcaaatgaaggacctctaccattacattacatcatacgtagtagatggtcaaataattatatatgggcctgcatacagtggacgagaaacagtatattccaatgcatccctgctgatccagaatgtcacccgggaggacgcaggatcctacaccttacacatcgtaaagcgaggtgatgggactagaggagaaactggacatttcaccttcaccttatacctggagactcccaagccctccatctccagcagcaacttataccccagggaggacatggaggctgtgagcttaacctgtgatcctgagactccggacgcaagctacctgtggtggatgaatggtcagagcctccctatgactcacagcttgcagttgtccaaaaacaaaaggaccctctttctatttggtgtcacaaagtacactgcaggaccctatgaatgtgaaatacggaacccagtgagtgccagccgcagtgacccagtcaccctgaatctcctcccgaagctgcccaagccctacatcaccatcaacaacttaaaccccagggagaataaggatgtcttagccttcacctgtgaacctaagagtgagaactacacctacatttggtggctaaatggtcagagcctcccggtcagtcccagggtaaagcgacccattgaaaacaggatcctcattctacccagtgtcacgagaaatgaaacaggaccctatcaatgtgaaatacaggaccgatatggtggcatccgcagttacccagtcaccctgaatgtcctctatggtccagacctccccagaatttacccttcattcacctattaccattcaggagaaaacctctacttgtcctgcttcgcggactctaacccaccagcagaatattcttggacaattaatgggaagtttcagctatcaggacaaaagctctttatcccccagattactacaaagcatagcgggctctatgcttgctctgttcgtaactcagccactggcatggaaagctccaaatccatgacagtcaaagtctctgctccttcaggaacaggacatcttcctggccttaatccattatagcagccgtgatgtcatttctgtatttcaggaagactggcagacagttgctttcattcttcctcaaagtatttaccatcagctacagtccaaaattgctttttgttcaaggagatttatgaaaagactctgacaaggactcttgaatacaagttcctgataacttcaagatcataccactggactaagaactttcaaaattttaatgaacaggctgatacttcatgaaattcaagacaaagaaaaaaacccaattttattggactaaatagtcaaaacaatgttttcataattttctatttgaaaatgtgctgattctttgaatgttttattctccagatttatgcactttttttcttcagcaattggtaaagtatacttttgtaaacaaaaattgaaacatttgcttttgctccctaagtgccccagaattgggaaactattcaggagtattcatatgtttatggtaataaagttatctgcacaagttca

SEQ ID NO: 368067 - DNA, 2882 bp, Homo sapiens
gggcgggacaactggtctgagtactatggctgattttcgctgtctggcattgagaagccacacgccccttttgcttaggaggcctctctgctggaggatgacgatggcatggtttatctaaggccactgacaagtcatcaatatagggaaggacagcacagctgagagccatgctcaggaagtttctggatcctaggctcagctccacagaggagaacacgcaggcagcagagaccatggggcccctctcagcccctccctgcacacagcgcatcacctggaaggggctcctgctcacagcatcacttttaaacttctggaacccgcctaccactgcccaagtcacgattgaagccgagccaaccaaagtttccaaggggaaggacgttcttctacttgtccacaatttgccccagaatcttgctggctacatctggtacaaagggcaaatgaaggacctctaccattacattacatcatacgtagtagatggtcaaataattatatatgggcctgcatacagtggacgagaaacagtatattccaatgcatccctgctgatccagaatgtcacccgggaggacgcaggatcctacaccttacacatcgtaaagcgaggtgatgggactagaggagaaactggacatttcaccttcaccttatacctggagactcccaagccctccatctccagcagcaacttataccccagggaggacatggaggctgtgagcttaacctgtgatcctgagactccggacgcaagctacctgtggtggatgaatggtcagagcctccctatgactcacagcttgcagttgtccaaaaacaaaaggaccctctttctatttggtgtcacaaagtacactgcaggaccctatgaatgtgaaatacggaacccagtgagtgccagccgcagtgacccagtcaccctgaatctcctcccgaagctgcccaagccctacatcaccatcaacaacttaaaccccagggagaataaggatgtcttagccttcacctgtgaacctaagagtgagaactacacctacatttggtggctaaatggtcagagcctcccggtcagtcccagggtaaagcgacccattgaaaacaggatcctcattctacccagtgtcacgagaaatgaaacaggaccctatcaatgtgaaatacaggaccgatatggtggcatccgcagttacccagtcaccctgaatgtcctctatggtccagacctccccagaatttacccttcattcacctattaccattcaggagaaaacctctacttgtcctgcttcgcggactctaacccaccagcagaatattcttggacaattaatgggaagtttcagctatcaggacaaaagctctttatcccccagattactacaaagcatagcgggctctatgcttgctctgttcgtaactcagccactggcatggaaagctccaaatccatgacagtcaaagtctctgctccttcaggaacaggacatcttcctggccttaatccattatagcagccgtgatgtcatttctgtatttcaggaagactggcagacagttgctttcattcttcctcaaagtatttaccatcagctacagtccaaaattgctttttgttcaaggagatttatgaaaagactctgacaaggactcttgaatacaagttcctgataacttcaagatcataccactggactaagaactttcaaaattttaatgaacaggctgatacttcatgaaattcaagacaaagaaaaaaacccaattttattggactaaatagtcaaaacaatgttttcataattttctatttgaaaatgtgctgattctttgaatgttttattctccagatttatgcactttttttcttcagcaattggtaaagtatacttttgtaaacaaaaattgaaacatttgcttttgctccctaagtgccccagaattgggaaactattcaggagtattcatatgtttatggtaataaagttatctgcacaagttcagtaaggatctgctctctttataacaggacacatttgaaaacattggttatattaccaaggctttgactgggatgttatatttgagaatatacatagaataaacccatagggaatgcaggcaaagtctgaagttggccttggtttggcttcttagtctcaagaggtttttggaagtttaatctgagattcttactaaaaacttccagcaaaggggagtttaaaaagagcctctatggtccatcgctactcttgccgcacttaggtaaaaaatctgggcaagttcggtgagactcaacctattttgcaaaagagttcatcctactggaattatctttggtaaaaatagagactcctataaagagaaaaactatgttgaaaagaaaaactgtagtacacctgttaccagattgaaccactgttcattatctttgagtacttataatccactggtagactggactggaccctgaattcttttagttcttccaatttaattttctccagtgaaatcattaagaacaagagcagctctgttcctgaagccatataagatggagatggacaactcaatgtaaatttcatggagaaaccctcgtgtctgaagtgtgggccactaagagctcaccaaatgttcaacaccataacttagagacactcaaactgcaaaccacgacaagttgatgactttacactgtggacagcttttctcaagatgttagaacaagactatcagtcatgatgagactgttacctctcttaatttgtccttgcttctgcctgtctcctttgcttcccagaataatgctgtacttaggatttcacaagaagtagcttctgagagtaagttaacagtgtccgatatatcatgtc

SEQ ID NO: 368068 - DNA, 1491 bp, Homo sapiens
agcttaacctgtgatcctgagactccggacgcaagctacctgtggtggatgaatggtcagagcgcaggatcctacaccttacacatcgtaaagcgaggtgatgggactagaggagaaactggacatttcaccttcaccttatacctggagactcccaagccctccatctccagcagcaacttataccccagggaggacatggaggctgtgagcttaacctgtgatcctgagactccggacgcaagctacctgtggtggatgaatggtcagagcctccctatgactcacagcttgcagttgtccaaaaacaaaaggaccctctttctatttggtgtcacaaagtacactgcaggaccctatgaatgtgaaatacggaacccagtgagtgccagccgcagtgacccagtcaccctgaatctcctcccgaagctgcccaagccctacatcaccatcaacaacttaaaccccagggagaataaggatgtcttagccttcacctgtgaacctaagagtgagaactacacctacatttggtggctaaatggtcagagcctcccggtcagtcccagggtaaagcgacccattgaaaacaggatcctcattctacccagtgtcacgagaaatgaaacaggaccctatcaatgtgaaatacaggaccgatatggtggcatccgcagttacccagtcaccctgaatgtcctctatggtccagacctccccagaatttacccttcattcacctattaccattcaggagaaaacctctacttgtcctgcttcgcggactctaacccaccagcagaatattcttggacaattaatgggaagtttcagctatcaggacaaaagctctttatcccccagattactacaaagcatagcgggctctatgcttgctctgttcgtaactcagccactggcatggaaagctccaaatccatgacagtcaaagtctctgctccttcaggaacaggacatcttcctggccttaatccattatagcagccgtgatgtcatttctgtatttcaggaagactggcagacagttgctttcattcttcctcaaagtatttaccatcagctacagtccaaaattgctttttgttcaaggagatttatgaaaagactctgacaaggactcttgaatacaagttcctgataacttcaagatcataccactggactaagaactttcaaaattttaatgaacaggctgatacttcatgaaattcaagacaaagaaaaaaacccaattttattggactaaatagtcaaaacaatgttttcataattttctatttgaaaatgtgctgattctttgaatgttttattctccagatttatgcactttttttcttcagcaattggtaaagtatacttttgtaaacaaaaattgaaacatttgcttttgctccctaagtgccccagaattgggaaactattcaggagtattcatatgtttatggtaataaagttatctgcacaagttca

SEQ ID NO: 368069 - DNA, 1852 bp, Homo sapiens
gggcgggacaactggtctgagtactatggctgattttcgctgtctggcattgagaagccacacgccccttttgcttaggaggcctctctgctggaggatgacgatggcatggtttatctaaggccactgacaagtcatcaatatagggaaggacagcacagctgagagccatgctcaggaagtttctggatcctaggctcagctccacagaggagaacacgcaggcagcagagaccatggggcccctctcagcccctccctgcacacagcgcatcacctggaaggggctcctgctcacagcatcacttttaaacttctggaacccgcctaccactgcccaagtcacgattgaagccgagccaaccaaagtttccaaggggaaggacgttcttctacttgtccacaatttgccccagaatcttgctggctacatctggtacaaagggcaaatgaaggacctctaccattacattacatcatacgtagtagatggtcaaataattatatatgggcctgcatacagtggacgagaaacagtatattccaatgcatccctgctgatccagaatgtcacccgggaggacgcaggatcctacaccttacacatcgtaaagcgaggtgatgggactagaggagaaactggacatttcaccttcaccttatacctggagactcccaagccctccatctccagcagcaacttataccccagggaggacatggaggctgtgagcttaacctgtgatcctgagactccggacgcaagctacctgtggtggatgaatcgaagctgcccaagccctacatcaccatcaacaacttaaaccccagggagaataaggatgtcttagccttcacctgtgaacctaagagtgagaactacacctacatttggtggctaaatggtcagagcctcccggtcagtcccagggtaaagcgacccattgaaaacaggatcctcattctacccagtgtcacgagaaatgaaacaggaccctatcaatgtgaaatacaggaccgatatggtggcatccgcagttacccagtcaccctgaatgtcctctatggtccagacctccccagaatttacccttcattcacctattaccattcaggagaaaacctctacttgtcctgcttcgcggactctaacccaccagcagaatattcttggacaattaatgggaagtttcagctatcaggacaaaagctctttatcccccagattactacaaagcatagcgggctctatgcttgctctgttcgtaactcagccactggcatggaaagctccaaatccatgacagtcaaagtctctgctccttcaggaacaggacatcttcctggccttaatccattatagcagccgtgatgtcatttctgtatttcaggaagactggcagacagttgctttcattcttcctcaaagtatttaccatcagctacagtccaaaattgctttttgttcaaggagatttatgaaaagactctgacaaggactcttgaatacaagttcctgataacttcaagatcataccactggactaagaactttcaaaattttaatgaacaggctgatacttcatgaaattcaagacaaagaaaaaaacccaattttattggactaaatagtcaaaacaatgttttcataattttctatttgaaaatgtgctgattctttgaatgttttattctccagatttatgcactttttttcttcagcaattggtaaagtatacttttgtaaacaaaaattgaaacatttgcttttgctccctaagtgccccagaattgggaaactattcaggagtattcatatgtttatggtaataaagttatctgcacaagttca

SEQ ID NO: 368070 - DNA, 1733 bp, Homo sapiens
gggcgggacaactggtctgagtactatggctgattttcgctgtctggcattgagaagccacacgccccttttgcttaggaggcctctctgctggaggatgacgatggcatggtttatctaaggccactgacaagtcatcaatatagggaaggacagcacagctgagagccatgctcaggaagtttctggatcctaggctcagctccacagaggagaacacgcaggcagcagagaccatggggcccctctcagcccctccctgcacacagcgcatcacctggaaggggctcctgctcacagcatcacttttaaacttctggaacccgcctaccactgcccaagtcacgattgaagccgagccaaccaaagtttccaaggggaaggacgttcttctacttgtccacaatttgccccagaatcttgctggctacatctggtacaaagggcaaatgaaggacctctaccattacattacatcatacgtagtagatggtcaaataattatatatgggcctgcatacagtggacgagaaacagtatattccaatgcatccctgctgatccagaatgtcacccgggaggacgcaggatcctacaccttacacatcgtaaagcgaggtgatgggactagaggagaaactggacatttcaccttcaccttatacctggagactcccaagccctccatctccagcagcaacttataccccagggaggacatggaggctgtgagcttaacctgtgatcctgagactccggacgcaagctacctgtggtggatgaatggtcagagcctccctatgactcacagcttgcagttgtccaaaaacaaaaggaccctctttctatttggtgtcacaaagtacactgcaggaccctatgaatgtgaaatacggaacccagtgagtgccagccgcagtgacccagtcaccctgaatctcctccatggtccagacctccccagaatttacccttcattcacctattaccattcaggagaaaacctctacttgtcctgcttcgcggactctaacccaccagcagaatattcttggacaattaatgggaagtttcagctatcaggacaaaagctctttatcccccagattactacaaagcatagcgggctctatgcttgctctgttcgtaactcagccactggcatggaaagctccaaatccatgacagtcaaagtctctgctccttcaggaacaggacatcttcctggccttaatccattatagcagccgtgatgtcatttctgtatttcaggaagactggcagacagttgctttcattcttcctcaaagtatttaccatcagctacagtccaaaattgctttttgttcaaggagatttatgaaaagactctgacaaggactcttgaatacaagttcctgataacttcaagatcataccactggactaagaactttcaaaattttaatgaacaggctgatacttcatgaaattcaagacaaagaaaaaaacccaattttattggactaaatagtcaaaacaatgttttcataattttctatttgaaaatgtgctgattctttgaatgttttattctccagatttatgcactttttttcttcagcaattggtaaagtatacttttgtaaacaaaaattgaaacatttgcttttgctccctaagtgccccagaattgggaaactattcaggagtattcatatgtttatggtaataaagttatctgcacaagttca

SEQ ID NO: 368071 - DNA, 826 bp, Homo sapiens
tggcatccgcagttacccagtcgccctgaatctcctctatggtccagacctccccagaatttacccttcattcacctattaccattcaggagaaaacctctacttgtcctgcttcgcggactctaacccaccagcagaatattcttggacaattaatgggaagtttcagctatcaggacaaaagctctttatcccccagattactacaaagcatagcgggctctatgcttgctctgttcgtaactcagccactggcatggaaagctccaaatccatgacagtcaaagtctctgctccttcaggaacaggacatcttcctggccttaatccattatagcagccgtgatgtcatttctgtatttcaggaagactggcagacagttgctttcattcttcctcaaagtatttaccatcagctacagtccaaaattgctttttgttcaaggagatttatgaaaagactctgacaaggactcttgaatacaagttcctgataacttcaagatcataccactggactaagaactttcaaaattttaatgaacaggctgatacttcatgaaattcaagacaaagaaaaaaacccaattttattggactaaatagtcaaaacaatgttttcataattttctatttgaaaatgtgctgattctttgaatgttttattctccagatttatgcactttttttcttcagcaattggtaaagtatacttttgtaaacaaaaattgaaacatttgcttttgctccctaagtgccccagaattgggaaactattcaggagtattcatatgtttatggtaataaagttatctgcacaagttca

SEQ ID NO: 368072 - DNA, 1757 bp, Homo sapiens
gggcgggacaactggtctgagtactatggctgattttcgctgtctggcattgagaagccacacgccccttttgcttaggaggcctctctgctggaggatgacgatggcatggtttatctaaggccactgacaagtcatcaatatagggaaggacagcacagctgagagccatgctcaggaagtttctggatcctaggctcagctccacagaggagaacacgcaggcagcagagaccatggggcccctctcagcccctccctgcacacagcgcatcacctggaaggggctcctgctcacagcatcacttttaaacttctggaacccgcctaccactgcccaagtcacgattgaagccgagccaaccaaagtttccaaggggaaggacgttcttctacttgtccacaatttgccccagaatcttgctggctacatctggtacaaagggcaaatgaaggacctctaccattacattacatcatacgtagtagatggtcaaataattatatatgggcctgcatacagtggacgagaaacagtatattccaatgcatccctgctgatccagaatgtcacccgggaggacgcaggatcctacaccttacacatcgtaaagcgaggtgatgggactagaggagaaactggacatttcaccttcaccttatacctggagactcccaagccctccatctccagcagcaacttataccccagggaggacatggaggctgtgagcttaacctgtgatcctgagactccggacgcaagctacctgtggtggatgaatggtcagagcctccctatgactcacagcttgcagttgtccaaaaacaaaaggaccctctttctatttggtgtcacaaagtacactgcaggaccctatgaatgtgaaatacggaacccagtgagtgccagccgcagtgacccagtcaccctgaatctcctcccgaagctgcccaagccctacatcaccatcaacaacttaaaccccagggagaataaggatgtcttagccttcacctgtgaacctaagagtgagaactacacctacatttggtggctaaatggtcagagcctcccggtcagtcccagggtaaagcgacccattgaaaacaggatcctcattctacccagtgtcacgagaaatgaaacaggaccctatcaatgtgaaatacaggaccgatatggtggcatccgcagttacccagtcaccctgaatgtcctctctccttcaggaacaggacatcttcctggccttaatccattatagcagccgtgatgtcatttctgtatttcaggaagactggcagacagttgctttcattcttcctcaaagtatttaccatcagctacagtccaaaattgctttttgttcaaggagatttatgaaaagactctgacaaggactcttgaatacaagttcctgataacttcaagatcataccactggactaagaactttcaaaattttaatgaacaggctgatacttcatgaaattcaagacaaagaaaaaaacccaattttattggactaaatagtcaaaacaatgttttcataattttctatttgaaaatgtgctgattctttgaatgttttattctccagatttatgcactttttttcttcagcaattggtaaagtatacttttgtaaacaaaaattgaaacatttgcttttgctccctaagtgccccagaattgggaaactattcaggagtattcatatgtttatggtaataaagttatctgcacaagttca

SEQ ID NO: 368073 - DNA, 719 bp, Homo sapiens
gggcgggacaactggtctgagtactatggctgattttcgctgtctggcattgagaagccacacgccccttttgcttaggaggcctctctgctggaggatgacgatggcatggtttatctaaggccactgacaagtcatcaatatagggaaggacagcacagctgagagccatgctcaggaagtttctggatcctaggctcagctccacagaggagaacacgcaggcagcagagaccatggggcccctctcagcccctccctgcacacagcgcatcacctggaaggggctcctgctcacagcatcacttttaaacttctggaacccgcctaccactgcccaagtcacgattgaagccgagccaaccaaagtttccaaggggaaggacgttcttctacttgtccacaatttgccccagaatcttgctggctacatctggtacaaagggcaaatgaaggacctctaccattacattacatcatacgtagtagatggtcaaataattatatatgggcctgcatacagtggacgagaaacagtatattccaatgcatccctgctgatccagaatgtcacccgggaggacgcaggatcctacaccttacacatcgtaaagcgaggtgatgggactagaggagaaactggacatttcaccttcaccttataccttaagactcccgagccctccatctccagcagctacacagacggctaaggtctc

SEQ ID NO: 368074 - DNA, 238 bp, Homo sapiens
ctccttaagatcatttctctacaaactgccattttcagaacaccttttacttctctagagcatagcattcagtctattggtgtactgtcttttcatagataaaagctattctttctttactggtatgcctttgctactgtactgtgagctctgagagcacggatcttgtcatttacattgttgttccccagaatctatacagaatctagtacacaataaaatagatgtatatgatgat

SEQ ID NO: 368075 - DNA, 463 bp, Homo sapiens
atcttctttcatgatgtgaacattgtttttttttaaaaaaaactgtaatacatactaccattaattaaaacttgcatttaacatcatatacatacagaagaaaatactgtattcatagtgtgtttaataatacttgtcagtgaatatgtctttttattttttaattataagatgaaaaaagtggcactgtttctggagagtccatagtatatagcaaacacatataatttttgtacttgccactttattttacatttatttgcatacttgcatgtctttcaagatgatatatacttgatttggcttaaaaattctatcatttgttcagtctttccatatgaataatgtctttctatatggattgcatttattaatgcttatttatatagtgtcttagcatgatgagacaatataataatatgaaaaagactggtatttgttgggacaaggaaatgaatcagat

SEQ ID NO: 368076 - DNA, 703 bp, Homo sapiens
tgcgacagccgtcactgacggccggagctgtttgtgctgggagctggtggcgcggtgcagggctcttaagaacgaacggcttgggcgcggactggtatccggggactgtgacttgcagggtccgccatggagccagagcagatgctggagggacaaacgcaggttgcagaaaatcctcactctgagtacggtctcacagacaacgttgagagaatagtagaaaatgagaagattaatgcagaaaagtcatcaaagcagaaggtagatctccagtctttgccaactcgtgcctacctggatcagacagttgtgcctatcttattacagggacttgctgtgcttgcaaaggaaagaccaccaaatcccattgaatttctagcatcttatcttttaaaaaacaaggcacagtttgaagatcgaaactgacttaatgggaagaacagaaaaatttagttgctactgtagatttacatgattaagaggcagctttaattgccatgatcattccctctttttggatgtataagaaccttccggacaacagaacctatttctggaattgcagaagataacatatttcccttattttgatttaatcaccataaaccatacctatttaatgagtgtattctgtgcaatttttttctcagattgtctttaactttgtttttaaaatgaccttcaaaataaactgtcaaaacac

SEQ ID NO: 368077 - DNA, 618 bp, Homo sapiens
tgcgacagccgtcactgacggccggagctgtttgtgctgggagctggtggcgcggtgcagggctcttaagaacgaacggcttgggcgcggactggtatccggggactgtgacttgcagggtccgccatggagccagagcagatgctggagggacaaacgcaggttgcagaaaatcctcactctgagtacggtctcacagacaacgttgagagaatagtagaaaatgagaagattaatgcagaaaagtcatcaaagcagaaggtagatctccagtctttgccaactcgtgcctacctggatcagacagttgtgcctatcttattacagggacttgctgtgcttgcaaaggaaagaccaccaaatcccattgaatttctagcatcttatcttttaaaaaacaaggcacagtttgaagatcgaaactgacttaatgggaagaacagaaaaatttagttgctactgtagatttacatgattaagaggcagctttaattgccatgatcattccctctttttggatgtataagaaccttccggacaacagaacctatttctggaattgcagaagataacatatttcccttattttgatttaatcaccataaaccatacctattt

SEQ ID NO: 368078 - DNA, 664 bp, Homo sapiens
tgcgacagccgtcactgacggccggagctgtttgtgctgggagctggtggcgcggtgcagggctcttaagaacgaacggcttgggcgcggactggtatccggggactgtgacttgcagggtccgccatggagccagagcagatgctggagggacaaacgcaggttgcagaaaatcctcactctgagtacggtctcacagacaacgttgagagaatagtagaaaatgagaagattaatgcagaaaagtcatcaaagcagaaggtagatctccagtctttgccaactcgtgcctacctggatcagacagttgtgcctatcttattacagggacttgctgtgcttgcaaaggaaagaaaaaacaaggcacagtttgaagatcgaaactgacttaatgggaagaacagaaaaatttagttgctactgtagatttacatgattaagaggcagctttaattgccatgatcattccctctttttggatgtataagaaccttccggacaacagaacctatttctggaattgcagaagataacatatttcccttattttgatttaatcaccataaaccatacctatttaatgagtgtattctgtgcaatttttttctcagattgtctttaactttgtttttaaaatgaccttcaaaataaactgtcaaaacac

SEQ ID NO: 368079 - DNA, 819 bp, Homo sapiens
tgcgacagccgtcactgacggccggagctgtttgtgctgggagctggtggcgcggtgcagggctcttaagaacgaacggcttgggcgcggactggtatccggggactgtgacttgcagggtccgccatggagccagagcagatgctggagggacaaacgcaggttgcagaaaatcctcactctgagtacggtctcacagacaacgttgagagaatagtagaaaatgagaagattaatgcagaaaagtcatcaaagcagaaggtagatctccagtctttgccaactcgtgcctacctggatcagacagttgtgcctatcttattacagggacttgctgtgcttgcaaaggaaagatgaggaaacagacttggagaggttaagtgacatgctcaagacaacactgctgggtcttgctgcgtacgttgcccaggttggaatgcagtggcgtgatcatggctcactgtagcctcgacctcctgggctcaagtgatcctcccgcctccgcctaccaagtagctaggaccacaggcgaagccaccacgcccggataattaaaacataaaaaattcatagaaacagggtctcctatgttccccaggctggtctagaactcctggcctcaggcagtcctactgcctcaggcccccaaagtgctgggattataggcaggaggtaccatgcccatgcagttacaaacattttatagtgtttgccccaaaactttcattggatgtatgcaactttctcttcctctattcctacttttgcaatggtgtactttgtaacaataacacttcctcagaggtccaagatagcctc

SEQ ID NO: 368080 - DNA, 724 bp, Homo sapiens
tgcgacagccgtcactgacggccggagctgtttgtgctgggagctggtggcgcggtgcagggctcttaagaacgaacggcttgggcgcggactggtatccggggactgtgacttgcagggtccgccatggagccagagcagatgctggagggacaaacgcaggttgcagaaaatcctcactctgagtacggtctcacagacaacgttgaggtaactcgccaagttcctatgcctcatctgtgttgtctcttgcaagctggagaaaacttgggatctgcttttactaggtggctatgcacaagggaaaactttgttatcgtgaactgaatagtatcaagttatgggtagcttgttttattagcagtactaatgcttcttggtgtacagacgtacaaattacgtttgagtcaaaggattgaacttttattgcgaaacacatattcttgagggatactgtctgaatcatttttcttggtggcttttaatcgatcttttgggatgttgctacgtaaaaaccgcatattaaaattaagaaacccttcgccgggcgcgatggcccacgcctatcatcccagcactttgggaggccaaggctggcggaccacctgaggtcaggagttccagaccagcctgaccaacatggtgaaaccccgtctctactaaaaatacaaaaattagccgggcatgatggtggatgactgtaatcctatctgttcgggtggct

SEQ ID NO: 368081 - DNA, 1135 bp, Homo sapiens
tgcgacagccgtcactgacggccggagctgtttgtgctgggagctggtggcgcggtgcagggctcttaagaacgaacggcttgggcgcgggtaatcagctccctttcccccactttctcacttattctaggtacttgggactgtcgtagagtttccagaccccatgtaggcgcccagtcgtggactgtcccactctgctgctctactgctcgtggtgctcccgcgcccagactggtatccggggactgtgacttgcagggtccgccatggagccagagcagatgctggagggacaaacgcaggttgcagaaaatcctcactctgagtacggtctcacagacaacgttgagagaatagtagaaaatgagaagattaatgcagaaaagtcatcaaagcagaaggtagatctccagtctttgccaactcgtgcctacctggatcagacagttgtgcctatcttattacagggacttgctgtgcttgcaaaggaaagaccaccaaatcccattgaatttctagcatcttatcttttaaaaaacaaggcacagtttgaagatcgaaactgacttaatgggaagaacagaaaaatttagttgctactgtagatttacatgattaagaggcagctttaattgccatgatcattccctctttttggatgtataagaaccttccggacaacagaacctatttctggaattgcagaagataacatatttcccttattttgatttaatcaccataaaccatacctatttaatgagtgtattctgtgcaatttttttctcagattgtctttaactttgtttttaaaatgaccttcaaaataaactgtcaaaacaccattattttaaagtagtttttgttctgtatgacaaatattttacatgattgaattgttttatgaatttctctttttcttctgtcttcaaatgctgcagagttttacaacagagagaaaatacagcagtcaagtataatttaaaaaattcagccaatttttctcagcattgtttctggacctttctgagggtgggatctgggcatcttcaatggcttaacaagtatcacaggtgattctaatgtacattaaagttggagtactaataaaagcattgcaaaggggatacaatat

SEQ ID NO: 368082 - DNA, 863 bp, Homo sapiens
ccaccacaaccgccacatcacagatcgaatgcatcggttacaagatgatactctccatcgtcgagtacatcagttatcagaatagtagaaaatgagaagattaatgcagaaaagtcatcaaagcagaaggtagatctccagtctttgccaactcgtgcctacctggatcagacagttgtgcctatcttattacagggacttgctgtgcttgcaaaggaaagaccaccaaatcccattgaatttctagcatcttatcttttaaaaaacaaggcacagtttgaagatcgaaactgacttaatgggaagaacagaaaaatttagttgctactgtagatttacatgattaagaggcagctttaattgccatgatcattccctctttttggatgtataagaaccttccggacaacagaacctatttctggaattgcagaagataacatatttcccttattttgatttaatcaccataaaccatacctatttaatgagtgtattctgtgcaatttttttctcagattgtctttaactttgtttttaaaatgaccttcaaaataaactgtcaaaacaccattattttaaagtagtttttgttctgtatgacaaatattttacatgattgaattgttttatgaatttctctttttcttctgtcttcaaatgctgcagagttttacaacagagagaaaatacagcagtcaagtataatttaaaaaattcagccaatttttctcagcattgtttctggacctttctgagggtgggatctgggcatcttcaatggcttaacaagtatcacaggtgattctaatgtacattaaagttggagtactaataaaagcattgcaaaggggatacaatat

SEQ ID NO: 368083 - DNA, 555 bp, Homo sapiens
tgcgacagccgtcactgacggccggagctgtttgtgctgggagctggtggcgcggtgcagggctcttaagaacgaacggcttgggcgcgggtaatcagctccctttcccccactttctcacttattctaggtacttgggactgtcgtagagtttccagaccccatgtaggcgcccagtcgtggactgtcccactctgctgctctactgctcgtggtgctcccgcgcccagactggtatccggggactgtgacttgcagggtccgccatggagccagagcagatgctggagggacaaacgcaggttgcagaaaatcctcactccgaaaacagggtgggagagctgcctctctttgaacctctcccaggaccaactctaacccagggaggcaaacttggtcgatgtaagcggtggcttggagacagaatcatctaatggaaaagatacactagaaggtgctggggatacatcagaggtgatggatactcaggcgggctccgtggatgaagagaatggccgacagttgggtgaggtagagctgcaatgtgggatttgt

SEQ ID NO: 368084 - DNA, 995 bp, Homo sapiens
tgcgacagccgtcactgacggccggagctgtttgtgctgggagctggtggcgcggtgcagggctcttaagaacgaacggcttgggcgcggactggtatccggggactgtgacttgcagggtccgccatggagccagagcagatgctggagggacaaacgcaggttgcagaaaatcctcactctgagtacggtctcacagacaacgttgagagaatagtagaaaatgagaagattaatgcagaaaagtcatcaaagcagaaggtagatctccagtctttgccaactcgtgcctacctggatcagacagttgtgcctatcttattacagggacttgctgtgcttgcaaaggaaagaccaccaaatcccattgaatttctagcatcttatcttttaaaaaacaaggcacagtttgaagatcgaaactgacttaatgggaagaacagaaaaatttagttgctactgtagatttacatgattaagaggcagctttaattgccatgatcattccctctttttggatgtataagaaccttccggacaacagaacctatttctggaattgcagaagataacatatttcccttattttgatttaatcaccataaaccatacctatttaatgagtgtattctgtgcaatttttttctcagattgtctttaactttgtttttaaaatgaccttcaaaataaactgtcaaaacaccattattttaaagtagtttttgttctgtatgacaaatattttacatgattgaattgttttatgaatttctctttttcttctgtcttcaaatgctgcagagttttacaacagagagaaaatacagcagtcaagtataatttaaaaaattcagccaatttttctcagcattgtttctggacctttctgagggtgggatctgggcatcttcaatggcttaacaagtatcacaggtgattctaatgtacattaaagttggagtactaataaaagcattgcaaaggggatacaatat

SEQ ID NO: 368085 - DNA, 882 bp, Homo sapiens
tgcgacagccgtcactgacggccggagctgtttgtgctgggagctggtggcgcggtgcagggctcttaagaacgaacggcttgggcgcggactggtatccggggactgtgacttgcagggtccgccatggagccagagcagatgctggagggacaaacgcaggttgcagaaaatcctcactctgagtacggtctcacagacaacgttgagagaatagtagaaaatgagaagattaatgcagaaaagtcatcaaagcagaaggtagatctccagtctttgccaactcgtgcctacctggatcagacagttgtgcctatcttattacagggacttgctgtgcttgcaaaggaaagaccaccaaatcccattgaatttctagcatcttatcttttaaaaaacaaggcacagtttgaagatcgaaactgacttaatgggaagaacagaaaaatttagttgctactgtagatttacatgattaagaggcagctttaattgccatgatcattccctctttttggatgtataagaaccttccggacaacagaacctatttctggaattgcagaagataacatatttcccttattttgatttaatcaccataaaccatacctatttaatgagtgtattctgtgcaatttttttctcagattgtctttaactttgtttttaaaatgaccttcaaaataaactgtcaaaacacctgaaaaaaaaaaaaaaaaaaaaaattgtggggggtccggcctgagaagttttaaacaattctgttgggggggccccgaggtatgaacatgcaaaggccaagaacctcggcacaggggggttccacaaaaaggggggagggggtgaaacacaaggtggggtgttaagggctgaaacgga

SEQ ID NO: 368086 - DNA, 560 bp, Homo sapiens
tgcgacagccgtcactgacggccggagctgtttgtgctgggagctggtggcgcggtgcagggctcttaagaacgaacggcttgggcgcggactggtatccggggactgtgacttgcagggtccgccatggagccagagcagatgctggagggacaaacgcaggttgcagaaaatcctcactctgagtacggtctcacagacaacgttgagaccaccaaatcccattgaatttctagcatcttatcttttaaaaaacaaggcacagtttgaagatcgaaactgacttaatgggaagaacagaaaaatttagttgctactgtagatttacatgattaagaggcagctttaattgccatgatcattccctctttttggatgtataagaaccttccggacaacagaacctatttctggaattgcagaagataacatatttcccttattttgatttaatcaccataaaccatacctatttaatgagtgtattctgtgcaatttttttctcagattgtctttaactttgtttttaaaatgaccttcaaaataaactgtcaaaacac

SEQ ID NO: 368087 - DNA, 649 bp, Homo sapiens
tgcgacagccgtcactgacggccggagctgtttgtgctgggagctggtggcgcggtgcagggctcttaagaacgaacggcttgggcgcggactggtatccggggactgtgacttgcagggtccgccatggagccagagcagatgctggagggacaaacgcaggttgcagaaaatcctcactctgagtacggtctcacagacaacgttgagagaatagtagaaaatgagaagattaatgcagaaaagtcatcaaagcagaaggtagatctccagtctttgccaactcgtgcctacctggatcagacagttgtgcctatcttattacagggacttgctgtgcttgcaaaggaaagaccaccaaatcccattgaatttctagcatcttatcttttaatttagttgctactgtagatttacatgattaagaggcagctttaattgccatgatcattccctctttttggatgtataagaaccttccggacaacagaacctatttctggaattgcagaagataacatatttcccttattttgatttaatcaccataaaccatacctatttaatgagtgtattctgtgcaatttttttctcagattgtctttaactttgtttttaaaatgaccttcaaaataaactgtcaaaacac

SEQ ID NO: 368088 - DNA, 720 bp, Homo sapiens
tgcgacagccgtcactgacggccggagctgtttgtgctgggagctggtggcgcggtgcagggctcttaagaacgaacggcttgggcgcggactggtatccggggactgtgacttgcagggtccgccatggagccagagcagatgctggagggacaaacgcaggttgcagaaaatcctcactctgagtacggtctcacagacaacgttgagagaatagtagaaaatgagaagattaatgcagaaaagtcatcaaagcagaaggtagatctccagtctttgccaactcgtgcctacctggatcagacagttgtgcctatcttattacagggacttgctgtgcttgcaaaggaaagatgaggaaacagacttggagaggttaagtgacatgctcaagacaacactgctgacggggtttcaccgtgttgcccaggctggttgcgaactcctgagctcaggcaatctgtccgcctcggcctcccaacgtgctaggattacaggcgtgagccaccgtgcccggccaattttttttttttttttaagaggtgaggtctcactatgttgcccagatggtctgtctcaaacccctgacctcatgagatcctgctgccttggcctcccaaagtgctgggattacaggtgtgagccactgtgcctggcaaggaatgtcttttcctgccagtccacataatacttacttgagtatttatgtgccaggcagca

SEQ ID NO: 368089 - DNA, 843 bp, Homo sapiens
tgcgacagccgtcactgacggccggagctgtttgtgctgggagctggtggcgcggtgcagggctcttaagaacgaacggcttgggcgcgggtaatcagctccctttcccccactttctcacttattctaggtacttgggactgtcgtagagtttccagaccccatgtaggcgcccagtcgtggactgtcccactctgctgctctactgctcgtggtgctcccgcgcccagactggtatccggggactgtgacttgcagggtccgccatggagccagagcagatgctggagggacaaacgcaggttgcagaaaatcctcactctgagtacggtctcacagacaacgttgagagaatagtagaaaatgagaagattaatgcagaaaagtcatcaaagcagaaggtagatctccagtctttgccaactcgtgcctacctggatcagacagttgtgcctatcttattacagggacttgctgtgcttgcaaaggaaagaccaccaaatcccattgaatttctagcatcttatcttttaaaaaacaaggcacagtttgaagatcgaaactgacttaatgggaagaacagaaaaatttagttgctactgtagatttacatgattaagaggcagctttaattgccatgatcattccctctttttggatgtataagaaccttccggacaacagaacctatttctggaattgcagaagataacatatttcccttattttgatttaatcaccataaaccatacctatttaatgagtgtattctgtgcaatttttttctcagattgtctttaactttgtttttaaaatgaccttcaaaataaactgtcaaaacac

SEQ ID NO: 368090 - DNA, 717 bp, Homo sapiens
attaaaactattctaaactacatttaaggagacaggatggagttatgttcacattagaaaaaaagatgattttgataaaaataattgctctttaaactacctcacattggttgtttttttgagataatagacattgaaactagtatagaacatttccatcttaatccacctgtgatatagattgtatagcttagggataatttaagatagtaataataactgcggcagataatcgtatttttgctattaacagggcattgagcaagtgcagcaaagtagaggcctgcaagaaatagaagagtcactcaggagtcacggagtgctgttggaagttcaatactcttcttcaatacatgaccgagaaattaggttcaacaatggatggatgattaagattggaaggggacttgattattttaagaaaccacaggtaggatataatcttatgagtaaatgtgtagcactgtttttgtatcatttttaatgatactcttttcttctcttcttagagtcgtttttcccttggatattgtgattttgatttaagaccatgtcatgaaacaacagtagacatttttcataagaagcatacaaaaaatatatgatgggtggtagcctaatttgtattatgtctactttaagtgaatattggattttttttaaaagatcacttttataatgtatgaatttaacaataaacttttatatttctactaa

SEQ ID NO: 368091 - DNA, 312 bp, Homo sapiens
gtatctttgcttatcttgcccagtacccgatgccacgtggaaatggagtggctcttaattaagacaggatttcaccatgttgcccaggctggtctcaaactcctgggctcaagcagtcctcccaccttggcctcccaaagtgctgggattacaggcatgagccactgcactcagccacattacctatatcttaaagccaaattatgttgaattcacaagtaacaaatgttcatcgagaaaaatgagaaaatacagacaagcaagaagaaaaaaataaaagcattgatagtcctaatcacaattaaaaaattg

SEQ ID NO: 368092 - DNA, 1133 bp, Homo sapiens
cgtcgcagtgagcgcgacctccaaactgaggcatttttgttccggcgaaatccctcccactcaggaaagtccctagaaagagagcgcaggcgcccctgggtatcacatgacccacttcccggaagcgcagcagacccgctcaacttcatcctgggttgaggcggaggagaacttccagaattatggcgaagtccgggctgaggcaggacccgcagagcacagctgcagccactgtgctaaagcgggcagtagaactagattcggagtcgcggtatccgcaggctctggtgtgttaccaagaggggattgatctgctcctgcaggttctgaaaggtaccaaagataatactaagagatgtaatctcagagaaaaaatttccaaatacatggacagagcggaaaacataaagaagtacttggaccaagaaaaagaagaagctaaagaaactcctgggatttctctcagattttgttgtgaatcaaaacacctcaggagttaagcattcctaatgattagaggtcagatggaaaatatcacaagcaaattaaaatagaagagaatgcaacaggtttcagttatgagtcactttttcgcgaataccttaatgagacagttacagaagtttggatagaagatccttatattagacatactcatcagctgtataactttcttcgattttgtgagatgcttattaagagaccatgtaaagtaaaaactattcaccttctcacctctctggatgaaggcattgagcaagtgcagcaaagtagaggcctgcaagaaatagaagagtcactcaggagtcacggagtgctgttggaagttcaatactcttcttcaatacatgaccgagaaattaggttcaacaatggatggatgattaagattggaaggggacttgattattttaagaaaccacagagtcgtttttcccttggatattgtgattttgatttaagaccatgtcatgaaacaacagtagacatttttcataagaagcatacaaaaaatatatgatgggtggtagcctaatttgtattatgtctactttaagtgaatattggattttttttaaaagatcacttttataatgtatgaatttaacaataaacttttatatttctactaa

SEQ ID NO: 368093 - DNA, 1123 bp, Homo sapiens
cgtcgcagtgagcgcgacctccaaactgaggcatttttgttccggcgaaatccctcccactcaggaaagtccctagaaagagagcgcaggcgcccctgggtatcacatgacccacttcccggaagcgcagcagacccgctcaacttcatcctgggttgaggcggaggagaacttccagaattatggcgaagtccgggctgaggcaggacccgcagagcacagctgcagccactgtgctaaagcgggcagtagaactagattcggagtcgcggtatccgcaggctctggtgtgttaccaagaggggattgatctgctcctgcaggttctgaaaggtaccaaagataatactaagagatgtaatctcagagaaaaaatttccaaatacatggacagagcggaaaacataaagaagtacttggaccaagaaaaagaagatggaaaatatcacaagcaaattaaaatagaagagaatgcaacaggtttcagttatgagtcactttttcgcgaataccttaatgagacagttacagaagtttggatagaagatccttatattagacatactcatcagctgtataactttcttcgattttgtgagatgcttattaagagaccatgtaaagtaaaaactattcaccttctcacctctctggatgaaggcattgagcaagtgcagcaaagtagaggcctgcaagaaatagaagagtcactcaggagtcacggagtgctgttggaagttcaatactcttcttcaatacatgaccgagaaattaggttcaacaatggatggatgattaagattggaaggggacttgattattttaagaaaccacaggtaggatataatcttatgagtaaatgtgtagcactgtttttgtatcatttttaatgatactcttttcttctcttcttagagtcgtttttcccttggatattgtgattttgatttaagaccatgtcatgaaacaacagtagacatttttcataagaagcatacaaaaaatatatgatgggtggtagcctaatttgtattatgtctactttaagtgaatattggattttttttaaaagatcacttttataatgtatgaatttaacaataaacttttatatttctactaa

SEQ ID NO: 368094 - DNA, 846 bp, Homo sapiens
gttaagcagaccaattaaggagctcctgctggaatcaaaataagaggtaccaaagataatactaagagatgtaatctcagagaaaaaatttccaaatacatggacagagcggaaaacataaagaagtacttggaccaagaaaaagaagaagctaaagaaactcctgggatttctctcagattttgttgtgaatcaaaacacctcaggagttaagcattcctaatgattagaggtcagatggaaaatatcacaagcaaattaaaatagaagagaatgcaacaggtttcagttatgagtcactttttcgcgaataccttaatgagacagttacagaagtttggatagaagatccttatattagacatactcatcagctgtataactttcttcgattttgtgagatgcttattaagagaccatgtaaagtaaaaactattcaccttctcacctctctggatgaaggcattgagcaagtgcagcaaagtagaggcctgcaagaaatagaagagtcactcaggagtcacggagtgctgttggaagttcaatactcttcttcaatacatgaccgagaaattaggttcaacaatggatggatgattaagattggaaggggacttgattattttaagaaaccacagagtcgtttttcccttggatattgtgattttgatttaagaccatgtcatgaaacaacagtagacatttttcataagaagcatacaaaaaatatatgatgggtggtagcctaatttgtattatgtctactttaagtgaatattggattttttttaaaagatcacttttataatgtatgaatttaacaataaacttttatatttctactaa

SEQ ID NO: 368095 - DNA, 1085 bp, Homo sapiens
cgtcgcagtgagcgcgacctccaaactgaggcatttttgttccggcgaaatccctcccactcaggaaagtccctagaaagagagcgcaggcgcccctgggtatcacatgacccacttcccggaagcgcagcagacccgctcaacttcatcctgggttgaggcggaggagaacttccagaattatggcgaagtccgggctgaggcaggacccgcagagcacagctgcagccactgtgctaaagcgggcagtagaactagattcggagtcgcggtatccgcaggctctggtgtgttaccaagaggggattgatctgctcctgcaggttctgaaaggtaccaaagataatactaagagatgtaatctcagagaaaaaatttccaaatacatggacagagcggaaaacataaagaagtacttggaccaagaaaaagaagatggaaaatatcacaagcaaattaaaatagaagagaatgcaacaggtttcagttatgagtcactttttcgcgaataccttaatgagacagttacagaagtttggatagaagatccttatattagacatactcatcagctgtataactttcttcgattttgtgagatgcttattaagagaccatgtaaagtaaaaactattcaccttctcacctctctggatgaaggcattgagcaagtgcagcaaagtagaggcctgcaagaaatagaagagtcactcaggagtcacggagtgctgttggaagttcaatactcttcttcaatacatgaccgagaaattaggttcaacaatggatggatgattaagattggaaggggacttgattattttaagaaaccacagacaggatttcaccatgttgcccaggctggtctcaaactcctgggctcaagcagtcctcccaccttggcctcccaaagtgctgggattacaggcatgagccactgcactcagccacattacctatatcttaaagccaaattatgttgaattcacaagtaacaaatgttcatcgagaaaaatgagaaaatacagacaagcaagaagaaaaaaataaaagcattgatagtcctaatcacaattaaaaaattg

SEQ ID NO: 368096 - DNA, 957 bp, Homo sapiens
cgtcgcagtgagcgcgacctccaaactgaggcatttttgttccggcgaaatccctcccactcaggaaagtccctagaaagagagcgcaggcgcccctgggtatcacatgacccacttcccggaagcgcagcagacccgctcaacttcatcctgggttgaggcggaggagaacttccagaattatggcgaagtccgggctgaggcaggacccgcagagcacagctgcagccactgtgctaaagcgggcagtagaactagattcggagtcgcggtatccgcaggctctggtgtgttaccaagaggggattgatctgctcctgcaggttctgaaaggtaccaaagataatactaagagatgtaatctcagagaaaaaatttccaaatacatggacagagcggaaaacataaagaagtacttggaccaagaaaaagaagatggaaaatatcacaagcaaattaaaatagaagagaatgcaacaggtttcagttatgagtcactttttcgcgaataccttaatgagacagttacagaagtttggatagaagatccttatattagacatactcatcagggcattgagcaagtgcagcaaagtagaggcctgcaagaaatagaagagtcactcaggagtcacggagtgctgttggaagttcaatactcttcttcaatacatgaccgagaaattaggttcaacaatggatggatgattaagattggaaggggacttgattattttaagaaaccacagagtcgtttttcccttggatattgtgattttgatttaagaccatgtcatgaaacaacagtagacatttttcataagaagcatacaaaaaatatatgatgggtggtagcctaatttgtattatgtctactttaagtgaatattggattttttttaaaagatcacttttataatgtatgaatttaacaataaacttttatatttctactaa

SEQ ID NO: 368097 - DNA, 693 bp, Homo sapiens
ttaaagcagaggtcagggtccagggctcctcctgcacattccccatctctaggtaggggaactcttgaaacaccaccagtttccctgaatacactttgccaccacttgttagcagaacacgaaaaagttttatcaacaagctgaaattcaagattaaactatcagataattaaatcaactgattgtttctatgactgttttcattgtggacacagctcataatgaaccccaggtttgattcaactcatgccactggaggaagtggtttgctttgttagggggaaattttgctgacacttaatacactacagctttattaatagtctgacttaaatgtcttgaatataatactatatactaatttcaacaggttcaacaatggatggatgattaagattggaaggggacttgattattttaagaaaccacaggtaggatataatcttatgagtaaatgtgtagcactgtttttgtatcatttttaatgatactcttttcttctcttcttagagtcgtttttcccttggatattgtgattttgatttaagaccatgtcatgaaacaacagtagacatttttcataagaagcatacaaaaaatatatgatgggtggtagcctaatttgtattatgtctactttaagtgaatattggattttttttaaaagatcacttttataatgtatgaatttaa

SEQ ID NO: 368098 - DNA, 1044 bp, Homo sapiens
cgtcgcagtgagcgcgacctccaaactgaggcatttttgttccggcgaaatccctcccactcaggaaagtccctagaaagagagcgcaggcgcccctgggtatcacatgacccacttcccggaagcgcagcagacccgctcaacttcatcctgggttgaggcggaggagaacttccagaattatggcgaagtccgggctgaggcaggacccgcagagcacagctgcagccactgtgctaaagcgggcagtagaactagattcggagtcgcggtatccgcaggctctggtgtgttaccaagaggggattgatctgctcctgcaggttctgaaaggtaccaaagataatactaagagatgtaatctcagagaaaaaatttccaaatacatggacagagcggaaaacataaagaagtacttggaccaagaaaaagaagatggaaaatatcacaagcaaattaaaatagaagagaatgcaacaggtttcagttatgagtcactttttcgcgaataccttaatgagacagttacagaagtttggatagaagatccttatattagacatactcatcagctgtataactttcttcgattttgtgagatgcttattaagagaccatgtaaagtaaaaactattcaccttctcacctctctggatgaaggcattgagcaagtgcagcaaagtagaggcctgcaagaaatagaagagtcactcaggagtcacggagtgctgttggaagttcaatactcttcttcaatacatgaccgagaaattaggttcaacaatggatggatgattaagattggaaggggacttgattattttaagaaaccacagagtcgtttttcccttggatattgtgattttgatttaagaccatgtcatgaaacaacagtagacatttttcataagaagcatacaaaaaatatatgatgggtggtagcctaatttgtattatgtctactttaagtgaatattggattttttttaaaagatcacttttataatgtatgaatttaacaataaacttttatatttctactaa

SEQ ID NO: 368099 - DNA, 966 bp, Homo sapiens
atgctgaggtactctgaggacccggtcgctcggacacttcccggaagcgcagcagacccgctcaacttcatcctgggttgaggcggaggagaacttccagaattatggcgaagtccgggctgaggcaggacccgcagagcacagctgcagccactgtgctaaagcgggcagtagaactagattcggagtcgcggtatccgcaggctctggtgtgttaccaagaggggattgatctgctcctgcaggttctgaaaggtaccaaagataatactaagagatgtaatctcagagaaaaaatttccaaatacatggacagagcggaaaacataaagaagtacttggaccaagaaaaagaagatggaaaatatcacaagcaaattaaaatagaagagaatgcaacaggtttcagttatgagtcactttttcgcgaataccttaatgagacagttacagaagtttggatagaagatccttatattagacatactcatcagctgtataactttcttcgattttgtgagatgcttattaagagaccatgtaaagtaaaaactattcaccttctcacctctctggatgaaggcattgagcaagtgcagcaaagtagaggcctgcaagaaatagaagagtcactcaggagtcacggagtgctgttggaagttcaatactcttcttcaatacatgaccgagaaattaggttcaacaatggatggatgattaagattggaaggggacttgattattttaagaaaccacagagtcgtttttcccttggatattgtgattttgatttaagaccatgtcatgaaacaacagtagacatttttcataagaagcatacaaaaaatatatgatgggtggtagcctaatttgtattatgtctactttaagtgaatattggattttttttaaaagatcacttttataatgtatgaatttaacaataaacttttatatttctactaa

SEQ ID NO: 368100 - DNA, 3471 bp, Homo sapiens
cgtcgcagtgagcgcgacctccaaactgaggcatttttgttccggcgaaatccctcccactcaggaaagtccctagaaagagagcgcaggcgcccctgggtatcacatgacccacttcccggaagcgcagcagacccgctcaacttcatcctgggttgaggcggaggagaacttccagaattatggcgaagtccgggctgaggcaggacccgcagagcacagctgcagccactgtgctaaagcgggcagtagaactagattcggagtcgcggtatccgcaggctctggtgtgttaccaagaggggattgatctgctcctgcaggttctgaaaggtaccaaagataatactaagagatgtaatctcagagaaaaaatttccaaatacatggacagagcggaaaacataaagaagtacttggaccaagaaaaagaaggtaaagaggttgttttagaaaatgcatccataaacaactgtgactgtccattcacccaatgtttctggctcctgccctttggagctctgtgtggtctggaccagttgtccctgggagcttacaggatttaatctgtatttccactcccatacaggagttgttcttaattttttgtttgtttgtttgttttggcttttgtttttagttgggggtgggaatatcagacacccctttgaacatctcatgaaagctatacttactggagaatgttccatgccatttttaaggggttcacaaatccctatgaagcttatgtgtggaccctatgttaagaaatactacagggaatactgaatgtaaattgtgtattttatttatatttccctttatgaaatgaccaaaatcatgaaagaagctaaagaaactcctgggatttctctcagattttgttgtgaatcaaaacacctcaggagttaagcattcctaatgattagaggtcaggtaggtattgttccctattattagttccctactcctaagcatccagtttacaaatgtctgtaaatggccatttccacccttacctgagtgcatacttgctgctttctatagccaaaggtactgctgccctcaaaagccagtgcccccaggccccagcttttcttcctctctatactttctacacccctttccccatctcttcctactatcctgtatcagtacataccctggggaccccccactgagctcctttgttcagtgggaataaagttatgtttccttagccccgatttgaaatttagaatgaaattttactccaaaacattgatgaaatatagtacctccagcattgtggttttgagtacatggaattaaattaacctctatacggctatcttggcttaaaaaataaggcatagttgccaatgttatctatgtggaaatatttggaacagaatccaaactactgatttttaaacaaagtgtaaagtataatttaggggctaccattagggtttttttttttttttttagacggagtctcgctgtgtcgcccaggctggagtgcagtggcgcgatctctgcttactgcaacctctgcctgctgggttcaagcaattcttctgtcccagcctcccgagtagctgggactacaggcacccgccgccaagcctggctcatttttgtatttttagtagagttgaggttttgccatattggtcaggctggtctctaactcctgacctcaggtgatcctcccgcctcagcctcccaaagtgctgggattacaagtgtgagccaccatgcccagccaggggtcatatttttttaaaaccttaaaggtttctgataactttttcaatattcattttgaatgaacaaaagcaatagatctatcctcttgatcctgtgacatcccagtctttagcttattaagaagtactataaatttctgtttaaaactgtacacgtgccaagaaagactttgaagcttcatattatactgcattaatttttttttttttttttaaggcagagtcttgctctgttgcccaggctggagtgcggtggcatgatctcagctcactgcaacatccacctgggttcaagtgattctcctgcctcagccccccaggtagttgggactacaggcacctgacatcatgcctggctactttttatatttttagtagagctggggtttcaccatgttggccaggctggtctcgaactcctgacctcaaatgatctacctaccttggcctcccaaaatgctgggattacaggcgtgagccaccgcgctctgccctgcattcatgtttaatactcactttagttattagattgcaagacataaaaagacaagtctgaagaggaggaccagatagccactgagtttcagtatgtggtgctacccatggcgacagggagttattggatacctttatatatacactactcccttcaacaaactgcctggtctataggatcttgctcaaggacctgttccaggaaacctctagattttcccccttgcctagcctctgtgaaggcagaaatcactaatggagtggtttgccttaaatacctttgtacgtgtaacatcctgcaatgtatatgatatttagtaggcattcaataagtatttgctgaataagttaaaaaaattaatatgtatctgatgctgattaatcactctatataaaatataaaatgtgtaaaaaaaaaatggtcactggttttactgttgaagcctgtgttttatagatggaaaatatcacaagcaaattaaaatagaagagaatgcaacaggtttcagttatgagtcactttttcgcgaataccttaatgagacagttacagaagtttggatagaagatccttatattagacatactcatcaggtatgtgaacatactaaaatataatgaaatatcatattcaatgtactaaattagtaataatccattctaatgtcttttagctgtataactttcttcgattttgtgagatgcttattaagagaccatgtaaagtaaaaactattcaccttctcacctctctggatgaaggcattgagcaagtgcagcaaagtagaggcctgcaagaaatagaagagtcactcaggagtcacggagtgctgttggaagttcaatactcttcttcaatacatgaccgagaaattaggttcaacaatggatggatgattaagattggaaggggacttgattattttaagaaaccacaggtaggatataatcttatgagtaaatgtgtagcactgtttttgtatcatttttaatgatactcttttcttctcttcttagagtcgtttttcccttggatattgtgattttgatttaagaccatgtcatgaaacaacagtagacatttttcataagaagcatacaaaaaatatatgatgggtggtagcctaatttgtattatgtctactttaagtgaatattggattttttttaaaagatcacttttataatgtatgaatttaacaataaacttttatatttctactaa

SEQ ID NO: 368101 - DNA, 904 bp, Homo sapiens
cgtcgcagtgagcgcgacctccaaactgaggcatttttgttccggcgaaatccctcccactcaggaaagtccctagaaagagagcgcaggcgcccctgggtatcacatgacccacttcccggaagcgcagcagacccgctcaacttcatcctgggttgaggcggaggagaacttccagaattatggcgaagtccgggctgaggcaggacccgcagagcacagctgcagccactgtgctaaagcgggcagtagaactagattcggagtcgcggtatccgcaggctctggtgtgttaccaagaggggattgatctgctcctgcaggttctgaaaggtaccaaagataatactaagagatgtaatctcagagaaaaaatttccaaatacatggacagagcggaaaacataaagaagtacttggaccaagaaaaagaagatggaaaatatcacaagcaaattaaaatagaagagaatgcaacaggtttcagttatgagtcactttttcgcgaataccttaatgagacagttacagaagtttggatagaagatccttatattagacatactcatcagctgtataactttcttcgattttgtgagatgcttattaagagaccatgtaaagtaaaaactattcaccttctcacctctctggatgaaggcattgagcaagtgcagcaaagtagaggcctgcaagaaatagaagagtcactcaggagtcacggagtgctgttggaagttcaatactcttcttcaatacatgaccgagaaattaggttcaacaatggatggatgattaagattggaaggggacttgattattttaagaaaccacaggttcaggtgctgataatactgaatctgaaaaattttagactcaaactaatttactaagctgtatcata

SEQ ID NO: 368102 - DNA, 1212 bp, Homo sapiens
cgtcgcagtgagcgcgacctccaaactgaggcatttttgttccggcgaaatccctcccactcaggaaagtccctagaaagagagcgcaggcgcccctgggtatcacatgacccacttcccggaagcgcagcagacccgctcaacttcatcctgggttgaggcggaggagaacttccagaattatggcgaagtccgggctgaggcaggacccgcagagcacagctgcagccactgtgctaaagcgggcagtagaactagattcggagtcgcggtatccgcaggctctggtgtgttaccaagaggggattgatctgctcctgcaggttctgaaaggtaccaaagataatactaagagatgtaatctcagagaaaaaatttccaaatacatggacagagcggaaaacataaagaagtacttggaccaagaaaaagaagaagctaaagaaactcctgggatttctctcagattttgttgtgaatcaaaacacctcaggagttaagcattcctaatgattagaggtcagatggaaaatatcacaagcaaattaaaatagaagagaatgcaacaggtttcagttatgagtcactttttcgcgaataccttaatgagacagttacagaagtttggatagaagatccttatattagacatactcatcagctgtataactttcttcgattttgtgagatgcttattaagagaccatgtaaagtaaaaactattcaccttctcacctctctggatgaaggcattgagcaagtgcagcaaagtagaggcctgcaagaaatagaagagtcactcaggagtcacggagtgctgttggaagttcaatactcttcttcaatacatgaccgagaaattaggttcaacaatggatggatgattaagattggaaggggacttgattattttaagaaaccacaggtaggatataatcttatgagtaaatgtgtagcactgtttttgtatcatttttaatgatactcttttcttctcttcttagagtcgtttttcccttggatattgtgattttgatttaagaccatgtcatgaaacaacagtagacatttttcataagaagcatacaaaaaatatatgatgggtggtagcctaatttgtattatgtctactttaagtgaatattggattttttttaaaagatcacttttataatgtatgaatttaacaataaacttttatatttctactaa

SEQ ID NO: 368103 - DNA, 3131 bp, Homo sapiens
cgtcgcagtgagcgcgacctccaaactgaggcatttttgttccggcgaaatccctcccactcaggaaagtccctagaaagagagcgcaggcgcccctgggtatcacatgacccacttcccggaagcgcagcagacccgctcaacttcatcctgggttgaggcggaggagaacttccagaattatggcgaagtccgggctgaggcaggacccgcagagcacagctgcagccactgtgctaaagcgggcagtagaactagattcggagtcgcggtatccgcaggctctggtgtgttaccaagaggggattgatctgctcctgcaggttctgaaaggtaccaaagataatactaagagatgtaatctcagagaaaaaatttccaaatacatggacagagcggaaaacataaagaagtacttggaccaagaaaaagaaggtaaagaggttgttttagaaaatgcatccataaacaactgtgactgtccattcacccaatgtttctggctcctgccctttggagctctgtgtggtctggaccagttgtccctgggagcttacaggatttaatctgtatttccactcccatacaggagttgttcttaattttttgtttgtttgtttgttttggcttttgtttttagttgggggtgggaatatcagacacccctttgaacatctcatgaaagctatacttactggagaatgttccatgccatttttaaggggttcacaaatccctatgaagcttatgtgtggaccctatgttaagaaatactacagggaatactgaatgtaaattgtgtattttatttatatttccctttatgaaatgaccaaaatcatgaaagaagctaaagaaactcctgggatttctctcagattttgttgtgaatcaaaacacctcaggagttaagcattcctaatgattagaggtcaggtaggtattgttccctattattagttccctactcctaagcatccagtttacaaatgtctgtaaatggccatttccacccttacctgagtgcatacttgctgctttctatagccaaaggtactgctgccctcaaaagccagtgcccccaggccccagcttttcttcctctctatactttctacacccctttccccatctcttcctactatcctgtatcagtacataccctggggaccccccactgagctcctttgttcagtgggaataaagttatgtttccttagccccgatttgaaatttagaatgaaattttactccaaaacattgatgaaatatagtacctccagcattgtggttttgagtacatggaattaaattaacctctatacggctatcttggcttaaaaaataaggcatagttgccaatgttatctatgtggaaatatttggaacagaatccaaactactgatttttaaacaaagtgtaaagtataatttaggggctaccattagggtttttttttttttttttagacggagtctcgctgtgtcgcccaggctggagtgcagtggcgcgatctctgcttactgcaacctctgcctgctgggttcaagcaattcttctgtcccagcctcccgagtagctgggactacaggcacccgccgccaagcctggctcatttttgtatttttagtagagttgaggttttgccatattggtcaggctggtctctaactcctgacctcaggtgatcctcccgcctcagcctcccaaagtgctgggattacaagtgtgagccaccatgcccagccaggggtcatatttttttaaaaccttaaaggtttctgataactttttcaatattcattttgaatgaacaaaagcaatagatctatcctcttgatcctgtgacatcccagtctttagcttattaagaagtactataaatttctgtttaaaactgtacacgtgccaagaaagactttgaagcttcatattatactgcattaatttttttttttttttttaaggcagagtcttgctctgttgcccaggctggagtgcggtggcatgatctcagctcactgcaacatccacctgggttcaagtgattctcctgcctcagccccccaggtagttgggactacaggcacctgacatcatgcctggctactttttatatttttagtagagctggggtttcaccatgttggccaggctggtctcgaactcctgacctcaaatgatctacctaccttggcctcccaaaatgctgggattacaggcgtgagccaccgcgctctgccctgcattcatgtttaatactcactttagttattagattgcaagacataaaaagacaagtctgaagaggaggaccagatagccactgagtttcagtatgtggtgctacccatggcgacagggagttattggatacctttatatatacactactcccttcaacaaactgcctggtctataggatcttgctcaaggacctgttccaggaaacctctagattttcccccttgcctagcctctgtgaaggcagaaatcactaatggagtggtttgccttaaatacctttgtacgtgtaacatcctgcaatgtatatgatatttagtaggcattcaataagtatttgctgaataagttaaaaaaattaatatgtatctgatgctgattaatcactctatataaaatataaaatgtgtaaaaaaaaaatggtcactggttttactgttgaagcctgtgttttatagatggaaaatatcacaagcaaattaaaatagaagagaatgcaacaggtttcagttatgagtcactttttcgcgaataccttaatgagacagttacagaagtttggatagaagatccttatattagacatactcatcaggtatgtgaacatactaaaatataatgaaatatcatattcaatgtactaaattagtaataatccattctaatgtcttttagctgtataactttcttcgattttgtgagatgcttattaagagaccatgtaaagtaaaaactattcaccttctcacctctctggatgaagtaggtacctgaaagcacttactctttcttattaactttattcagttacaagatgtagtccagtcaaggagaacacagatgcagtgcttcagctagatttgtttccttgggaattaacttatta

SEQ ID NO: 368104 - DNA, 810 bp, Homo sapiens
agatgagtttgtctagagaggctgtagcataggattgtggggccaaggatgagattctgggttacagacgtgcctaaggggctttgcttatagaaaggaaactgagagcattgctgggccatcaggttcatcaggctttacagtgctgtagtgatgtctaggaccattcttttccaggcccagtgctaaacgacggtataaaaaccagaagtttggttttggtggaaagaagaaaggctcaaagtggaacactcgggagagctatgatgatgtatctagcttccgggccaagacagctcatggcagaggcctcaagaggcctggcaagaaagggtcaaattgtaagtgagcccaggtgcccgggtgaggagcaggctcagcctcccctcccactcccaaccctgccctctcccttcagttctgttcgtcctcaccctggggcagaaggcaagctgctatgtgaccagatgtggtatgtctttttctgtagaagagacctggaaaacgaacaagagagaagatgaagaacagaacacactaaatagcatctttgaatacaaagaaccaagaaaaaggaatgaagactcgcaatttcacgacacactttgatcccttctgttggtgtcatgttgtaaacatttctttcaataaactaaagaaaaattattaaaggaacacatacctttggttaaatagtctagactaaaagattgagaagttactttccattgctatctattgataatttagacattgagttcaaattgccttcattttatgataaataatgatttaactgaaaaaaaaaaa

SEQ ID NO: 368105 - DNA, 558 bp, Homo sapiens
  misc_feature (24)..(24): n is a, c, g, or t
ggtttccggggagacacttgactncgtggtctgaaaatgctgcacagtattgtgtccagaattggttccttccggtgggttcttggtctcactgacttcaagaatgaagccacggacccttgcggttgttcccacagcctggaagtctcttccctgacttgttccacgatcaacctctactcacccttcaaggctcagctcaaatgccccttgccccagaaaccttccacaagtcctgaaggcatcactgaaccccatttccaggatgagcccacagcactgcatacaatgagttgagcagtaattatttgtatctggtccaggttcccaatgattaactccttgagagtaggaacactatcacgttcatcttggaatcctcagtgactgacacagagcttgctgtacaagaagccctcaaaaaatgtgtactgaatgaataaaatgcatgtcctagatgtttgtatctcatagcaactcttattttcatatctgccagtgtgctgaggaatggagtggggaggctgagctcctgtctgaataaacaaatgagacagt

SEQ ID NO: 368106 - DNA, 609 bp, Homo sapiens
ccagtgttctttggagtccggggaagtttggcctttaaaaatcaaactgccatggacactgctttacccaaaattttggttcacattcttcactggattaactattggggcaaacaacgtataaccatgtaaaaccagtacgcttgtattggcatttcatggctagagttctaaggttgttcccacagcctggaagtctcttccctgacttgttccacgatcaacctctactcacccttcaaggctcagctcaaatgccccttgccccagaaaccttccacaagtcctgaaggcatcactgaaccccatttccaggatgagcccacagcactgcatacaatgagttgagcagtaattatttgtatctggtccaggttcccaatgattaactccttgagagtaggaacactatcacgttcatcttggaatcctcagtgactgacacagagcttgctgtacaagaagccctcaaaaaatgtgtactgaatgaataaaatgcatgtcctagatgtttgtatctcatagcaactcttattttcatatctgccagtgtgctgaggaatggagtggggaggctgagctcctgtctgaataaacaaatgagacagt

SEQ ID NO: 368107 - DNA, 737 bp, Homo sapiens
ccagtgttctttggagtccggggaagtttggcctttaaaaatcaaactgccatggacactgctttacccaaaattttggttcacattcttcactggattaactattggggcaaacaacgtataaccatgtaaaaccagtacgcttgtattggcatttcatggctagagttctaagtcacaagcacctcttcggcaaagcccacctccctctctcgcttgattccccggccatccttatcaaagaccttccaggtgaacaggcagccatcctcagcagcagtcagcaggaactgatcatcaaagaatctcgctctgttgcccaggctggagtgtagtggtgcgatctcggctcactgaaacctccgcctcccaggttcaagcgattctcctgcctcagtctcccgagtagctgggactacagaaacttgcaaaaatagcacagagagagtggacttctggaatggcacggcaacaaaattccctacggcagcacccaaaggcttgaaattagccattccaagtgtgtccaaaaaactaaaggaaaccatgattaaacaagtaaaggtagaaatgatatgcatcaaatagagaagaataaaaggatcccatcaatatagggatagaactgtaagaaaatagaaattctagagttaaaaactacaataactgaaatgaaaaatccactagaggtgctcaagaatagatctgaactggcagaagaattagtgaactttata

SEQ ID NO: 368108 - DNA, 828 bp, Homo sapiens
ccagtgttctttggagtccggggaagtttggcctttaaaaatcaaactgccatggacactgctttacccaaaattttggttcacattcttcactggattaactattggggcaaacaacgtataaccatgtaaaaccagtacgcttgtattggcatttcatggctagagttctaagtcacaagcacctcttcggcaaagcccacctccctctctcgcttgattccccggccatccttatcaaagaccttccaggtgaacaggcagccatcctcagcagcagtcagcaggaactgatcatcaaagaatctcgctctgttgcccaggctggagtgtagtggtgcgatctcggctcactgaaacctccgcctcccaggttcaagcgattctcctgcctcagtctcccgagtagctgggactacagaaacttgcaaaaatagcacagagagagtggacttctggaatggcacgagacggagtttcaccgtgttatccaggatgatctccatctcctgacctcgtgatccgcccacctcagcctcccaaagtgctgggattacaggcaacaaaattccctacggcagcacccaaaggcttgaaattagccattccaagtgtgtccaaaaaactaaaggaaaccatgattaaacaagtaaaggtagaaatgatatgcatcaaatagagaagaataaaaggatcccatcaatatagggatagaactgtaagaaaatagaaattctagagttaaaaactacaataactgaaatgaaaaatccactagaggtgctcaagaatagatctgaactggcagaagaattagtgaactttata

SEQ ID NO: 368109 - DNA, 351 bp, Homo sapiens
  misc_feature (24)..(24): n is a, c, g, or t
ggtttccggggagacacttgactncgtggtctgaaaatgctgcacagtattgtgtccagaattggttccttccggtgggttcttggtctcactgacttcaagaatgaagccacggacccttgcgtcacaagcacctcttcggcaaagcccacctccctctctcgcttgattccccggccatccttatcaaagaccttccaggtgaacaggcagccatcctcagcagcagtcagcaggaactgatcatcaaagccagtagacaagatttgactctggaggtgacgtctgagccaataggtatttggagtctggagaaaaagccatgctaataaatttctgaacttggaagtc

SEQ ID NO: 368110 - DNA, 402 bp, Homo sapiens
ccagtgttctttggagtccggggaagtttggcctttaaaaatcaaactgccatggacactgctttacccaaaattttggttcacattcttcactggattaactattggggcaaacaacgtataaccatgtaaaaccagtacgcttgtattggcatttcatggctagagttctaagtcacaagcacctcttcggcaaagcccacctccctctctcgcttgattccccggccatccttatcaaagaccttccaggtgaacaggcagccatcctcagcagcagtcagcaggaactgatcatcaaagccagtagacaagatttgactctggaggtgacgtctgagccaataggtatttggagtctggagaaaaagccatgctaataaatttctgaacttggaagtc

SEQ ID NO: 368111 - DNA, 1882 bp, Homo sapiens
  misc_feature (24)..(24): n is a, c, g, or t
ggtttccggggagacacttgactncgtggtctgaaaatgctgcacagtattgtgtccagaattggttccttccggtgggttcttggtctcactgacttcaagaatgaagccacggacccttgcgtcacaagcacctcttcggcaaagcccacctccctctctcgcttgattccccggccatccttatcaaagaccttccaggtgaacaggcagccatcctcagcagcagtcagcaggaactgatcatcaaagaatctcgctctgttgcccaggctggagtgtagtggtgcgatctcggctcactgaaacctccgcctcccaggttcaagcgattctcctgcctcagtctcccgagtagctgggactacagtgatttcctgaaggaaatataatgatctgttcatcgaagtagaagatattgttggccacgtgggatcgaagaccaaaaacatgcagcgtctgagctaccacggctgacatgatctcccgccaaacagttctgctgaagaccaagaccacgcatgtatccagaggcgctacctgtagggatcctaagcaacccggacactttcaaacgccgtagcggttcctatagcaacgacaaaccggaagtatggtttgccgccggaagcggaagtcccaatcaaaagttgagcagtagctgtgagttgctggcgctggagcgattcggtggcacgtggagccacggcgtgggagtagggggctgaaggcaggcagcagcggccaggccgccctctgctagccgcttgggtctcgggataccccgtttcttcctgtaggtgtgggacgtgcgtgcggcgagatggacactcccccgctctcggattcggagtcggaatccgatgaatcccttgtcacagacagagagttgcaggatgcgttttcccgagggcttctgaagccaggcctcaatgtcgtgctagaggggccgaagaaggccgtgaacgacgtgaatggcctgaagcaatgtttggcagaattcaagcgggatctggaatgggttgaaaggctcgatgtgacactgggtccggtaccggagatcggtggatctgaggcgccagcacctcagaacaaggaccagaaagctgttgatccagaagacgacttccagcgagagatgagtttctatcgccaagcccaggccgcagtgcttgcagtcttaccccgcctccatcagctcaaagtccctacgaagcgacccactgattattttgcggaaatggccaaatctgatctgcagatgcagaagattcgacagaagctgcagactaaacaggctgccatggagaggtctgaaaaagctaagcaactgcgagcacttaggaaatacgggaagaaggtgcaaacggaggttcttcagaagaggcagcaggagaaagcccatatgatgaatgctattaagaaatatcagaaaggcttctctgataaactggatttccttgagggagatcagaaacctctggcacagcgcaagaaggcaggagccaaaggccagcagatgaggaaggggcccagtgctaaacgacggtataaaaaccagaagtttggttttggtggaaagaagaaaggctcaaagtggaacactcgggagagctatgatgatgtatctagcttccgggccaagacagctcatggcagaggcctcaagaggcctggcaagaaagggtcaaataagagacctggaaaacgaacaagagagaagatgaagaacagaacacactaaatagcatctttgaatacaaagaaccaagaaaaaggaatgaagactcgcaatttcacgacacactttgatcccttctgttggtgtcatgttgtaaacatttctttcaataaactaaagaaaaattattaaaggaacaca

SEQ ID NO: 368112 - DNA, 2013 bp, Homo sapiens
  misc_feature (24)..(24): n is a, c, g, or t
ggtttccggggagacacttgactncgtggtctgaaaatgctgcacagtattgtgtccagaattggttccttccggtgggttcttggtctcactgacttcaagaatgaagccacggacccttgcgtcacaagcacctcttcggcaaagcccacctccctctctcgcttgattccccggccatccttatcaaagaccttccaggtgaacaggcagccatcctcagcagcagtcagcaggaactgatcatcaaagaatctcgctctgttgcccaggctggagtgtagtggtgcgatctcggctcactgaaacctccgcctcccaggttcaagcgattctcctgcctcagtctcccgagtagctgggactacagtgatttcctgaaggaaatataatgatctgttcatcgaagtagaagatattgttggccacgtgggatcgaagaccaaaaacatgcagcgtctgagctaccacggctgacatgatctcccgccaaacagttctgctgaagaccaagaccacgcatgtatccagaggcgctacctgtagggatcctaagcaacccggacactttcaaacgccgtagcggttcctatagcaacgacaaaccggaagtatggtttgccgccggaagcggaagtcccaatcaaaagttgagcagtagctgtgagttgctggcgctggagcgattcggtggcacgtggagccacggcgtgggagtagggggctgaaggcaggcagcagcggccaggccgccctctgctagccgcttgggtctcgggataccccgtttcttcctgtaggtgtgggacgtgcgtgcggcgagatggacactcccccgctctcggattcggagtcggaatccgatgaatcccttgtcacagacagagagttgcaggatgcgttttcccgagggcttctgaagccaggcctcaatgtcgtgctagaggggccgaagaaggccgtgaacgacgtgaatggcctgaagcaatgtttggcagaattcaagcgggatctggaatgggttgaaaggctcgatgtgacactgggtccggtaccggagatcggtggatctgaggcgccagcacctcagaacaaggaccagaaagctgttgatccagaagacgacttccagcgagagatgagtttctatcgccaagcccaggccgcagtgcttgcagtcttaccccgcctccatcagctcaaagtccctacgaagcgacccactgattattttgcggaaatggccaaatctgatctgcagatgcagaagattcgacagaagctgcagactaaacaggctgccatggagaggtctgaaaaagctaagcaactgcgagcacttaggaaatacgggaagaaggtgcaaacggaggttcttcagaagaggcagcaggagaaagcccatatgatgaatgctattaagaaatatcagaaaggcttctctgataaactggatttccttgagggagatcagaaacctctggcacagcgcaagaaggcaggagccaaaggccagcagatgaggaaggggcccagtgctaaacgacggtataaaaaccagaagtttggttttggtggaaagaagaaaggctcaaagtggaacactcgggagagctatgatgatgtatctagcttccgggccaagacagctcatggcagaggcctcaagaggcctggcaagaaagggtcaaataagagacctggaaaacgaacaagagagaagatgaagaacagaacacactaaatagcatctttgaatacaaagaaccaagaaaaaggaatgaagactcgcaatttcacgacacactttgatcccttctgttggtgtcatgttgtaaacatttctttcaataaactaaagaaaaattattaaaggaacacatacctttggttaaatagtctagactaaaagattgagaagttactttccattgctatctattgataatttagacattgagttcaaattgccttcattttatgataaataatgatttaactgaaaaaaaaaaa

SEQ ID NO: 368113 - DNA, 2732 bp, Homo sapiens
  misc_feature (24)..(24): n is a, c, g, or t
  misc_feature (1886)..(1886): n is a, c, g, or t
ggtttccggggagacacttgactncgtggtctgaaaatgctgcacagtattgtgtccagaattggttccttccggtgggttcttggtctcactgacttcaagaatgaagccacggacccttgcgtcacaagcacctcttcggcaaagcccacctccctctctcgcttgattccccggccatccttatcaaagaccttccaggtgaacaggcagccatcctcagcagcagtcagcaggaactgatcatcaaagaatctcgctctgttgcccaggctggagtgtagtggtgcgatctcggctcactgaaacctccgcctcccaggttcaagcgattctcctgcctcagtctcccgagtagctgggactacagtgatttcctgaaggaaatataatgatctgttcatcgaagtagaagatattgttggccacgtgggatcgaagaccaaaaacatgcagcgtctgagctaccacggctgacatgatctcccgccaaacagttctgctgaagaccaagaccacgcatgtatccagaggcgctacctgtagggatcctaagcaacccggacactttcaaacgccgtagcggttcctatagcaacgacaaaccggaagtatggtttgccgccggaagcggaagtcccaatcaaaagttgagcagtagctgtgagttgctggcgctggagcgattcggtggcacgtggagccacggcgtgggagtagggggctgaaggcaggcagcagcggccaggccgccctctgctagccgcttgggtctcgggataccccgtttcttcctgtaggtgtgggacgtgcgtgcggcgagatggacactcccccgctctcggattcggagtcggaatccgatgaatcccttgtcacagacagagagttgcaggatgcgttttcccgagggcttctgaagccaggcctcaatgtcgtgctagaggggccgaagaaggccgtgaacgacgtgaatggcctgaagcaatgtttggcagaattcaagcgggatctggaatgggttgaaaggctcgatgtgacactgggtccggtaccggagatcggtggatctgaggcgccagcacctcagaacaaggaccagaaagctgttgatccagaagacgacttccagcgagagatgagtttctatcgccaagcccaggccgcagtgcttgcagtcttaccccgcctccatcagctcaaagtccctacgaagcgacccactgattattttgcggaaatggccaaatctgatctgcagatgcagaagattcgacagaagctgcagactaaacaggctgccatggagaggtctgaaaaagctaagcaactgcgagcacttaggaaatacgggaagaaggtgcaaacggaggttcttcagaagaggcagcaggagaaagcccatatgatgaatgctattaagaaatatcagaaaggcttctctgataaactggatttccttgagggagatcagaaacctctggcacagcgcaagaaggcaggagccaaaggccagcagatgaggaaggggcccagtgctaaacgacggtataaaaaccagaagtttggttttggtggaaagaagaaaggctcaaagtggaacactcgggagagctatgatgatgtatctagcttccgggccaagacagctcatggcagaggcctcaagaggcctggcaagaaagggtcaaataagagacctggaaaacgaacaagagagaagatgaagaacagaacacactaaatagcatctttgaatacaaagaaccaagaaaaaggaatgaagactcgcaatttcacgacacactttgatcccttctgttggtgtcatgttgtaaacatttctttcaataaactaaagaaaaattattaaaggaacacaaaanaaaaaaaaaaaaaaaaaaaaaacaagagagcagacagacacacacaacaaaaaataaaaaaaaaagagagagacacacaaaaaataacaaagaaacacaaacatacaatgaaaacaagaagagagaagaccaaaatgataaagaacacacaaattataatcaacagaagacaaagcaggccaaaagagtatctaaaaagcagcagacagagcgaaagggggaaacaacaaggcaaaaaatggagggaaatcacttcggccacgaagagagaaacaccctaacacatcagctgggggggcaagcaaccgcaataacagtggggaaaaaaaagagaggacacaaccaacagcagaagagaatgacagagcggccctccgaaggacgggacaaagccacagacaaaaggcgacccacagcggtgcgacaataaaaagcagtagagaataaaacaaaaagacgagagggacaaaattaggagcaacagaaagcgaaaagaaacgacaaaaacaatcaggcggaccaaacacggcgggaagaaaagtagcaagatcagagtggccaaacccaagcactaacaagaagccagggagaaacactaaggagcgagaaataagcgagacgagagagagagcgcgaggacagagagacgggcagagagaaagagagcaagcgagagggaaggagggagaagagagcgaaggaagaagaggaagagaagaaggagaacaaagacaacagacgctaagacgaacagacgaccaagagagaaaaaaagcaagcggcacaaaggaaaggagcgcacgaagccagaagacagctgaaaacgacagccagagaaagacagag

SEQ ID NO: 368114 - DNA, 2163 bp, Homo sapiens
  misc_feature (24)..(24): n is a, c, g, or t
ggtttccggggagacacttgactncgtggtctgaaaatgctgcacagtattgtgtccagaattggttccttccggtgggttcttggtctcactgacttcaagaatgaagccacggacccttgcgtcacaagcacctcttcggcaaagcccacctccctctctcgcttgattccccggccatccttatcaaagaccttccaggtgaacaggcagccatcctcagcagcagtcagcaggaactgatcatcaaagaatctcgctctgttgcccaggctggagtgtagtggtgcgatctcggctcactgaaacctccgcctcccaggttcaagcgattctcctgcctcagtctcccgagtagctgggactacagtgatttcctgaaggaaatataatgatctgttcatcgaagtagaagatattgttggccacgtgggatcgaagaccaaaaacatgcagcgtctgagctaccacggctgacatgatctcccgccaaacagttctgctgaagaccaagaccacgcatgtatccagaggcgctacctgtagggatcctaagcaacccggacactttcaaacgccgtagcggttcctatagcaacgacaaaccggaagtatggtttgccgccggaagcggaagtcccaatcaaaagttgagcagtagctgtgagttgctggcgctggagcgattcggtggcacgtggagccacggcgtgggagtagggggctgaaggcaggcagcagcggccaggccgccctctgctagccgcttgggtctcgggataccccgtttcttcctgtaggtgtgggacgtgcgtgcggcgagatggacactcccccgctctcggattcggagtcggaatccgatgaatcccttgtcacagacagagagttgcaggatgcgttttcccgagggcttctgaagccaggcctcaatgtcgtgctagaggggccgaagaaggccgtgaacgacgtgaatggcctgaagcaatgtttggcagaattcaagcgggatctggaatgggttgaaaggctcgatgtgacactgggtccggtaccggagatcggtggatctgaggcgccagcacctcagaacaaggaccagaaagctgttgatccagaagacgacttccagcgagagatgagtttctatcgccaagcccaggccgcagtgcttgcagtcttaccccgcctccatcagctcaaagtccctacgaagcgacccactgattattttgcggaaatggccaaatctgatctgcagatgcagaagattcgacagaagctgcagactaaacaggctgccatggagaggtctgaaaaagctaagcaactgcgagcacttaggaaatacgggaagaaggtgcaaacggaggttcttcagaagaggcagcaggagaaagcccatatgatgaatgctattaagaaatatcagaaaggcttctctgataaactggatttccttgagggagatcagaaacctctggcacagcgcaagaaggcaggagccaaaggccagcagatgaggaaggggcccagtgctaaacgacggtataaaaaccagaagtttggttttggtggaaagaagaaaggctcaaagtggaacactcgggagagctatgatgatgtatctagcttccgggccaagacagctcatggcagaggcctcaagaggcctggcaagaaagggtcaaattgtaagtgagcccaggtgcccgggtgaggagcaggctcagcctcccctcccactcccaaccctgccctctcccttcagttctgttcgtcctcaccctggggcagaaggcaagctgctatgtgaccagatgtggtatgtctttttctgtagaagagacctggaaaacgaacaagagagaagatgaagaacagaacacactaaatagcatctttgaatacaaagaaccaagaaaaaggaatgaagactcgcaatttcacgacacactttgatcccttctgttggtgtcatgttgtaaacatttctttcaataaactaaagaaaaattattaaaggaacacatacctttggttaaatagtctagactaaaagattgagaagttactttccattgctatctattgataatttagacattgagttcaaattgccttcattttatgataaataatgatttaactgaaaaaaaaaaa

SEQ ID NO: 368115 - DNA, 2032 bp, Homo sapiens
  misc_feature (24)..(24): n is a, c, g, or t
ggtttccggggagacacttgactncgtggtctgaaaatgctgcacagtattgtgtccagaattggttccttccggtgggttcttggtctcactgacttcaagaatgaagccacggacccttgcgtcacaagcacctcttcggcaaagcccacctccctctctcgcttgattccccggccatccttatcaaagaccttccaggtgaacaggcagccatcctcagcagcagtcagcaggaactgatcatcaaagaatctcgctctgttgcccaggctggagtgtagtggtgcgatctcggctcactgaaacctccgcctcccaggttcaagcgattctcctgcctcagtctcccgagtagctgggactacagtgatttcctgaaggaaatataatgatctgttcatcgaagtagaagatattgttggccacgtgggatcgaagaccaaaaacatgcagcgtctgagctaccacggctgacatgatctcccgccaaacagttctgctgaagaccaagaccacgcatgtatccagaggcgctacctgtagggatcctaagcaacccggacactttcaaacgccgtagcggttcctatagcaacgacaaaccggaagtatggtttgccgccggaagcggaagtcccaatcaaaagttgagcagtagctgtgagttgctggcgctggagcgattcggtggcacgtggagccacggcgtgggagtagggggctgaaggcaggcagcagcggccaggccgccctctgctagccgcttgggtctcgggataccccgtttcttcctgtaggtgtgggacgtgcgtgcggcgagatggacactcccccgctctcggattcggagtcggaatccgatgaatcccttgtcacagacagagagttgcaggatgcgttttcccgagggcttctgaagccaggcctcaatgtcgtgctagaggggccgaagaaggccgtgaacgacgtgaatggcctgaagcaatgtttggcagaattcaagcgggatctggaatgggttgaaaggctcgatgtgacactgggtccggtaccggagatcggtggatctgaggcgccagcacctcagaacaaggaccagaaagctgttgatccagaagacgacttccagcgagagatgagtttctatcgccaagcccaggccgcagtgcttgcagtcttaccccgcctccatcagctcaaagtccctacgaagcgacccactgattattttgcggaaatggccaaatctgatctgcagatgcagaagattcgacagaagctgcagactaaacaggctgccatggagaggtctgaaaaagctaagcaactgcgagcacttaggaaatacgggaagaaggtgcaaacggaggttcttcagaagaggcagcaggagaaagcccatatgatgaatgctattaagaaatatcagaaaggcttctctgataaactggatttccttgagggagatcagaaacctctggcacagcgcaagaaggcaggagccaaaggccagcagatgaggaaggggcccagtgctaaacgacggtataaaaaccagaagtttggttttggtggaaagaagaaaggctcaaagtggaacactcgggagagctatgatgatgtatctagcttccgggccaagacagctcatggcagaggcctcaagaggcctggcaagaaagggtcaaattgtaagtgagcccaggtgcccgggtgaggagcaggctcagcctcccctcccactcccaaccctgccctctcccttcagttctgttcgtcctcaccctggggcagaaggcaagctgctatgtgaccagatgtggtatgtctttttctgtagaagagacctggaaaacgaacaagagagaagatgaagaacagaacacactaaatagcatctttgaatacaaagaaccaagaaaaaggaatgaagactcgcaatttcacgacacactttgatcccttctgttggtgtcatgttgtaaacatttctttcaataaactaaagaaaaattattaaaggaacaca

SEQ ID NO: 368116 - DNA, 1926 bp, Homo sapiens
  misc_feature (24)..(24): n is a, c, g, or t
  misc_feature (1540)..(1540): n is a, c, g, or t
  misc_feature (1550)..(1550): n is a, c, g, or t
  misc_feature (1557)..(1557): n is a, c, g, or t
  misc_feature (1574)..(1574): n is a, c, g, or t
ggtttccggggagacacttgactncgtggtctgaaaatgctgcacagtattgtgtccagaattggttccttccggtgggttcttggtctcactgacttcaagaatgaagccacggacccttgcgtcacaagcacctcttcggcaaagcccacctccctctctcgcttgattccccggccatccttatcaaagaccttccaggtgaacaggcagccatcctcagcagcagtcagcaggaactgatcatcaaagaatctcgctctgttgcccaggctggagtgtagtggtgcgatctcggctcactgaaacctccgcctcccaggttcaagcgattctcctgcctcagtctcccgagtagctgggactacagtgatttcctgaaggaaatataatgatctgttcatcgaagtagaagatattgttggccacgtgggatcgaagaccaaaaacatgcagcgtctgagctaccacggctgacatgatctcccgccaaacagttctgctgaagaccaagaccacgcatgtatccagaggcgctacctgtagggatcctaagcaacccggacactttcaaacgccgtagcggttcctatagcaacgacaaaccggaagtatggtttgccgccggaagcggaagtcccaatcaaaagttgagcagtagctgtgagttgctggcgctggagcgattcggtggcacgtggagccacggcgtgggagtagggggctgaaggcaggcagcagcggccaggccgccctctgctagccgcttgggtctcgggataccccgtttcttcctgtaggtgtgggacgtgcgtgcggcgagatggacactcccccgctctcggattcggagtcggaatccgatgaatcccttgtcacagacagagagttgcaggatgcgttttcccgagggcttctgaagccaggcctcaatgtcgtgctagaggggccgaagaaggccgtgaacgacgtgaatggcctgaagcaatgtttggcagaattcaagcgggatctggaatgggttgaaaggctcgatgtgacactgggtccggtaccggagatcggtggatctgaggcgccagcacctcagaacaaggaccagaaagctgttgatccagaagacgacttccagcgagagatgagtttctatcgccaagcccaggccgcagtgcttgcagtcttaccccgcctccatcagctcaaagtccctacgaagcgacccactgattattttgcggaaatggccaaatctgatctgcagatgcagaagattcgacagaagctgcagactaaacaggctgccatggagaggtctgaaaaagctaagcaactgcgagcacttaggaaatacgggaagaaggtgcaaacggaggttcttcagaagaggcagcaggagaaagcccatatgatgaatgctattaagaaatatcagaaaggcttctctgataaactggatttccttgagggagatcagaaacctctggcacagcgcaagaaggcaggagccaaaggccagcagatgaggaagggcccaacgggnccccaacggnaaatttntgaaaaggggaaagggngcccagtgctaaacgacggtataaaaaccagaagtttggttttggtggaaagaagaaaggctcaaagtggaacactcgggagagctatgatgatgtatctagcttccgggccaagacagctcatggcagaggcctcaagaggcctggcaagaaagggtcaaataagagacctggaaaacgaacaagagagaagatgaagaacagaacacactaaatagcatctttgaatacaaagaaccaagaaaaaggaatgaagactcgcaatttcacgacacactttgatcccttctgttggtgtcatgttgtaaacatttctttcaataaactaaagaaaaattattaaaggaacaca

SEQ ID NO: 368117 - DNA, 1624 bp, Homo sapiens
  misc_feature (24)..(24): n is a, c, g, or t
ggtttccggggagacacttgactncgtggtctgaaaatgctgcacagtattgtgtccagaattggttccttccggtgggttcttggtctcactgacttcaagaatgaagccacggacccttgcgtcacaagcacctcttcggcaaagcccacctccctctctcgcttgattccccggccatccttatcaaagaccttccaggttcaagcgattctcctgcctcagtctcccgagtagctgggactacagtgatttcctgaaggaaatataatgatctgttcatcgaagtagaagatattgttggccacgtgggatcgaagaccaaaaacatgcagcgtctgagctaccacggctgacatgatctcccgccaaacagttctgctgaagaccaagaccacgcatgtatccagaggcgctacctgtagggatcctaagcaacccggacactttcaaacgccgtagcggttcctatagcaacgacaaaccggaagtatggtttgccgccggaagcggaagtcccaatcaaaagttgagcagtagctgtgtgggacgtgcgtgcggcgagatggacactcccccgctctcggattcggagtcggaatccgatgaatcccttgtcacagacagagagttgcaggatgcgttttcccgagggcttctgaagccaggcctcaatgtcgtgctagaggggccgaagaaggccgtgaacgacgtgaatggcctgaagcaatgtttggcagaattcaagcgggatctggaatgggttgaaaggctcgatgtgacactgggtccggtaccggagatcggtggatctgaggcgccagcacctcagaacaaggaccagaaagctgttgatccagaagacgacttccagcgagagatgagtttctatcgccaagcccaggccgcagtgcttgcagtcttaccccgcctccatcagctcaaagtccctacgaagcgacccactgattattttgcggaaatggccaaatctgatctgcagatgcagaagattcgacagaagctgcagactaaacaggctgccatggagaggtctgaaaaagctaagcaactgcgagcacttaggaaatacgggaagaaggtgcaaacggaggttcttcagaagaggcagcaggagaaagcccatatgatgaatgctattaagaaatatcagaaaggcttctctgataaactggatttccttgagggagatcagaaacctctggcacagcgcaagaaggcaggagccaaaggccagcagatgaggaaggggcccagtgctaaacgacggtataaaaaccagaagtttggttttggtggaaagaagaaaggctcaaagtggaacactcgggagagctatgatgatgtatctagcttccgggccaagacagctcatggcagaggcctcaagaggcctggcaagaaagggtcaaataagagacctggaaaacgaacaagagagaagatgaagaacagaacacactaaatagcatctttgaatacaaagaaccaagaaaaaggaatgaagactcgcaatttcacgacacactttgatcccttctgttggtgtcatgttgtaaacatttctttcaataaactaaagaaaaattattaaaggaacaca

SEQ ID NO: 368118 - DNA, 1250 bp, Homo sapiens
  misc_feature (142)..(142): n is a, c, g, or t
  misc_feature (145)..(145): n is a, c, g, or t
gttgagccacggtgtgtgcagtagtggcgcgtcctagtaacgcctgcttgcatcggccagaggccgcctctctgcgtagcgcgtttgtcgtctcgcggatacacccgcgtttcttctctgatcggctagtagggtaccgctncgntgtcgtcgcgcatgtactggtatcatacatctccccgtctctcgggattcgccagtcgtgacctccgcatgtaattccactgcatcacagtacagcagacgttgtccggatgtcgtcaccccggaaggtcttctgaaaccagggctcttgtgtcatgactacagagggccgaaagaaggccgtgcattacgacgtgaatggcctgaagcaatgtttggcagaattcaagcgggatctggaatgggttgaaaggctcgatgtgacactgggtccggtaccggagatcggtggatctgaggcgccagcacctcagaacaaggaccagaaagctgttgatccagaagacgacttccagcgagagatgagtttctatcgccaagcccaggccgcagtgcttgcagtcttaccccgcctccatcagctcaaagtccctacgaagcgacccactgattattttgcggaaatggccaaatctgatctgcagatgcagaagattcgacagaagctgcagactaaacaggctgccatggagaggtctgaaaaagctaagcaactgcgagcacttaggaaatacgggaagaaggtgcaaacggaggttcttcagaagaggcagcaggagaaagcccatatgatgaatgctattaagaaatatcagaaaggcttctctgataaactggatttccttgagggagatcagaaacctctggcacagcgcaagaaggcaggagccaaaggccagcagatgaggaaggggcccagtgctaaacgacggtataaaaaccagaagtttggttttggtggaaagaagaaaggctcaaagtggaacactcgggagagctatgatgatgtatctagcttccgggccaagacagctcatggcagaggcctcaagaggcctggcaagaaagggtcaaataagagacctggaaaacgaacaagagagaagatgaagaacagaacacactaaatagcatctttgaatacaaagaaccaagaaaaaggaatgaagactcgcaatttcacgacacactttgatcccttctgttggtgtcatgttgtaaacatttctttcaataaactaaagaaaaattattaaaggaacaca

SEQ ID NO: 368119 - DNA, 1820 bp, Homo sapiens
  misc_feature (24)..(24): n is a, c, g, or t
ggtttccggggagacacttgactncgtggtctgaaaatgctgcacagtattgtgtccagaattggttccttccggtgggttcttggtctcactgacttcaagaatgaagccacggacccttgcgtcacaagcacctcttcggcaaagcccacctccctctctcgcttgattccccggccatccttatcaaagaccttccaggtgaacaggcagccatcctcagcagcagtcagcaggaactgatcatcaaagaatctcgctctgttgcccaggctggagtgtagtggtgcgatctcggctcactgaaacctccgcctcccaggttcaagcgattctcctgcctcagtctcccgagtagctgggactacagtgatttcctgaaggaaatataatgatctgttcatcgaagtagaagatattgttggccacgtgggatcgaagaccaaaaacatgcagcgtctgagctaccacggctgacatgatctcccgccaaacagttctgctgaagaccaagaccacgcatgtatccagaggcgctacctgtagggatcctaagcaacccggacactttcaaacgccgtagcggttcctatagcaacgacaaaccggaagtatggtttgccgccggaagcggaagtcccaatcaaaagttgagcagtagctgtgagttgctggcgctggagcgattcggtggcacgtggagccacggcgtgggagtagggggctgaaggcaggcagcagcggccaggccgccctctgctagccgcttgggtctcgggataccccgtttcttcctgtaggtgtgggacgtgcgtgcggcgagatggacactcccccgctctcggattcggagtcggaatccgatgaatcccttgtcacagacagagagttgcaggatgcgttttcccgagggcttctgaagccaggcctcaatgtcgtgctagaggggccgaagaaggccgtgaacgacgtgaatggcctgaagcaatgtttggcagaattcaagcgggatctggaatgggttgaaaggctcgatgtgacactgggtccggtaccggagatcggtggatctgaggcgccagcacctcagaacaaggaccagaaagctgttgatccagaagacgacttccagcgagagatgagtttctatcgccaagcccaggccgcagtgcttgcagtcttaccccgcctccatcagctcaaagtccctacgaagcgacccactgattattttgcggaaatggccaaatctgatctgcagatgcagaagattcgacagaagctgcagactaaacaggctgccatggagaggtctgaaaaagctaagcaactgcgagcacttaggaaatacgggaagaaggtgcaaacggaggttcttcagaagaggcagcaggagaaagcccatatgatgaatgctattaagaaatatcagaaaggtctctgattaactggattcttgagggagatcggaactctggacagggccaagatggaggagccataggccaccgacataggaaggggccagggcaaagacgggataaaccagaaagttggcggtcgggtcgcaacaacacagcggccccaaggtcgcacccctggcagcacgcagtaccgaagtacttacaacaggaggcagacaaccattgcagacgccacaagacgggaacaagcataatcacacccgcacagcagacaatcaatctagaccccagacgcgtcacacacacacgactacacgacaaccgaccagtgcgatggcaatacaacaaaaaaagagcacagagcacgtcatagacgaaaggaggaccgatgtcctc

SEQ ID NO: 368120 - DNA, 1067 bp, Homo sapiens
  misc_feature (195)..(195): n is a, c, g, or t
cgcttcgcgtcttaccccgctccatcagctcaaagtccctaccaagcgaccactgattattttgcggaaatggccaaatctgatctgcagatgcgaagattcgacagaagctgcagactaaacaggctccatggagaggtctgaaaaagctaagcaactgcgagcacttaggaaatacgggaagaaggtgcaaanggaggtcttcagaagacggcagcggggtcagattttgagagtccttctgagcttggataactcatgattggcggtgaaaaggaacgtaaggcctcctccttcacctcattacacattttgtcctacgattctcagcctatcgccaagcccaggccgcagtgcttgcagtcttaccccgcctccatcagctcaaagtccctacgaagcgacccactgattattttgcggaaatggccaaatctgatctgcagatgcagaagattcgacagaagctgcagactaaacaggctgccatggagaggtctgaaaaagctaagcaactgcgagcacttaggaaatacgggaagaaggtgcaaacggaggttcttcagaagaggcagcaggagaaagcccatatgatgaatgctattaagaaatatcagaaaggcttctctgataaactggatttccttgagggagatcagaaacctctggcacagcgcaagaaggcaggagccaaaggccagcagatgaggaaggggcccagtgctaaacgacggtataaaaaccagaagtttggttttggtggaaagaagaaaggctcaaagtggaacactcgggagagctatgatgatgtatctagcttccgggccaagacagctcatggcagaggcctcaagaggcctggcaagaaagggtcaaataagagacctggaaaacgaacaagagagaagatgaagaacagaacacactaaatagcatctttgaatacaaagaaccaagaaaaaggaatgaagactcgcaatttcacgacacactttgatcccttctgttggtgtcatgttgtaaacatttctttcaataaactaaagaaaaattattaaaggaacaca

SEQ ID NO: 368121 - DNA, 1043 bp, Homo sapiens
gcgtgccttgtcctggtctcgtgagttctttatatgcttctcctcatttttgcctgaaagcacgaagaacacacattaaagcttttcctccttgaacagcttgtggcctagatgagaatgtagctattccaggcatagtctggattatttgatgaaatatctcctccatgtcattttctgacacggtctacattgttgccgttctttatggtaatctggactaggtgttttttcttaatccactgctgaatctgtttagtctttgtgtccaaatcatgttgtccaatattggaagacaaaagcagttcctttctcagggttggtccagttttgggtttcgccttccccgcctccatcagctcaaagtccctacgaagcgacccactgattattttgcggaaatggccaaatctgatctgcagatgcagaagattcgacagaagctgcagactaaacaggctgccatggagaggtctgaaaaagctaagcaactgcgagcacttaggaaatacgggaagaaggtgcaaacggaggttcttcagaagaggcagcaggagaaagcccatatgatgaatgctattaagaaatatcagaaaggcttctctgataaactggatttccttgagggagatcagaaacctctggcacagcgcaagaaggcaggagccaaaggccagcagatgaggaaggggcccagtgctaaacgacggtataaaaaccagaagtttggttttggtggaaagaagaaaggctcaaagtggaacactcgggagagctatgatgatgtatctagcttccgggccaagacagctcatggcagaggcctcaagaggcctggcaagaaagggtcaaataagagacctggaaaacgaacaagagagaagatgaagaacagaacacactaaatagcatctttgaatacaaagaaccaagaaaaaggaatgaagactcgcaatttcacgacacactttgatcccttctgttggtgtcatgttgtaaacatttctttcaataaactaaagaaaaattattaaaggaacaca

SEQ ID NO: 368122 - DNA, 1344 bp, Homo sapiens
  misc_feature (24)..(24): n is a, c, g, or t
ggtttccggggagacacttgactncgtggtctgaaaatgctgcacagtattgtgtccagaattggttccttccggtgggttcttggtctcactgacttcaagaatgaagccacggacccttgcgtcacaagcacctcttcggcaaagcccacctccctctctcgcttgattccccggccatccttatcaaagaccttccaggtgaacaggcagccatcctcagcagcagtcagcaggaactgatcatcaaagaatctcgctctgttgcccaggctggagtgtagtggtgcgatctcggctcactgaaacctccgcctcccaggttcaagcgattctcctgcctcagtctcccgagtagctgggactacagtgatttcctgaaggaaatataatgatctgttcatcgaagtagaagatattgttggccacgtgggatcgaagaccaaaaacatgcagcgtctgagctaccacggctgacatgatctcccgccaaacagttctgctgaagaccaagaccacgcatgtatccagaggcgctacctgtagggatcctaagcaacccggacactttcaaacgccgtagcggttcctatagcaacgacaaaccggaagtatggtttgccgccggaagcggaagtcccaatcaaaagttgagcagtagctgtgagttgctggcgctggagcgattcggtggcacgtggagccacggcgtgggagtagggggctgaaggcaggcagcagcggccaggccgccctctgctagccgcttgggtctcgggataccccgtttcttcctgtaggtgtgggacgtgcgtgcggcgagatggacactcccccgctctcggattcggagtcggaatccgatgaatcccttgtcacagacagagagttgcaggatgcgttttcccgagggcttctgaagccaggcctcaatgtcgtgctagaggggccgaagaaggccgtgaacgacgtgaagacagctcatggcagaggcctcaagaggcctggcaagaaagggtcaaataagagacctggaaaacgaacaagagagaagatgaagaacagaacacactaaatagcatctttgaatacaaagaaccaagaaaaaggaatgaagactcgcaatttcacgacacactttgatcccttctgttggtgtcatgttgtaaacatttctttcaataaactaaagaaaaattattaaaggaacacatacctttggttaaatagtctagactaaaagattgagaagttactttccattgctatctattgataatttagacattgagttcaaattgccttcattttatgataaataatgatttaactgaaaaaaaaaaa

SEQ ID NO: 368123 - DNA, 151 bp, Homo sapiens
tcggcaaagcccacctccctctctcgcttgattccccggccatccttatcaaagaccttccaggtgaacaggcagccatcctcagcagcagtcagcaggaactgatcatcaaaggtaagcaacatctgaagagaaaaagggtcatggccag

SEQ ID NO: 368124 - DNA, 1882 bp, Homo sapiens
  misc_feature (24)..(24): n is a, c, g, or t
ggtttccggggagacacttgactncgtggtctgaaaatgctgcacagtattgtgtccagaattggttccttccggtgggttcttggtctcactgacttcaagaatgaagccacggacccttgcgtcacaagcacctcttcggcaaagcccacctccctctctcgcttgattccccggccatccttatcaaagaccttccaggtgaacaggcagccatcctcagcagcagtcagcaggaactgatcatcaaagaatctcgctctgttgcccaggctggagtgtagtggtgcgatctcggctcactgaaacctccgcctcccaggttcaagcgattctcctgcctcagtctcccgagtagctgggactacagtgatttcctgaaggaaatataatgatctgttcatcgaagtagaagatattgttggccacgtgggatcgaagaccaaaaacatgcagcgtctgagctaccacggctgacatgatctcccgccaaacagttctgctgaagaccaagaccacgcatgtatccagaggcgctacctgtagggatcctaagcaacccggacactttcaaacgccgtagcggttcctatagcaacgacaaaccggaagtatggtttgccgccggaagcggaagtcccaatcaaaagttgagcagtagctgtgagttgctggcgctggagcgattcggtggcacgtggagccacggcgtgggagtagggggctgaaggcaggcagcagcggccaggccgccctctgctagccgcttgggtctcgggataccccgtttcttcctgtaggtgtgggacgtgcgtgcggcgagatggacactcccccgctctcggattcggagtcggaatccgatgaatcccttgtcacagacagagagttgcaggatgcgttttcccgagggcttctgaagccaggcctcaatgtcgtgctagaggggccgaagaaggccgtgaacgacgtgaatggcctgaagcaatgtttggcagaattcaagcgggatctggaatgggttgaaaggctcgatgtgacactgggtccggtaccggagatcggtggatctgaggcgccagcacctcagaacaaggaccagaaagctgttgatccagaagacgacttccagcgagagatgagtttctatcgccaagcccaggccgcagtgcttgcagtcttaccccgcctccatcagctcaaagtccctacgaagcgacccactgattattttgcggaaatggccaaatctgatctgcagatgcagaagattcgacagaagctgcagactaaacaggctgccatggagaggtctgaaaaagctaagcaactgcgagcacttaggaaatacgggaagaaggtgcaaacggaggttcttcagaagaggcagcaggagaaagcccatatgatgaatgctattaagaaatatcagaaaggcttctctgataaactggatttccttgagggagatcagaaacctctggcacagcgcaagaaggcaggagccaaaggccagcagatgaggaaggggcccagtgctaaacgacggtataaaaaccagaagtttggttttggtggaaagaagaaaggctcaaagtggaacactcgggagagctatgatgatgtatctagcttccgggccaagacagctcatggcagaggcctcaagaggcctggcaagaaagggtcaaataagagacctggaaaacgaacaagagagaagatgaagcccactcaccccatcaatagcctctttggaatgtttgattccattcagaagcagttaatactggctgttcaggtttaagccttgatgccctctgttggtgtgatgatgtaaacatttgctttccattaaattatattttaatcagttaaggaa

SEQ ID NO: 368125 - DNA, 1755 bp, Homo sapiens
  misc_feature (24)..(24): n is a, c, g, or t
  misc_feature (1699)..(1700): n is a, c, g, or t
ggtttccggggagacacttgactncgtggtctgaaaatgctgcacagtattgtgtccagaattggttccttccggtgggttcttggtctcactgacttcaagaatgaagccacggacccttgcgtcacaagcacctcttcggcaaagcccacctccctctctcgcttgattccccggccatccttatcaaagaccttccaggtgaacaggcagccatcctcagcagcagtcagcaggaactgatcatcaaagaatctcgctctgttgcccaggctggagtgtagtggtgcgatctcggctcactgaaacctccgcctcccaggttcaagcgattctcctgcctcagtctcccgagtagctgggactacagtgatttcctgaaggaaatataatgatctgttcatcgaagtagaagatattgttggccacgtgggatcgaagaccaaaaacatgcagcgtctgagctaccacggctgacatgatctcccgccaaacagttctgctgaagaccaagaccacgcatgtatccagaggcgctacctgtagggatcctaagcaacccggacactttcaaacgccgtagcggttcctatagcaacgacaaaccggaagtatggtttgccgccggaagcggaagtcccaatcaaaagttgagcagtagctgtgagttgctggcgctggagcgattcggtggcacgtggagccacggcgtgggagtagggggctgaaggcaggcagcagcggccaggccgccctctgctagccgcttgggtctcgggataccccgtttcttcctgtaggtgtgggacgtgcgtgcggcgagatggacactcccccgctctcggattcggagtcggaatccgatgaatcccttgtcacagacagagagttgcaggatgcgttttcccgagggcttctgaagccaggcctcaatgtcgtgctagaggggccgaagaaggccgtgaacgacgtgaatggcctgaagcaatgtttggcagaattcaagcgggatctggaatgggttgaaaggctcgatgtgacactgggtccggtaccggagatcggtggatctgaggcgccagcacctcagaacaaggaccagaaagctgttgatccagaagacgacttccagcgagagatgagtttctatcgccaagcccaggccgcagtgcttgcagtcttaccccgcctccatcagctcaaagtccctacgaagcgacccactgattattttgcggaaatggccaaatctgatctgcagatgcagaagattcgacagaagctgcagactaaacaggctgccatggagaggtctgaaaaagctaagcaactgcgagcacttaggaaatacgggaagaaggtgcaaacggaggttcttcagaagaggcagcaggagaaagcccatatgatgaatgctattaagaaatatcagaaaggcttctctgataaactggatttccttgagggagatcagaaacctctggcacagcgcaagaaggcaggagccaaaggccagcagatgaggaaggggcccagtgctaaacgacggtataaaaaccagaagtttggttttggtggaaagaagaaaggctcaaagtggaacactcgggagagctatgatgatgtatctagcttccgggccaagacagctcatggcagaggcctcaagaggcctggcaagaaagggtcaaattagagnntggaaagaacaagagagtgagaagaccctaatgcatcttgttcaagaccgaaagg

SEQ ID NO: 368126 - DNA, 2804 bp, Homo sapiens
  misc_feature (24)..(24): n is a, c, g, or t
  misc_feature (1958)..(1958): n is a, c, g, or t
ggtttccggggagacacttgactncgtggtctgaaaatgctgcacagtattgtgtccagaattggttccttccggtgggttcttggtctcactgacttcaagaatgaagccacggacccttgcgtcacaagcacctcttcggcaaagcccacctccctctctcgcttgattccccggccatccttatcaaagaccttccaggtgaacaggcagccatcctcagcagcagtcagcaggaactgatcatcaaagaatctcgctctgttgcccaggctggagtgtagtggtgcgatctcggctcactgaaacctccgcctcccaggttcaagcgattctcctgcctcagtctcccgagtagctgggactacagtgatttcctgaaggaaatataatgatctgttcatcgaagtagaagatattgttggccacgtgggatcgaagaccaaaaacatgcagcgtctgagctaccacggctgacatgatctcccgccaaacagttctgctgaagaccaagaccacgcatgtatccagaggcgctacctgtagggatcctaagcaacccggacactttcaaacgccgtagcggttcctatagcaacgacaaaccggaagtatggtttgccgccggaagcggaagtcccaatcaaaagttgagcagtagctgtgagttgctggcgctggagcgattcggtggcacgtggagccacggcgtgggagtagggggctgaaggcaggcagcagcggccaggccgccctctgctagccgcttgggtctcgggataccccgtttcttcctgtaggtgtgggacgtgcgtgcggcgagatggacactcccccgctctcggattcggagtcggaatccgatgaatcccttgtcacagacagagagttgcaggatgcgttttcccgagggcttctgaagccaggcctcaatgtcgtgctagaggggccgaagaaggccgtgaacgacgtgaatggcctgaagcaatgtttggcagaattcaagcgggatctggaatgggttgaaaggctcgatgtgacactgggtccggtaccggagatcggtggatctgaggcgccagcacctcagaacaaggaccagaaagctgttgatccagaagacgacttccagcgagagatgagtttctatcgccaagcccaggccgcagtgcttgcagtcttaccccgcctccatcagctcaaagtccctacgaagcgacccactgattattttgcggaaatggccaaatctgatctgcagatgcagaagattcgacagaagctgcagactaaacaggctgccatggagaggtctgaaaaagctaagcaactgcgagcacttaggaaatacgggaagaaggtgcaaacggaggttcttcagaagaggcagcaggagaaagcccatatgatgaatgctattaagaaatatcagaaaggcttctctgataaactggatttccttgagggagatcagaaacctctggcacagcgcaagaaggcaggagccaaaggccagcagatgaggaaggggcccagtgctaaacgacggtataaaaaccagaagtttggttttggtggaaagaagaaaggctcaaagtggaacactcgggagagctatgatgatgtatctagcttccgggccaagacagctcatggcagaggcctcaagaggcctggcaagaaagggtcaaatttctgttcgtcctcaccctggggcagaaggcaagctgctatgtgaccagatgtggtatgtctttttctgtagaagagacctggaaaacgaacaagagagaagatgaagaacagaacacactaaatagcatctttgaatacaaagaaccaagaaaaaggaatgaagactcgcaatttcacgacacactttgatcccttctgttggtgtcatgttgtaaacatttctttcaataaactaaagaaaaattattaaaggaacacaaaanaaaaaaaaaaaaaaaaaaaaaacaagagagcagacagacacacacaacaaaaaataaaaaaaaaagagagagacacacaaaaaataacaaagaaacacaaacatacaatgaaaacaagaagagagaagaccaaaatgataaagaacacacaaattataatcaacagaagacaaagcaggccaaaagagtatctaaaaagcagcagacagagcgaaagggggaaacaacaaggcaaaaaatggagggaaatcacttcggccacgaagagagaaacaccctaacacatcagctgggggggcaagcaaccgcaataacagtggggaaaaaaaagagaggacacaaccaacagcagaagagaatgacagagcggccctccgaaggacgggacaaagccacagacaaaaggcgacccacagcggtgcgacaataaaaagcagtagagaataaaacaaaaagacgagagggacaaaattaggagcaacagaaagcgaaaagaaacgacaaaaacaatcaggcggaccaaacacggcgggaagaaaagtagcaagatcagagtggccaaacccaagcactaacaagaagccagggagaaacactaaggagcgagaaataagcgagacgagagagagagcgcgaggacagagagacgggcagagagaaagagagcaagcgagagggaaggagggagaagagagcgaaggaagaagaggaagagaagaaggagaacaaagacaacagacgctaagacgaacagacgaccaagagagaaaaaaagcaagcggcacaaaggaaaggagcgcacgaagccagaagacagctgaaaacgacagccagagaaagacagag

SEQ ID NO: 368127 - DNA, 2118 bp, Homo sapiens
  misc_feature (24)..(24): n is a, c, g, or t
ggtttccggggagacacttgactncgtggtctgaaaatgctgcacagtattgtgtccagaattggttccttccggtgggttcttggtctcactgacttcaagaatgaagccacggacccttgcgtcacaagcacctcttcggcaaagcccacctccctctctcgcttgattccccggccatccttatcaaagaccttccaggtgaacaggcagccatcctcagcagcagtcagcaggaactgatcatcaaagaatctcgctctgttgcccaggctggagtgtagtggtgcgatctcggctcactgaaacctccgcctcccaggttcaagcgattctcctgcctcagtctcccgagtagctgggactacagtgatttcctgaaggaaatataatgatctgttcatcgaagtagaagatattgttggccacgtgggatcgaagaccaaaaacatgcagcgtctgagctaccacggctgacatgatctcccgccaaacagttctgctgaagaccaagaccacgcatgtatccagaggcgctacctgtagggatcctaagcaacccggacactttcaaacgccgtagcggttcctatagcaacgacaaaccggaagtatggtttgccgccggaagcggaagtcccaatcaaaagttgagcagtagctgtgagttgctggcgctggagcgattcggtggcacgtggagccacggcgtgggagtagggggctgaaggcaggcagcagcggccaggccgccctctgctagccgcttgggtctcgggataccccgtttcttcctgtaggtgtgggacgtgcgtgcggcgagatggacactcccccgctctcggattcggagtcggaatccgatgaatcccttgtcacagacagagagttgcaggatgcgttttcccgagggcttctgaagccaggcctcaatgtcgtgctagaggggccgaagaaggccgtgaacgacgtgtggtgagcgtgggcacagggtcgggggtactcggacatgggatgcgcttcaggcgctgttgggcttgggagaccgattcttgtcccaggaaagatgcaccctgcgcctcgccaagagggtcaattacctgtctgggtattggggattagcactttgtcccttcgcctaacagcctgtgcttgggaaagacaaactcagagttcccttcttgtgagctcagtgtctggatttcctagaatggcctgaagcaatgtttggcagaattcaagcgggatctggaatgggttgaaaggctcgatgtgacactgggtccggtaccggagatcggtggatctgaggcgccagcacctcagaacaaggaccagaaagctgttgatccagaagacgacttccagcgagagatgagtttctatcgccaagcccaggccgcagtgcttgcagtcttaccccgcctccatcagctcaaagtccctacgaagcgacccactgattattttgcggaaatggccaaatctgatctgcagatgcagaagattcgacagaagctgcagactaaacaggctgccatggagaggtctgaaaaagctaagcaactgcgagcacttaggaaatacgggaagaaggtgcaaacggaggttcttcagaagaggcagcaggagaaagcccatatgatgaatgctattaagaaatatcagaaaggcttctctgataaactggatttccttgagggagatcagaaacctctggcacagcgcaagaaggcaggagccaaaggccagcagatgaggaaggggcccagtgctaaacgacggtataaaaaccagaagtttggttttggtggaaagaagaaaggctcaaagtggaacactcgggagagctatgatgatgtatctagcttccgggccaagacagctcatggcagaggcctcaagaggcctggcaagaaagggtcaaataagagacctggaaaacgaacaagagagaagatgaagaacagaacacactaaatagcatctttgaatacaaagaaccaagaaaaaggaatgaagactcgcaatttcacgacacactttgatcccttctgttggtgtcatgttgtaaacatttctttcaataaactaaagaaaaattattaaaggaacaca

SEQ ID NO: 368128 - DNA, 1952 bp, Homo sapiens
  misc_feature (24)..(24): n is a, c, g, or t
ggtttccggggagacacttgactncgtggtctgaaaatgctgcacagtattgtgtccagaattggttccttccggtgggttcttggtctcactgacttcaagaatgaagccacggacccttgcgtcacaagcacctcttcggcaaagcccacctccctctctcgcttgattccccggccatccttatcaaagaccttccaggtgaacaggcagccatcctcagcagcagtcagcaggaactgatcatcaaagaatctcgctctgttgcccaggctggagtgtagtggtgcgatctcggctcactgaaacctccgcctcccaggttcaagcgattctcctgcctcagtctcccgagtagctgggactacagtgatttcctgaaggaaatataatgatctgttcatcgaagtagaagatattgttggccacgtgggatcgaagaccaaaaacatgcagcgtctgagctaccacggctgacatgatctcccgccaaacagttctgctgaagaccaagaccacgcatgtatccagaggcgctacctgtagggatcctaagcaacccggacactttcaaacgccgtagcggttcctatagcaacgacaaaccggaagtatggtttgccgccggaagcggaagtcccaatcaaaagttgagcagtagctgtgagttgctggcgctggagcgattcggtggcacgtggagccacggcgtgggagtagggggctgaaggcaggcagcagcggccaggccgccctctgctagccgcttgggtctcgggataccccgtttcttcctgtaggtgtgggacgtgcgtgcggcgagatggacactcccccgctctcggattcggagtcggaatccgatgaatcccttgtcacagacagagagttgcaggatgcgttttcccgagggcttctgaagccaggcctcaatgtcgtgctagaggggccgaagaaggccgtgaacgacgtgaatggcctgaagcaatgtttggcagaattcaagcgggatctggaatgggttgaaaggctcgatgtgacactgggtccggtaccggagatcggtggatctgaggcgccagcacctcagaacaaggaccagaaagctgttgatccagaagacgacttccagcgagagatgagtttgtatgtttgttttcaaatgttggagaagttgaggatccttgtgcaggagagtgggaaagaggggaaattactatcgccaagcccaggccgcagtgcttgcagtcttaccccgcctccatcagctcaaagtccctacgaagcgacccactgattattttgcggaaatggccaaatctgatctgcagatgcagaagattcgacagaagctgcagactaaacaggctgccatggagaggtctgaaaaagctaagcaactgcgagcacttaggaaatacgggaagaaggtgcaaacggaggttcttcagaagaggcagcaggagaaagcccatatgatgaatgctattaagaaatatcagaaaggcttctctgataaactggatttccttgagggagatcagaaacctctggcacagcgcaagaaggcaggagccaaaggccagcagatgaggaaggggcccagtgctaaacgacggtataaaaaccagaagtttggttttggtggaaagaagaaaggctcaaagtggaacactcgggagagctatgatgatgtatctagcttccgggccaagacagctcatggcagaggcctcaagaggcctggcaagaaagggtcaaataagagacctggaaaacgaacaagagagaagatgaagaacagaacacactaaatagcatctttgaatacaaagaaccaagaaaaaggaatgaagactcgcaatttcacgacacactttgatcccttctgttggtgtcatgttgtaaacatttctttcaataaactaaagaaaaattattaaaggaacaca

SEQ ID NO: 368129 - DNA, 2188 bp, Homo sapiens
  misc_feature (24)..(24): n is a, c, g, or t
ggtttccggggagacacttgactncgtggtctgaaaatgctgcacagtattgtgtccagaattggttccttccggtgggttcttggtctcactgacttcaagaatgaagccacggacccttgcgtcacaagcacctcttcggcaaagcccacctccctctctcgcttgattccccggccatccttatcaaagaccttccaggtgaacaggcagccatcctcagcagcagtcagcaggaactgatcatcaaagaatctcgctctgttgcccaggctggagtgtagtggtgcgatctcggctcactgaaacctccgcctcccaggttcaagcgattctcctgcctcagtctcccgagtagctgggactacagtgatttcctgaaggaaatataatgatctgttcatcgaagtagaagatattgttggccacgtgggatcgaagaccaaaaacatgcagcgtctgagctaccacggctgacatgatctcccgccaaacagttctgctgaagaccaagaccacgcatgtatccagaggcgctacctgtagggatcctaagcaacccggacactttcaaacgccgtagcggttcctatagcaacgacaaaccggaagtatggtttgccgccggaagcggaagtcccaatcaaaagttgagcagtagctgtgagttgctggcgctggagcgattcggtggcacgtggagccacggcgtgggagtagggggctgaaggcaggcagcagcggccaggccgccctctgctagccgcttgggtctcgggataccccgtttcttcctgtaggtgtgggacgtgcgtgcggcgagatggacactcccccgctctcggattcggagtcggaatccgatgaatcccttgtcacagacagagagttgcaggatgcgttttcccgagggcttctgaagccaggcctcaatgtcgtgctagaggggccgaagaaggccgtgaacgacgtgtggtgagcgtgggcacagggtcgggggtactcggacatgggatgcgcttcaggcgctgttgggcttgggagaccgattcttgtcccaggaaagatgcaccctgcgcctcgccaagagggtcaattacctgtctgggtattggggattagcactttgtcccttcgcctaacagcctgtgcttgggaaagacaaactcagagttcccttcttgtgagctcagtgtctggatttcctagaatggcctgaagcaatgtttggcagaattcaagcgggatctggaatgggttgaaaggctcgatgtgacactgggtccggtaccggagatcggtggatctgaggcgccagcacctcagaacaaggaccagaaagctgttgatccagaagacgacttccagcgagagatgagtttgtatgtttgttttcaaatgttggagaagttgaggatccttgtgcaggagagtgggaaagaggggaaattactatcgccaagcccaggccgcagtgcttgcagtcttaccccgcctccatcagctcaaagtccctacgaagcgacccactgattattttgcggaaatggccaaatctgatctgcagatgcagaagattcgacagaagctgcagactaaacaggctgccatggagaggtctgaaaaagctaagcaactgcgagcacttaggaaatacgggaagaaggtgcaaacggaggttcttcagaagaggcagcaggagaaagcccatatgatgaatgctattaagaaatatcagaaaggcttctctgataaactggatttccttgagggagatcagaaacctctggcacagcgcaagaaggcaggagccaaaggccagcagatgaggaaggggcccagtgctaaacgacggtataaaaaccagaagtttggttttggtggaaagaagaaaggctcaaagtggaacactcgggagagctatgatgatgtatctagcttccgggccaagacagctcatggcagaggcctcaagaggcctggcaagaaagggtcaaataagagacctggaaaacgaacaagagagaagatgaagaacagaacacactaaatagcatctttgaatacaaagaaccaagaaaaaggaatgaagactcgcaatttcacgacacactttgatcccttctgttggtgtcatgttgtaaacatttctttcaataaactaaagaaaaattattaaaggaacaca

SEQ ID NO: 368130 - DNA, 1433 bp, Homo sapiens
  misc_feature (24)..(24): n is a, c, g, or t
ggtttccggggagacacttgactncgtggtctgaaaatgctgcacagtattgtgtccagaattggttccttccggtgggttcttggtctcactgacttcaagaatgaagccacggacccttgcgtcacaagcacctcttcggcaaagcccacctccctctctcgcttgattccccggccatccttatcaaagaccttccaggtgaacaggcagccatcctcagcagcagtcagcaggaactgatcatcaaagaatctcgctctgttgcccaggctggagtgtagtggtgcgatctcggctcactgaaacctccgcctcccaggttcaagcgattctcctgcctcagtctcccgagtagctgggactacagtgatttcctgaaggaaatataatgatctgttcatcgaagtagaagatattgttggccacgtgggatcgaagaccaaaaacatgcagcgtctgagctaccacggctgacatgatctcccgccaaacagttctgctgaagaccaagaccacgcatgtatccagaggcgctacctgtagggatcctaagcaacccggacactttcaaacgccgtagcggttcctatagcaacgacaaaccggaagtatggtttgccgccggaagcggaagtcccaatcaaaagttgagcagtagctgtgagttgctggcgctggagcgattcggtggcacgtggagccacggcgtgggagtagggggctgaaggcaggcagcagcggccaggccgccctctgctagccgcttgggtctcgggataccccgtttcttcctgtaggtgtgggacgtgcgtgcggcgagatggacactcccccgctctcggattcggagtcggaatccgatgaatcccttgtcacagacagagagttgcaggatgcgttttcccgagggcttctgaagccaggcctcaatgtcgtgctagaggggccgaagaaggccgtgaacgacgtgaatggcctgaagcaatgtttggcagaattcaagcgggatctggaatgggttgaaaggctcgatgtgacactgggtccggtaccggagatcggtggatctgaggcgccagcacctcagaacaaggaccagaaagctgttgatccagaagacgacttccagcgagagatgagtttgtatgtttgttttcaaatgttggagaagttgaggatccttgtgcaggagagtgggaaagaggggaaattagtaagtctgcactcagaataagcctaggagtagagagagcggcttcttttgactaagaatagctaggagattcttcctgtttgagagaagagctctttggtccacggtcacgatccaaaatccactttatgggctaatttgaaatattcatgttaaaactttttgtgcatgcttcagttattaggaaaacaaacaaacaaacattgcttatgggatg

SEQ ID NO: 368131 - DNA, 612 bp, Homo sapiens
  misc_feature (24)..(24): n is a, c, g, or t
ggtttccggggagacacttgactncgtggtctgaaaatgctgcacagtattgtgtccagaattggttccttccggtgggttcttggtctcactgacttcaagaatgaagccacggacccttgcgtcacaagcacctcttcggcaaagcccacctccctctctcgcttgattccccggccatccttatcaaagaccttccaggtgaacaggcagccatcctcagcagcagtcagcaggaactgatcatcaaagaatctcgctctgttgcccaggctggagtgtagtggtgcgatctcggctcactgaaacctccgcctcccaggttcaagcgattctcctgcctcagtctcccgagtagctgggactacagaaacttgcaaaaatagcacagagagagtggacttctggaatggcacggcaacaaaattccctacggcagcacccaaaggcttgaaattagccattccaagtgtgtccaaaaaactaaaggaaaccatgattaaacaagtaaagccagtagacaagatttgactctggaggtgacgtctgagccaataggtatttggagtctggagaaaaagccatgctaataaatttctgaacttggaagtc

SEQ ID NO: 368132 - DNA, 606 bp, Homo sapiens
tgagactctgtctcaaaaaaaaaaaaaaagaacccaaacttttggtgttcagccatgttcccatgctcactcccagggtggtgactctgggaaggtctcagcctccttgtctgcccagttagaatgatctgatgcccctgctaccatcagacttgataagtttcccaaagactctttgcaagaagcactgttctggagggtggaggagagactaattgttcttgctctcctggccagagtgggaagctttggggtggccggtttgtgggtgcagtggaccccatcatggagaagttcaacgcgtccattgcctacgaccggcacctttgggaggtggatgttcaaggcagcaaagcctacagcaggggcctggagaaggcagggctcctcaccaaggccgagatggaccagatactccatggcctagacaagttgtctgcccagttagaatgatctgatgcccctgctaccatcagacttgataagtttcccaaagactctttgcaagaagcactgttctggagggtggaggagagactaattgttcttgctctcctggccagagtgggaagctttggggtgccggtttgtgggtgcagtgcccat

SEQ ID NO: 368133 - DNA, 2403 bp, Homo sapiens
  misc_feature (2329)..(2329): n is a, c, g, or t
gacgccatcccggccagaaaagccctggccagtggcgggcgcgacactatccgtgcggccaggcggaggtgagtgcgcggcggccggatgggcgggacgggcgtggaggacgccgagcaccgtggcgcgcgctcacgtccgcgtccccaagggctgcgctccctcaagcgcagtgcccagaactcggagccagcccggcccgggggaccctgctggccaaggaggtcgtcagtccggtcttgtcttccagacccggaggaccgaagcttccggacgacgaggaaccgcccaacatggcctcggagagtgggaagctttggggtggccggtttgtgggtgcagtggaccccatcatggagaagttcaacgcgtccattgcctacgaccggcacctttgggaggtggatgttcaaggcagcaaagcctacagcaggggcctggagaaggcagggctcctcaccaaggccgagatggaccagatactccatggcctagacaaggtggctgaggagtgggcccagggcaccttcaaactgaactccaatgatgaggacatccacacagccaatgagcgccgcctgaaggagctcattggtgcaacggcagggaagctgcacacgggacggagccggaatgaccaggtggtcacagacctcaggctgtggatgcggcagacctgctccacgctctcgggcctcctctgggagctcattaggaccatggtggatcgggcagaggcggaacgtgatgttctcttcccggggtacacccatttgcagagggcccagcccatccgctggagccactggattctgagccacgccgtggcactgacccgagactctgagcggctgctggaggtgcggaagcggatcaatgtcctgcccctggggagtggggccattgcaggcaatcccctgggtgtggaccgagagctgctccgagcagaactcaactttggggccatcactctcaacagcatggatgccactagtgagcgggactttgtggccgagttcctgttctgggcttcgctgtgcatgacccatctcagcaggatggccgaggacctcatcctctactgcaccaaggaattcagcttcgtgcagctctcagatgcctacagcacgggaagcagcctgatgccccagaagaaaaaccccgacagtttggagctgatccggagcaaggctgggcgtgtgtttgggcggtgtgccgggctcctgatgaccctcaagggacttcccagcacctacaacaaagacttacaggaggacaaggaagctgtgtttgaagtgtcagacactatgagtgccgtgctccaggtggccactggcgtcatctctacgctgcagattcaccaagagaacatgggacaggctctcagccccgacatgctggccactgaccttgcctattacctggtccgcaaagggatgccattccgccaggcccacgaggcctccgggaaagctgtgttcatggccgagaccaagggggtcgccctcaaccagctgtcactgcaggagctgcagaccatcagccccctgttctcgggcgacgtgatctgcgtgtgggactacgggcacagtgtggagcagtatggtgccctgggcggcactgcgcgctccagcgtcgactggcagatccgccaggtgcgggcgctactgcaggcacagcaggcctaggtcctcccacacctgccccctaataaagtgggcgcgagaggaaaaaaaaaacaaaaaaaaaaaaaaaaaaaaaaacaaaaaagagaggcggggggcgcgcgctgcagagaaatatacccccgccggggggggccccataatagacgcggctcccccccgactctttcgtgcaacaagaggggcgcccccccatagaaggggcggcgcgattaataagaacccgagagagcggcggggcgcccgtcgctttttcatcccaagggcgcgcgacaggggcgagtggggagaagacaccgggtgctgtccttgctgagcgagaacatctcttgtgtgggcgaggacggaggcccaccctcatacgctctgccgaggggggaggggcgagccacaatatcgattgagcgggaagacaacctaacttcctcagagaagagaagagattatataacgaacgatcttaatggagagggagaagatattatatagagaaattataatagaggggagatgtatattaatgggtgtgcgttcataacaaaaagagggagagagaaaaatatttggaccggagaggcgatgatgagagaagattgtatgaggcgcaatcagagcaagagaaatgatatgctatagattaatgncaggaaaaactatttttttttataaacgagggagggggcgatccattctatagattaattaaatgatgaagcga

SEQ ID NO: 368134 - DNA, 1828 bp, Homo sapiens
gacgccatcccggccagaaaagccctggccagtggcgggcgcgacactatccgtgcggccaggcggaggtgagtgcgcggcggccggatgggcgggacgggcgtggaggacgccgagcaccgtggcgcgcgctcacgtccgcgtccccaagggctgcgctccctcaagcgcagtgcccagaactcggagccagcccggcccgggggaccctgctggccaaggaggtcgtcagtccggtcttgtcttccagacccggaggaccgaagcttccggacgacgaggaaccgcccaacatggcctcggagagtgggaagctttggggtggccggtttgtgggtgcagtggaccccatcatggagaagttcaacgcgtccattgcctacgaccggcacctttgggaggtggatgttcaaggcagcaaagcctacagcaggggcctggagaaggcagggctcctcaccaaggccgagatggaccagatactccatggcctagacaaggtggctgaggagtgggcccagggcaccttcaaactgaactccaatgatgaggacatccacacagccaatgagcgccgcctgaaggagctcattggtgcaacggcagggaagctgcacacgggacggagccggaatgaccaggtggtcacagacctcaggctgtggatgcggcagacctgctccacgctctcgggcctcctctgggagctcattaggaccatggtggatcgggcagaggcggaacgtgatgttctcttcccggggtacacccatttgcagagggcccagcccatccgctggagccactggattctgagccacgccgtggcactgacccgagactctgagcggctgctggaggtgcggaagcggatcaatgtcctgcccctggggagtggggccattgcaggcaatcccctgggtgtggaccgagagctgctccgagcagaactcaactttggggccatcactctcaacagcatggatgccactagtgagcgggactttgtggccgagttcctgttctgggcttcgctgtgcatgacccatctcagcaggatggccgaggacctcatcctctactgcaccaaggaattcagcttcgtgcagctctcagatgcctacagcacgggaagcagcctgatgccccagaagaaaaaccccgacagtttggagctgatccggagcaaggctgggcgtgtgtttgggcgggtgagcaaggcagggggaggggcggggcctctgggctgatggtgggtggccaggggggcaggatcccgggtccagcccctgtgcctccctcttcccgcatgtgccgggctcctgatgaccctcaagggacttcccagcacctacaacaaagacttacaggaggacaaggaagctgtgtttgaagtgtcagacactatgagtgccgtgctccaggtggccactggcgtcatctctacgctgcagattcaccaagagaacatgggacaggctctcagccccgacatgctggccactgaccttgcctattacctggtccgcaaagggatgccattccgccaggcccacgaggcctccgggaaagctgtgttcatggccgagaccaagggggtcgccctcaaccagctgtcactgcaggagctgcagaccatcagccccctgttctcgggcgacgtgatctgcgtgtgggactacgggcacagtgtggagcagtatggtgccctgggcggcactgcgcgctccagcgtcgactggcagatccgccaggtgcgggcgctactgcaggcacagcaggcctaggtcctcccacacctgccccctaataaagtgggcgcgagagg

SEQ ID NO: 368135 - DNA, 1661 bp, Homo sapiens
tgagactctgtctcaaaaaaaaaaaaaaagaacccaaacttttggtgttcagccatgttcccatgctcactcccagggtggtgactctgggaaggtctcagcctccttgtctgcccagttagaatgatctgatgcccctgctaccatcagacttgataagtttcccaaagactctttgcaagaagcactgttctggagggtggaggagagactaattgttcttgctctcctggccagagtgggaagctttggggtggccggtttgtgggtgcagtggaccccatcatggagaagttcaacgcgtccattgcctacgaccggcacctttgggaggtggatgttcaaggcagcaaagcctacagcaggggcctggagaaggcagggctcctcaccaaggccgagatggaccagatactccatggcctagacaaggtggctgaggagtgggcccagggcaccttcaaactgaactccaatgatgaggacatccacacagccaatgagcgccgcctgaaggagctcattggtgcaacggcagggaagctgcacacgggacggagccggaatgaccaggtggtcacagacctcaggctgtggatgcggcagacctgctccacgctctcgggcctcctctgggagctcattaggaccatggtggatcgggcagaggcggaacgtgatgttctcttcccggggtacacccatttgcagagggcccagcccatccgctggagccactggattctgagccacgccgtggcactgacccgagactctgagcggctgctggaggtgcggaagcggatcaatgtcctgcccctggggagtggggccattgcaggcaatcccctgggtgtggaccgagagctgctccgagcagaactcaactttggggccatcactctcaacagcatggatgccactagtgagcgggactttgtggccgagttcctgttctgggcttcgctgtgcatgacccatctcagcaggatggccgaggacctcatcctctactgcaccaaggaattcagcttcgtgcagctctcagatgcctacagcacgggaagcagcctgatgccccagaagaaaaaccccgacagtttggagctgatccggagcaaggctgggcgtgtgtttgggcggtgtgccgggctcctgatgaccctcaagggacttcccagcacctacaacaaagacttacaggaggacaaggaagctgtgtttgaagtgtcagacactatgagtgccgtgctccaggtggccactggcgtcatctctacgctgcagattcaccaagagaacatgggacaggctctcagccccgacatgctggccactgaccttgcctattacctggtccgcaaagggatgccattccgccaggcccacgaggcctccgggaaagctgtgttcatggccgagaccaagggggtcgccctcaaccagctgtcactgcaggagctgcagaccatcagccccctgttctcgggcgacgtgatctgcgtgtgggactacgggcacagtgtggagcagtatggtgccctgggcggcactgcgcgctccagcgtcgactggcagatccgccaggtgcgggcgctactgcaggcacagcaggcctaggtcctcccacacctgccccctaataaagtgggcgcgagagg

SEQ ID NO: 368136 - DNA, 1651 bp, Homo sapiens
gacgccatcccggccagaaaagccctggccagtggcgggcgcgacactatccgtgcggccaggcggaggtgagtgcgcggcggccggatgggcgggacgggcgtggaggacgccgagcaccgtggcgcgcgctcacgtccgcgtccccaagggctgcgctccctcaagcgcagtgcccagaactcggagccagcccggcccgggggaccctgctggccaaggaggtcgtcagtccggtcttgtcttccagacccggaggaccgaagcttccggacgacgaggaaccgcccaacatggcctcggagagtgggaagctttggggtggccggtttgtgggtgcagtggaccccatcatggagaagttcaacgcgtccattgcctacgaccggcacctttgggaggtggatgttcaaggcagcaaagcctacagcaggggcctggagaaggcagggctcctcaccaaggccgagatggaccagatactccatggcctagacaaggtggctgaggagtgggcccagggcaccttcaaactgaactccaatgatgaggacatccacacagccaatgagcgccgcctgaaggagctcattggtgcaacggcagggaagctgcacacgggacggagccggaatgaccaggtggtcacagacctcaggctgtggatgcggcagacctgctccacgctctcgggcctcctctgggagctcattaggaccatggtggatcgggcagaggcggaacgtgatgttctcttcccggggtacacccatttgcagagggcccagcccatccgctggagccactggattctgagtggggccattgcaggcaatcccctgggtgtggaccgagagctgctccgagcagaactcaactttggggccatcactctcaacagcatggatgccactagtgagcgggactttgtggccgagttcctgttctgggcttcgctgtgcatgacccatctcagcaggatggccgaggacctcatcctctactgcaccaaggaattcagcttcgtgcagctctcagatgcctacagcacgggaagcagcctgatgccccagaagaaaaaccccgacagtttggagctgatccggagcaaggctgggcgtgtgtttgggcggtgtgccgggctcctgatgaccctcaagggacttcccagcacctacaacaaagacttacaggaggacaaggaagctgtgtttgaagtgtcagacactatgagtgccgtgctccaggtggccactggcgtcatctctacgctgcagattcaccaagagaacatgggacaggctctcagccccgacatgctggccactgaccttgcctattacctggtccgcaaagggatgccattccgccaggcccacgaggcctccgggaaagctgtgttcatggccgagaccaagggggtcgccctcaaccagctgtcactgcaggagctgcagaccatcagccccctgttctcgggcgacgtgatctgcgtgtgggactacgggcacagtgtggagcagtatggtgccctgggcggcactgcgcgctccagcgtcgactggcagatccgccaggtgcgggcgctactgcaggcacagcaggcctaggtcctcccacacctgccccctaataaagtgggcgcgagagg

SEQ ID NO: 368137 - DNA, 1799 bp, Homo sapiens
gacgccatcccggccagaaaagccctggccagtggcgggcgcgacactatccgtgcggccaggcggaggtgagtgcgcggcggccggatgggcgggacgggcgtggaggacgccgagcaccgtggcgcgcgctcacgtccgcgtccccaagggctgcgctccctcaagcgcagtgcccagaactcggagccagcccggcccgggggaccctgctggccaaggaggtcgtcagtccggtcttgtcttccagacccggaggaccgaagcttccggacgacgaggaaccgcccaacatggcctcggagagtgggaagctttggggtggccggtttgtgggtgcagtggaccccatcatggagaagttcaacgcgtccattgcctacgaccggcacctttgggaggtggatgttcaaggcagcaaagcctacagcaggggcctggagaaggcagggctcctcaccaaggccgagatggaccagatactccatggcctagacaaggtggctgaggagtgggcccagggcaccttcaaactgaactccaatgatgaggacatccacacagccaatgagcgccgcctgaaggagctcattggtgcaacggcagggaagctgcacacgggacggagccggaatgaccaggtggtcacagacctcaggctgtggatgcggcagacctgctccacgctctcgggcctcctctgggagctcattaggaccatggtggatcgggcagaggcggaacgtgatgttctcttcccggggtacacccatttgcagagggcccagcccatccgctggagccactggattctgagccacgccgtggcactgacccgagactctgagcggctgctggaggtgcggaagcggatcaatgtcctgcccctggggagtggggccattgcaggcaatcccctgggtgtggaccgagagctgctccgagcagaactcaactttggggccatcactctcaacagcatggatgccactagtgagcgggactttgtggccgagttcctgttctgggcttcgctgtgcatgacccatctcagcaggatggccgaggacctcatcctctactgcaccaaggaattcagcttcgtgcagctctcagatgcctacagcacgggaagcagcctgatgccccagaagaaaaaccccgacagtttggagctgatccggagcaaggctgggcgtgtgtttgggcggtgtgccgggctcctgatgaccctcaagggacttcccagcacctacaacaaagacttacagtgtggagcagtatggtgccctgggcggcactgcgcgctccagcgtcgactggcagatccgccaggtgcgggcgctactgcaggcacagcaggcctaggtcctcccacacctgccccctaataaagtgggcgcgagaggaggctgctgtgtgtttcctgccccagcctggctccctcgttgctgggctttcggggctggccagtggggacagtcagggactggagaggcagggcagggtggcctgtaatcccagcactttggaagggcaaggtgcgaggatgcttgaggccaggagtttgacacagcctgggcaacacagggagacccccatctctactcaataataaaacaaatagcctggcgtggtggcccatgcatatagtcccagctacttgtaaggctgaggtgagaggacacttgtgcccaggagtggaggctgcagtgagctatgatcacgccactgcattccagcctggataacagagtgagaacctatctctaaaaataaataaataaacgaaaaataaa

SEQ ID NO: 368138 - DNA, 2170 bp, Homo sapiens
gacgccatcccggccagaaaagccctggccagtggcgggcgcgacactatccgtgcggccaggcggaggtgagtgcgcggcggccggatgggcgggacgggcgtggaggacgccgagcaccgtggcgcgcgctcacgtccgcgtccccaagggctgcgctccctcaagcgcagtgcccagaactcggagccagcccggcccgggggaccctgctggccaaggaggtcgtcagtccggtcttgtcttccagacccggaggaccgaagcttccggacgacgaggaaccgcccaacatggcctcggagagtgggaagctttggggtggccggtttgtgggtgcagtggaccccatcatggagaagttcaacgcgtccattgcctacgaccggcacctttgggaggtggatgttcaaggcagcaaagcctacagcaggggcctggagaaggcagggctcctcaccaaggccgagatggaccagatactccatggcctagacaaggtggctgaggagtgggcccagggcaccttcaaactgaactccaatgatgaggacatccacacagccaatgagcgccgcctgaaggagctcattggtgcaacggcagggaagctgcacacgggacggagccggaatgaccaggtggtcacagacctcaggctgtggatgcggcagacctgctccacgctctcgggcctcctctgggagctcattaggaccatggtggatcgggcagaggcggaacgtgatgttctcttcccggggtacacccatttgcagagggcccagcccatccgctggagccactggattctgagccacgccgtggcactgacccgagactctgagcggctgctggaggtgcggaagcggatcaatgtcctgcccctggggagtggggccattgcaggcaatcccctgggtgtggaccgagagctgctccgagcaggtgagacgtcctgcccctcctccccagggagaatcaccctcagcacccgccaagacctgcagacacacctgaaaccagagggcaggggcctgtggctcctggtgaaaccttcattcattgcctatgggcactgaggtcatcaagttcaggggtcactcatggcagggatgcctggtactgagagactcagggctcctgcctccctcctgggactgtgcaaaagatccctccccccagctgttgccccaccctgatcaggggagggggctgggcaacctagttgggggagagggggccactccctgtcctccagcttagccctgcttcctcccacccccccagaactcaactttggggccatcactctcaacagcatggatgccactagtgagcgggactttgtggccgagttcctgttctgggcttcgctgtgcatgacccatctcagcaggatggccgaggacctcatcctctactgcaccaaggaattcagcttcgtgcagctctcagatgcctacagcacgggaagcagcctgatgccccagaagaaaaaccccgacagtttggagctgatccggagcaaggctgggcgtgtgtttgggcgggtgagcaaggcagggggaggggcggggcctctgggctgatggtgggtggccaggggggcaggatcccgggtccagcccctgtgcctccctcttcccgcatgtgccgggctcctgatgaccctcaagggacttcccagcacctacaacaaagacttacaggaggacaaggaagctgtgtttgaagtgtcagacactatgagtgccgtgctccaggtggccactggcgtcatctctacgctgcagattcaccaagagaacatgggacaggctctcagccccgacatgctggccactgaccttgcctattacctggtccgcaaagggatgccattccgccaggcccacgaggcctccgggaaagctgtgttcatggccgagaccaagggggtcgccctcaaccagctgtcactgcaggagctgcagaccatcagccccctgttctcgggcgacgtgatctgcgtgtgggactacgggcacagtgtggagcagtatggtgccctgggcggcactgcgcgctccagcgtcgactggcagatccgccaggtgcgggcgctactgcaggcacagcaggcctaggtcctcccacacctgccccctaataaagtgggcgcgagagg

SEQ ID NO: 368139 - DNA, 1027 bp, Homo sapiens
gggactcatagagaccgtgagggagagagcgaaggcgagacagagatggagtattaccgagggacacccatttgcagagggcccagcccatccgctggagccactggattctgagccacgccgtggcactgacccgagactctgagcggctgctggaggtgcggaagcggatcaatgtcctgcccctggggagtggggccattgcaggcaatcccctgggtgtggaccgagagctgctccgagcagaactcaactttggggccatcactctcaacagcatggatgccactagtgagcgggactttgtggccgagttcctgttctgggcttcgctgtgcatgacccatctcagcaggatggccgaggacctcatcctctactgcaccaaggaattcagcttcgtgcagctctcagatgcctacagcacgggaagcagcctgatgccccagaagaaaaaccccgacagtttggagctgatccggagcaaggctgggcgtgtgtttgggcggtgtgccgggctcctgatgaccctcaagggacttcccagcacctacaacaaagacttacaggaggacaaggaagctgtgtttgaagtgtcagacactatgagtgccgtgctccaggtggccactggcgtcatctctacgctgcagattcaccaagagaacatgggacaggctctcagccccgacatgctggccactgaccttgcctattacctggtccgcaaagggatgccattccgccaggcccacgaggcctccgggaaagctgtgttcatggccgagaccaagggggtcgccctcaaccagctgtcactgcaggagctgcagaccatcagccccctgttctcgggcgacgtgatctgcgtgtgggactacgggcacagtgtggagcagtatggtgccctgggcggcactgcgcgctccagcgtcgactggcagatccgccaggtgcgggcgctactgcaggcacagcaggcctaggtcctcccacacctgccccctaataaagtgggcgcgagagg

SEQ ID NO: 368140 - DNA, 1337 bp, Homo sapiens
tgtgtgtatatgtgtgtgcctatgagagtgtgtatgtgtgtgagtgtgactgagagtgtgctagtgtatgtgtgtcactgaaagggtgtgtgtgtgtgtgtgtgtgtgtgtcagggctgcctgccaggagccctggtcaccatgaatccctgtccctgcagtggggccattgcaggcaatcccctgggtgtggaccgagagctgctccgagcaggtgagacgtcctgcccctcctccccagggagaatcaccctcagcacccgccaagacctgcagacacacctgaaaccagagggcaggggcctgtggctcctggtgaaaccttcattcattgcctatgggcactgaggtcatcaagttcaggggtcactcatggcagggatgcctggtactgagagactcagggctcctgcctccctcctgggactgtgcaaaagatccctccccccagctgttgccccaccctgatcaggggagggggctgggcaacctagttgggggagagggggccactccctgtcctccagcttagccctgcttcctcccacccccccagaactcaactttggggccatcactctcaacagcatggatgccactagtgagcgggactttgtggccgagttcctgttctgggcttcgctgtgcatgacccatctcagcaggatggccgaggacctcatcctctactgcaccaaggaattcagcttcgtgcagctctcagatgcctacagcacgggaagcagcctgatgccccagaagaaaaaccccgacagtttggagctgatccggagcaaggctgggcgtgtgtttgggcggtgtgccgggctcctgatgaccctcaagggacttcccagcacctacaacaaagacttacaggaggacaaggaagctgtgtttgaagtgtcagacactatgagtgccgtgctccaggtggccactggcgtcatctctacgctgcagattcaccaagagaacatgggacaggctctcagccccgacatgctggccactgaccttgcctattacctggtccgcaaagggatgccattccgccaggcccacgaggcctccgggaaagctgtgttcatggccgagaccaagggggtcgccctcaaccagctgtcactgcaggagctgcagaccatcagccccctgttctcgggcgacgtgatctgcgtgtgggactacgggcacagtgtggagcagtatggtgccctgggcggcactgcgcgctccagcgtcgactggcagatccgccaggtgcgggcgctactgcaggcacagcaggcctaggtcctcccacacctgccccctaataaagtgggcgcgagagg

SEQ ID NO: 368141 - DNA, 2509 bp, Homo sapiens
gacgccatcccggccagaaaagccctggccagtggcgggcgcgacactatccgtgcggccaggcggaggtgagtgcgcggcggccggatgggcgggacgggcgtggaggacgccgagcaccgtggcgcgcgctcacgtccgcgtccccaagggctgcgctccctcaagcgcagtgcccagaactcggagccagcccggcccgggggaccctgctggccaaggaggtcgtcagtccggtcttgtcttccagacccggaggaccgaagcttccggacgacgaggaaccgcccaacatggcctcggagagtgggaagctttggggtggccggtttgtgggtgcagtggaccccatcatggagaagttcaacgcgtccattgcctacgaccggcacctttgggaggtggatgttcaaggcagcaaagcctacagcaggggcctggagaaggcagggctcctcaccaaggccgagatggaccagatactccatggcctagacaaggtggctgaggagtgggcccagggcaccttcaaactgaactccaatgatgaggacatccacacagccaatgagcgccgcctgaaggagctcattggtgcaacggcagggaagctgcacacgggacggagccggaatgaccaggtggtcacagacctcaggctgtggatgcggcagacctgctccacgctctcgggcctcctctgggagctcattaggaccatggtggatcgggcagaggcggaacgtgatgttctcttcccggggtacacccatttgcagagggcccagcccatccgctggagccactggattctgagccacgccgtggcactgacccgagactctgagcggctgctggaggtgcggaagcggatcaatgtcctgcccctggggagtggggccattgcaggcaatcccctgggtgtggaccgagagctgctccgagcaggtgagacgtcctgcccctcctccccagggagaatcaccctcagcacccgccaagacctgcagacacacctgaaaccagagggcaggggcctgtggctcctggtgaaaccttcattcattgcctatgggcactgaggtcatcaagttcaggggtcactcatggcagggatgcctggtactgagagactcagggctcctgcctccctcctgggactgtgcaaaagatccctccccccagctgttgccccaccctgatcaggggagggggctgggcaacctagttgggggagagggggccactccctgtcctccagcttagccctgcttcctcccacccccccagaactcaactttggggccatcactctcaacagcatggatgccactagtgagcgggactttgtgggtgagtcctggggagccagtcccctgccctgtgcctcactttagtccttcagcccagcttctctccagtttcctcccacacctccacggacaggctggttgtggtgatattgtacactgaagtataaaccttaaatgggtaaagtgggtggggcatggtggttcaccatgcccagcactggccaacatggtgaaaccccatctctactaagaatacaaaatttagctgggtgtgtggtggcaggtgcctgtaatcccagctactcaggagttctgaggccagagaatcacttgaacccaggaggcggaggctgcagtgagccaagatcacgccagtgcactccagcctgggcaacaagagcgaaactccatctcaaaaaaaaaaaaaaaaaaaaggaagggggtgcaggcaatggaggcagatcagggcatggagaaacctgcctcagcgccatcttcctccctggcacccagatgccattccgccaggcccacgaggcctccgggaaagctgtgttcatggccgagaccaagggggtcgccctcaaccagctgtcactgcaggagctgcagaccatcagccccctgttctcgggcgacgtgatctgcgtgtgggactacgggcacagtgtggagcagtatggtgccctgggcggcactgcgcgctccagcgtcgactggcagatccgccaggtgcgggcgctactgcaggcacagcaggcctaggtcctcccacacctgccccctaataaagtgggcgcgagaggaggctgctgtgtgtttcctgccccagcctggctccctcgttgctgggctttcggggctggccagtggggacagtcagggactggagaggcagggcagggtggcctgtaatcccagcactttggaagggcaaggtgcgaggatgcttgaggccaggagtttgacacagcctgggcaacacagggagacccccatctctactcaataataaaacaaatagcctggcgtggtggcccatgcatatagtcccagctacttgtaaggctgaggtgagaggacacttgtgcccaggagtggaggctgcagtgagctatgatcacgccactgcattccagcctggataacagagtgagaacctatctctaaaaataaataaataaacgaaaaataaa

SEQ ID NO: 368142 - DNA, 1775 bp, Homo sapiens
tgtgtgtatatgtgtgtgcctatgagagtgtgtatgtgtgtgagtgtgactgagagtgtgctagtgtatgtgtgtcactgaaagggtgtgtgtgtgtgtgtgtgtgtgtgtcagggctgcctgccaggagccctggtcaccatgaatccctgtccctgcagtggggccattgcaggcaatcccctgggtgtggaccgagagctgctccgagcaggtgagacgtcctgcccctcctccccagggagaatcaccctcagcacccgccaagacctgcagacacacctgaaaccagagggcaggggcctgtggctcctggtgaaaccttcattcattgcctatgggcactgaggtcatcaagttcaggggtcactcatggcagggatgcctggtactgagagactcagggctcctgcctccctcctgggactgtgcaaaagatccctccccccagctgttgccccaccctgatcaggggagggggctgggcaacctagttgggggagagggggccactccctgtcctccagcttagccctgcttcctcccacccccccagaactcaactttggggccatcactctcaacagcatggatgccactagtgagcgggactttgtgggtgagtcctggggagccagtcccctgccctgtgcctcactttagtccttcagcccagcttctctccagtttcctcccacacctccacggacaggctggttgtggtgatattgtacactgaagtataaaccttaaatgggtaaagtgggtggggcatggtggttcaccatgcccagcactggccaacatggtgaaaccccatctctactaagaatacaaaatttagctgggtgtgtggtggcaggtgcctgtaatcccagctactcaggagttctgaggccagagaatcacttgaacccaggaggcggaggctgcagtgagccaagatcacgccagtgcactccagcctgggcaacaagagcgaaactccatctcaaaaaaaaaaaaaaaaaaaaggaagggggtgcaggcaatggaggcagatcagggcatggagaaacctgcctcagcgccatcttcctccctggcacccagatgccattccgccaggcccacgaggcctccgggaaagctgtgttcatggccgagaccaagggggtcgccctcaaccagctgtcactgcaggagctgcagaccatcagccccctgttctcgggcgacgtgatctgcgtgtgggactacgggcacagtgtggagcagtatggtgccctgggcggcactgcgcgctccagcgtcgactggcagatccgccaggtgcgggcgctactgcaggcacagcaggcctaggtcctcccacacctgccccctaataaagtgggcgcgagaggaggctgctgtgtgtttcctgccccagcctggctccctcgttgctgggctttcggggctggccagtggggacagtcagggactggagaggcagggcagggtggcctgtaatcccagcactttggaagggcaaggtgcgaggatgcttgaggccaggagtttgacacagcctgggcaacacagggagacccccatctctactcaataataaaacaaatagcctggcgtggtggcccatgcatatagtcccagctacttgtaaggctgaggtgagaggacacttgtgcccaggagtggaggctgcagtgagctatgatcacgccactgcattccagcctggataacagagtgagaacctatctctaaaaataaataaataaacgaaaaataaa

SEQ ID NO: 368143 - DNA, 1547 bp, Homo sapiens
gacgccatcccggccagaaaagccctggccagtggcgggcgcgacactatccgtgcggccaggcggagacccggaggaccgaagcttccggacgacgaggaaccgcccaacatggcctcggagagtgggaagctttggggtggccggtttgtgggtgcagtggaccccatcatggagaagttcaacgcgtccattgcctacgaccggcacctttgggaggtggatgttcaaggcagcaaagcctacagcaggggcctggagaaggcagggctcctcaccaaggccgagatggaccagatactccatggcctagacaaggtggctgaggagtgggcccagggcaccttcaaactgaactccaatgatgaggacatccacacagccaatgagcgccgcctgaaggagctcattggtgcaacggcagggaagctgcacacgggacggagccggaatgaccaggtggtcacagacctcaggctgtggatgcggcagacctgctccacgctctcgggcctcctctgggagctcattaggaccatggtggatcgggcagaggcggaacgtgatgttctcttcccggggtacacccatttgcagagggcccagcccatccgctggagccactggattctgagccacgccgtggcactgacccgagactctgagcggctgctggaggtgcggaagcggatcaatgtcctgcccctggggagtggggccattgcaggcaatcccctgggtgtggaccgagagctgctccgagcagaactcaactttggggccatcactctcaacagcatggatgccactagtgagcgggactttgtggccgagttcctgttctgggcttcgctgtgcatgacccatctcagcaggatggccgaggacctcatcctctactgcaccaaggaattcagcttcgtgcagctctcagatgcctacagcacgggaagcagcctgatgccccagaagaaaaaccccgacagtttggagctgatccggagcaaggctgggcgtgtgtttgggcggtgtgccgggctcctgatgaccctcaagggacttcccagcacctacaacaaagacttacaggaggacaaggaagctgtgtttgaagtgtcagacactatgagtgccgtgctccaggtggccactggcgtcatctctacgctgcagattcaccaagagaacatgggacaggctctcagccccgacatgctggccactgaccttgcctattacctggtccgcaaagggatgccattccgccaggcccacgaggcctccgggaaagctgtgttcatggccgagaccaagggggtcgccctcaaccagctgtcactgcaggagctgcagaccatcagccccctgttctcgggcgacgtgatctgcgtgtgggactacgggcacagtgtggagcagtatggtgccctgggcggcactgcgcgctccagcgtcgactggcagatccgccaggtgcgggcgctactgcaggcacagcaggcctaggtcctcccacacctgccccctaataaagtgggcgcgagagg

SEQ ID NO: 368144 - DNA, 953 bp, Homo sapiens
  misc_feature (894)..(895): n is a, c, g, or t
  misc_feature (899)..(899): n is a, c, g, or t
  misc_feature (904)..(904): n is a, c, g, or t
  misc_feature (918)..(918): n is a, c, g, or t
gacgccatcccggccagaaaagccctggccagtggcgggcgcgacactatccgtgcggccaggcggagacccggaggaccgaagcttccggacgacgaggaaccgcccaacatggcctcggagagtgggaagctttggggtggccggtttgtgggtgcagtggaccccatcatggagaagttcaacgcgtccattgcctacgaccggcacctttgggaggtggatgttcaaggcagcaaagcctacagcaggggcctggagaaggcagggctcctcaccaaggccgagatggaccagatactccatggcctagacaaggtggctgaggagtgggcccagggcaccttcaaactgaactccaatgatgaggacatccacacagccaatgagcgccgcctgaaggagctcattggtgcaacggcagggaagctgcacacgggacggagccggaatgaccaggtggtcacagacctcaggctgtggatgcggcagacctgctccacgctctcgggcctcctctgggagctcattaggaccatggtggatcgggcagaggcggaacgtgatgttctcttcccggggtacacccatttgcagagggcccagcccatccgctggagccactggattctgagccacgccgtggcactgacccgagactctgagcggctgctggaggtgcggaagcggatcaatgtcctgcccctggggagtggggccattgcaggcaatcccctgggtgtggaccgagagctgctccgagcagaactcaactttggggccatcactctcaacagcatggatgccactagtgagcgggactttgtggccgagttcctgttctgggcttcgctgtgcatgacccatctcagcaggatggcaagacctatcttnntggncaagnattcacgtcggagnctcaatctaagacgggaacagctgtgccaaaaaac

SEQ ID NO: 368145 - DNA, 1729 bp, Homo sapiens
gacgccatcccggccagaaaagccctggccagtggcgggcgcgacactatccgtgcggccaggcggaggtgagtgcgcggcggccggatgggcgggacgggcgtggaggacgccgagcaccgtggcgcgcgctcacgtccgcgtccccaagggctgcgctccctcaagcgcagtgcccagaactcggagccagcccggcccgggggaccctgctggccaaggaggtcgtcagtccggtcttgtcttccagacccggaggaccgaagcttccggacgacgaggaaccgcccaacatggcctcggagagtgggaagctttggggtggccggtttgtgggtgcagtggaccccatcatggagaagttcaacgcgtccattgcctacgaccggcacctttgggaggtggatgttcaaggcagcaaagcctacagcaggggcctggagaaggcagggctcctcaccaaggccgagatggaccagatactccatggcctagacaaggtggctgaggagtgggcccagggcaccttcaaactgaactccaatgatgaggacatccacacagccaatgagcgccgcctgaaggagctcattggtgcaacggcagggaagctgcacacgggacggagccggaatgaccaggtggtcacagacctcaggctgtggatgcggcagacctgctccacgctctcgggcctcctctgggagctcattaggaccatggtggatcgggcagaggcggaacgtgatgttctcttcccggggtacacccatttgcagagggcccagcccatccgctggagccactggattctgagccacgccgtggcactgacccgagactctgagcggctgctggaggtgcggaagcggatcaatgtcctgcccctggggagtggggccattgcaggcaatcccctgggtgtggaccgagagctgctccgagcagaactcaactttggggccatcactctcaacagcatggatgccactagtgagcgggactttgtggccgagttcctgttctgggcttcgctgtgcatgacccatctcagcaggatggccgaggacctcatcctctactgcaccaaggaattcagcttcgtgcagctctcagatgcctacagcacgggaagcagcctgatgccccagaagaaaaaccccgacagtttggagctgatccggagcaaggctgggcgtgtgtttgggcggtgtgccgggctcctgatgaccctcaagggacttcccagcacctacaacaaagacttacaggaggacaaggaagctgtgtttgaagtgtcagacactatgagtgccgtgctccaggtggccactggcgtcatctctacgctgcagattcaccaagagaacatgggacaggctctcagccccgacatgctggccactgaccttgcctattacctggtccgcaaagggatgccattccgccaggcccacgaggcctccgggaaagctgtgttcatggccgagaccaagggggtcgccctcaaccagctgtcactgcaggagctgcagaccatcagccccctgttctcgggcgacgtgatctgcgtgtgggactacgggcacagtgtggagcagtatggtgccctgggcggcactgcgcgctccagcgtcgactggcagatccgccaggtgcgggcgctactgcaggcacagcaggcctaggtcctcccacacctgccccctaataaagtgggcgcgagagg

SEQ ID NO: 368146 - DNA, 2119 bp, Homo sapiens
gacgccatcccggccagaaaagccctggccagtggcgggcgcgacactatccgtgcggccaggcggaggtgagtgcgcggcggccggatgggcgggacgggcgtggaggacgccgagcaccgtggcgcgcgctcacgtccgcgtccccaagggctgcgctccctcaagcgcagtgcccagaactcggagccagcccggcccgggggaccctgctggccaaggaggtcgtcagtccggtcttgtcttccagacccggaggaccgaagcttccggacgacgaggaaccgcccaacatggcctcggagagtgggaagctttggggtggccggtttgtgggtgcagtggaccccatcatggagaagttcaacgcgtccattgcctacgaccggcacctttgggaggtggatgttcaaggcagcaaagcctacagcaggggcctggagaaggcagggctcctcaccaaggccgagatggaccagatactccatggcctagacaaggtggctgaggagtgggcccagggcaccttcaaactgaactccaatgatgaggacatccacacagccaatgagcgccgcctgaaggagctcattggtgcaacggcagggaagctgcacacgggacggagccggaatgaccaggtggtcacagacctcaggctgtggatgcggcagacctgctccacgctctcgggcctcctctgggagctcattaggaccatggtggatcgggcagaggcggaacgtgatgttctcttcccggggtacacccatttgcagagggcccagcccatccgctggagccactggattctgagccacgccgtggcactgacccgagactctgagcggctgctggaggtgcggaagcggatcaatgtcctgcccctggggagtggggccattgcaggcaatcccctgggtgtggaccgagagctgctccgagcagaactcaactttggggccatcactctcaacagcatggatgccactagtgagcgggactttgtggccgagttcctgttctgggcttcgctgtgcatgacccatctcagcaggatggccgaggacctcatcctctactgcaccaaggaattcagcttcgtgcagctctcagatgcctacagcacgggaagcagcctgatgccccagaagaaaaaccccgacagtttggagctgatccggagcaaggctgggcgtgtgtttgggcggtgtgccgggctcctgatgaccctcaagggacttcccagcacctacaacaaagacttacaggaggacaaggaagctgtgtttgaagtgtcagacactatgagtgccgtgctccaggtggccactggcgtcatctctacgctgcagattcaccaagagaacatgggacaggctctcagccccgacatgctggccactgaccttgcctattacctggtccgcaaagggatgccattccgccaggcccacgaggcctccgggaaagctgtgttcatggccgagaccaagggggtcgccctcaaccagctgtcactgcaggagctgcagaccatcagccccctgttctcgggcgacgtgatctgcgtgtgggactacgggcacagtgtggagcagtatggtgccctgggcggcactgcgcgctccagcgtcgactggcagatccgccaggtgcgggcgctactgcaggcacagcaggcctaggtcctcccacacctgccccctaataaagtgggcgcgagaggaggctgctgtgtgtttcctgccccagcctggctccctcgttgctgggctttcggggctggccagtggggacagtcagggactggagaggcagggcagggtggcctgtaatcccagcactttggaagggcaaggtgcgaggatgcttgaggccaggagtttgacacagcctgggcaacacagggagacccccatctctactcaataataaaacaaatagcctggcgtggtggcccatgcatatagtcccagctacttgtaaggctgaggtgagaggacacttgtgcccaggagtggaggctgcagtgagctatgatcacgccactgcattccagcctggataacagagtgagaacctatctctaaaaataaataaataaacgaaaaataaa

SEQ ID NO: 368147 - DNA, 1673 bp, Homo sapiens
gacgccatcccggccagaaaagccctggccagtggcgggcgcgacactatccgtgcggccaggcggaggtgagtgcgcggcggccggatgggcgggacgggcgtggaggacgccgagcaccgtggcgcgcgctcacgtccgcgtccccaagggctgcgctccctcaagcgcagtgcccagaactcggagccagcccggcccgggggaccctgctggccaaggaggtcgtcagtccggtcttgtcttccagacccggaggaccgaagcttccggacgacgaggaaccgcccaacatggcctcggagagtgggaagctttggggtggccggtttgtgggtgcagtggaccccatcatggagaagttcaacgcgtccattgcctacgaccggcacctttgggaggtggatgttcaaggcagcaaagcctacagcaggggcctggagaaggcagggctcctcaccaaggccgagatggaccagatactccatggcctagacaaggtggctgaggagtgggcccagggcaccttcaaactgaactccaatgatgaggacatccacacagccaatgagcgccgcctgaaggagctcattggtgcaacggcagggaagctgcacacgggacggagccggaatgaccaggtggtcacagacctcaggctgtggatgcggcagacctgctccacgctctcgggcctcctctgggagctcattaggaccatggtggatcgggcagaggcggaacgtgatgttctcttcccggggtacacccatttgcagagggcccagcccatccgctggagccactggattctgagccacgccgtggcactgacccgagactctgagcggctgctggaggtgcggaagcggatcaatgtcctgcccctggggagtggggccattgcaggcaatcccctgggtgtggaccgagagctgctccgagcagaactcaactttggggccatcactctcaacagcatggatgccactagtgagcgggactttgtggccgagttcctgttctgggcttcgctgtgcatgacccatctcagcaggatggccgaggacctcatcctctactgcaccaaggaattcagcttcgtgcagctctcagatgcctacagcacgggaagcagcctgatgccccagaagatgtgccgggctcctgatgaccctcaagggacttcccagcacctacaacaaagacttacaggaggacaaggaagctgtgtttgaagtgtcagacactatgagtgccgtgctccaggtggccactggcgtcatctctacgctgcagattcaccaagagaacatgggacaggctctcagccccgacatgctggccactgaccttgcctattacctggtccgcaaagggatgccattccgccaggcccacgaggcctccgggaaagctgtgttcatggccgagaccaagggggtcgccctcaaccagctgtcactgcaggagctgcagaccatcagccccctgttctcgggcgacgtgatctgcgtgtgggactacgggcacagtgtggagcagtatggtgccctgggcggcactgcgcgctccagcgtcgactggcagatccgccaggtgcgggcgctactgcaggcacagcaggcctaggtcctcccacacctgccccctaataaagtgggcgcgagagg

SEQ ID NO: 368148 - DNA, 2071 bp, Homo sapiens
gacgccatcccggccagaaaagccctggccagtggcgggcgcgacactatccgtgcggccaggcggaggtgagtgcgcggcggccggatgggcgggacgggcgtggaggacgccgagcaccgtggcgcgcgctcacgtccgcgtccccaagggctgcgctccctcaagcgcagtgcccagaactcggagccagcccggcccgggggaccctgctggccaaggaggtcgtcagtccggtcttgtcttccagacccggaggaccgaagcttccggacgacgaggaaccgcccaacatggcctcggagagtgggaagctttggggtggccggtttgtgggtgcagtggaccccatcatggagaagttcaacgcgtccattgcctacgaccggcacctttgggaggtggatgttcaaggcagcaaagcctacagcaggggcctggagaaggcagggctcctcaccaaggccgagatggaccagatactccatggcctagacaaggtggctgaggagtgggcccagggcaccttcaaactgaactccaatgatgaggacatccacacagccaatgagcgccgcctgaaggagctcattggtgcaacggcagggaagctgcacacgggacggagccggaatgaccaggtggtcacagacctcaggctgtggatgcggcagacctgctccacgctctcgggcctcctctgggagctcattaggaccatggtggatcgggcagaggcggaacgtgatgttctcttcccggggtacacccatttgcagagggcccagcccatccgctggagccactggattctgagccacgccgtggcactgacccgagactctgagcggctgctggaggtgcggaagcggatcaatgtcctgcccctggggagtggggccattgcaggcaatcccctgggtgtggaccgagagctgctccgagcaggtgagacgtcctgcccctcctccccagggagaatcaccctcagcacccgccaagacctgcagacacacctgaaaccagagggcaggggcctgtggctcctggtgaaaccttcattcattgcctatgggcactgaggtcatcaagttcaggggtcactcatggcagggatgcctggtactgagagactcagggctcctgcctccctcctgggactgtgcaaaagatccctccccccagctgttgccccaccctgatcaggggagggggctgggcaacctagttgggggagagggggccactccctgtcctccagcttagccctgcttcctcccacccccccagaactcaactttggggccatcactctcaacagcatggatgccactagtgagcgggactttgtggccgagttcctgttctgggcttcgctgtgcatgacccatctcagcaggatggccgaggacctcatcctctactgcaccaaggaattcagcttcgtgcagctctcagatgcctacagcacgggaagcagcctgatgccccagaagaaaaaccccgacagtttggagctgatccggagcaaggctgggcgtgtgtttgggcggtgtgccgggctcctgatgaccctcaagggacttcccagcacctacaacaaagacttacaggaggacaaggaagctgtgtttgaagtgtcagacactatgagtgccgtgctccaggtggccactggcgtcatctctacgctgcagattcaccaagagaacatgggacaggctctcagccccgacatgctggccactgaccttgcctattacctggtccgcaaagggatgccattccgccaggcccacgaggcctccgggaaagctgtgttcatggccgagaccaagggggtcgccctcaaccagctgtcactgcaggagctgcagaccatcagccccctgttctcgggcgacgtgatctgcgtgtgggactacgggcacagtgtggagcagtatggtgccctgggcggcactgcgcgctccagcgtcgactggcagatccgccaggtgcgggcgctactgcaggcacagcaggcctaggtcctcccacacctgccccctaataaagtgggcgcgagagg

SEQ ID NO: 368149 - DNA, 1534 bp, Homo sapiens
gacgccatcccggccagaaaagccctggccagtggcgggcgcgacactatccgtgcggccaggcggaggtgagtgcgcggcggccggatgggcgggacgggcgtggaggacgccgagcaccgtggcgcgcgctcacgtccgcgtccccaagggctgcgctccctcaagcgcagtgcccagaactcggagccagcccggcccgggggaccctgctggccaaggaggtcgtcagtccggtcttgtcttccagacccggaggaccgaagcttccggacgacgaggaaccgcccaacatggcctcggaggtggctgaggagtgggcccagggcaccttcaaactgaactccaatgatgaggacatccacacagccaatgagcgccgcctgaaggagctcattggtgcaacggcagggaagctgcacacgggacggagccggaatgaccaggtggtcacagacctcaggctgtggatgcggcagacctgctccacgctctcgggcctcctctgggagctcattaggaccatggtggatcgggcagaggcggaacgtgatgttctcttcccggggtacacccatttgcagagggcccagcccatccgctggagccactggattctgagccacgccgtggcactgacccgagactctgagcggctgctggaggtgcggaagcggatcaatgtcctgcccctggggagtggggccattgcaggcaatcccctgggtgtggaccgagagctgctccgagcagaactcaactttggggccatcactctcaacagcatggatgccactagtgagcgggactttgtggccgagttcctgttctgggcttcgctgtgcatgacccatctcagcaggatggccgaggacctcatcctctactgcaccaaggaattcagcttcgtgcagctctcagatgcctacagcacgggaagcagcctgatgccccagaagaaaaaccccgacagtttggagctgatccggagcaaggctgggcgtgtgtttgggcggtgtgccgggctcctgatgaccctcaagggacttcccagcacctacaacaaagacttacaggaggacaaggaagctgtgtttgaagtgtcagacactatgagtgccgtgctccaggtggccactggcgtcatctctacgctgcagattcaccaagagaacatgggacaggctctcagccccgacatgctggccactgaccttgcctattacctggtccgcaaagggatgccattccgccaggcccacgaggcctccgggaaagctgtgttcatggccgagaccaagggggtcgccctcaaccagctgtcactgcaggagctgcagaccatcagccccctgttctcgggcgacgtgatctgcgtgtgggactacgggcacagtgtggagcagtatggtgccctgggcggcactgcgcgctccagcgtcgactggcagatccgccaggtgcgggcgctactgcaggcacagcaggcctaggtcctcccacacctgccccctaataaagtgggcgcgagagg

SEQ ID NO: 368150 - DNA, 2163 bp, Homo sapiens
  misc_feature (2089)..(2089): n is a, c, g, or t
gacgccatcccggccagaaaagccctggccagtggcgggcgcgacactatccgtgcggccaggcggaggtgagtgcgcggcggccggatgggcgggacgggcgtggaggacgccgagcaccgtggcgcgcgctcacgtccgcgtccccaagggctgcgctccctcaagcgcagtgcccagaactcggagccagcccggcccgggggaccctgctggccaaggaggtcgtcagtccggtcttgtcttccagacccggaggaccgaagcttccggacgacgaggaaccgcccaacatggcctcggagagtgggaagctttggggtggccggtttgtgggtgcagtggaccccatcatggagaagttcaacgcgtccattgcctacgaccggcacctttgggaggtggatgttcaaggcagcaaagcctacagcaggggcctggagaaggcagggctcctcaccaaggccgagatggaccagatactccatggcctagacaaggtggctgaggagtgggcccagggcaccttcaaactgaactccaatgatgaggacatccacacagccaatgagcgccgcctgaaggagctcattggtgcaacggcagggaagctgcacacgggacggagccggaatgaccaggtggtcacagacctcaggctgtggatgcggcagacctgctccacgctctcgggcctcctctgggagctcattaggaccatggtggatcgggcagaggcggaacgtgatgttctcttcccggggtacacccatttgcagagggcccagcccatccgctggagccactggattctgagccacgccgtggcactgacccgagactctgagcggctgctggaggtgcggaagcggatcaatgtcctgcccctggggagtggggccattgcaggcaatcccctgggtgtggaccgagagctgctccgagcagaactcaactttggggccatcactctcaacagcatggatgccactagtgagcgggactttgtggccgagttcctgttctgggcttcgctgtgcatgacccatctcagcaggatggccgaggacctcatcctctactgcaccaaggaattcagcttcgtgcagctctcagatgcctacagcacgggaagcagcctgatgccccagaagaaaaaccccgacagtttggagctgatccggagcaaggctgggcgtgtgtttgggcggtgtgccgggctcctgatgaccctcaagggacttcccagcacctacaacaaagacttacagcagctgtcactgcaggagctgcagaccatcagccccctgttctcgggcgacgtgatctgcgtgtgggactacgggcacagtgtggagcagtatggtgccctgggcggcactgcgcgctccagcgtcgactggcagatccgccaggtgcgggcgctactgcaggcacagcaggcctaggtcctcccacacctgccccctaataaagtgggcgcgagaggaaaaaaaaaacaaaaaaaaaaaaaaaaaaaaaaacaaaaaagagaggcggggggcgcgcgctgcagagaaatatacccccgccggggggggccccataatagacgcggctcccccccgactctttcgtgcaacaagaggggcgcccccccatagaaggggcggcgcgattaataagaacccgagagagcggcggggcgcccgtcgctttttcatcccaagggcgcgcgacaggggcgagtggggagaagacaccgggtgctgtccttgctgagcgagaacatctcttgtgtgggcgaggacggaggcccaccctcatacgctctgccgaggggggaggggcgagccacaatatcgattgagcgggaagacaacctaacttcctcagagaagagaagagattatataacgaacgatcttaatggagagggagaagatattatatagagaaattataatagaggggagatgtatattaatgggtgtgcgttcataacaaaaagagggagagagaaaaatatttggaccggagaggcgatgatgagagaagattgtatgaggcgcaatcagagcaagagaaatgatatgctatagattaatgncaggaaaaactatttttttttataaacgagggagggggcgatccattctatagattaattaaatgatgaagcga

SEQ ID NO: 368151 - DNA, 2015 bp, Homo sapiens
gacgccatcccggccagaaaagccctggccagtggcgggcgcgacactatccgtgcggccaggcggaggtgagtgcgcggcggccggatgggcgggacgggcgtggaggacgccgagcaccgtggcgcgcgctcacgtccgcgtccccaagggctgcgctccctcaagcgcagtgcccagaactcggagccagcccggcccgggggaccctgctggccaaggaggtcgtcagtccggtcttgtcttccagacccggaggaccgaagcttccggacgacgaggaaccgcccaacatggcctcggagagtgggaagctttggggtggccggtttgtgggtgcagtggaccccatcatggagaagttcaacgcgtccattgcctacgaccggcacctttgggaggtggatgttcaaggcagcaaagcctacagcaggggcctggagaaggcagggctcctcaccaaggccgagatggaccagatactccatggcctagacaaggtggctgaggagtgggcccagggcaccttcaaactgaactccaatgatgaggacatccacacagccaatgagcgccgcctgaaggagctcattggtgcaacggcagggaagctgcacacgggacggagccggaatgaccaggtggtcacagacctcaggctgtggatgcggcagacctgctccacgctctcgggcctcctctgggagctcattaggaccatggtggatcgggcagaggcggaacgtgatgttctcttcccggggtacacccatttgcagagggcccagcccatccgctggagccactggattctgagccacgccgtggcactgacccgagactctgagcggctgctggaggtgcggaagcggatcaatgtcctgcccctggggagtggggccattgcaggcaatcccctgggtgtggaccgagagctgctccgagcaggtgagacgtcctgcccctcctccccagggagaatcaccctcagcacccgccaagacctgcagacacacctgaaaccagagggcaggggcctgtggctcctggtgaaaccttcattcattgcctatgggcactgaggtcatcaagttcaggggtcactcatggcagggatgcctggtactgagagactcagggctcctgcctccctcctgggactgtgcaaaagatccctccccccagctgttgccccaccctgatcaggggagggggctgggcaacctagttgggggagagggggccactccctgtcctccagcttagccctgcttcctcccacccccccagaactcaactttggggccatcactctcaacagcatggatgccactagtgagcgggactttgtggccgagttcctgttctgggcttcgctgtgcatgacccatctcagcaggatggccgaggacctcatcctctactgcaccaaggaattcagcttcgtgcagctctcagatgcctacagcacgggaagcagcctgatgccccagaagatgtgccgggctcctgatgaccctcaagggacttcccagcacctacaacaaagacttacaggaggacaaggaagctgtgtttgaagtgtcagacactatgagtgccgtgctccaggtggccactggcgtcatctctacgctgcagattcaccaagagaacatgggacaggctctcagccccgacatgctggccactgaccttgcctattacctggtccgcaaagggatgccattccgccaggcccacgaggcctccgggaaagctgtgttcatggccgagaccaagggggtcgccctcaaccagctgtcactgcaggagctgcagaccatcagccccctgttctcgggcgacgtgatctgcgtgtgggactacgggcacagtgtggagcagtatggtgccctgggcggcactgcgcgctccagcgtcgactggcagatccgccaggtgcgggcgctactgcaggcacagcaggcctaggtcctcccacacctgccccctaataaagtgggcgcgagagg

SEQ ID NO: 368152 - DNA, 1321 bp, Homo sapiens
gacgccatcccggccagaaaagccctggccagtggcgggcgcgacactatccgtgcggccaggcggaggtgagtgcgcggcggccggatgggcgggacgggcgtggaggacgccgagcaccgtggcgcgcgctcacgtccgcgtccccaagggctgcgctccctcaagcgcagtgcccagaactcggagccagcccggcccgggggaccctgctggccaaggaggtcgtcagtccggtcttgtcttccagacccggaggaccgaagcttccggacgacgaggaaccgcccaacatggcctcggagagtgggaagctttggggtggccggtttgtgggtgcagtggaccccatcatggagaagttcaacgcgtccattgcctacgaccggcacctttgggaggtggatgttcaaggcagcaaagcctacagcaggggcctggagaaggcagggctcctcaccaaggccgagatggaccagatactccatggcctagacaaggtggctgaggagtgggcccagggcaccttcaaactgaactccaatgatgaggacatccacacagccaatgagcgccgcctgaaggagctcattggtgcaacggcagggaagctgcacacgggacggagccggaatgaccaggtggtcacagacctcaggctgtggatgcggcagacctgctccacgctctcgggcctcctctgggagctcattaggaccatggtggatcgggcagaggcggaacgtgatgttctcttcccggggtacacccatttgcagagggcccagcccatccgctggagccactggattctgagccacgccgtggcactgacccgagactctgagcggctgctggaggtgcggaagcggatcaatgtcctgcccctggggagtggggccattgcaggcaatcccctgggtgtggaccgagagctgctccgagcagaactcaactttggggccatcactctcaacagcatggatgccactagtgagcgggactttgtggccgagttcctgttctgggcttcgctgtgcatgacccatctcagcaggatggccgaggacctcatcctctactgcaccaaggaattcagcttcgtgcagctctcagatgcctacagcacgggaagcagcctgatgccccagaagaaaaaccccgacagtttggagctgatccggagcaaggctgggcgtgtgtttgggcggtgtgccgggctcctgatgaccctcaagggacttcccagcacctacaacaaagacttacagcaggcctaggtcctcccacacctgccccctaataaagtgggcgcgagagg

SEQ ID NO: 368153 - DNA, 2039 bp, Homo sapiens
gacgccatcccggccagaaaagccctggccagtggcgggcgcgacactatccgtgcggccaggcggaggtgagtgcgcggcggccggatgggcgggacgggcgtggaggacgccgagcaccgtggcgcgcgctcacgtccgcgtccccaagggctgcgctccctcaagcgcagtgcccagaactcggagccagcccggcccgggggaccctgctggccaaggaggtcgtcagtccggtcttgtcttccagacccggaggaccgaagcttccggacgacgaggaaccgcccaacatggcctcggagagtgggaagctttggggtggccggtttgtgggtgcagtggaccccatcatggagaagttcaacgcgtccattgcctacgaccggcacctttgggaggtggatgttcaaggcagcaaagcctacagcaggggcctggagaaggcagggctcctcaccaaggccgagatggaccagatactccatggcctagacaaggtggctgaggagtgggcccagggcaccttcaaactgaactccaatgatgaggacatccacacagccaatgagcgccgcctgaaggagctcattggtgcaacggcagggaagctgcacacgggacggagccggaatgaccaggtggtcacagacctcaggctgtggatgcggcagacctgctccacgctctcgggcctcctctgggagctcattaggaccatggtggatcgggcagaggcggaacgtgatgttctcttcccggggtacacccatttgcagagggcccagcccatccgctggagccactggattctgagccacgccgtggcactgacccgagactctgagcggctgctggaggtgcggaagcggatcaatgtcctgcccctggggagtggggccattgcaggcaatcccctgggtgtggaccgagagctgctccgagcaggtgagacgtcctgcccctcctccccagggagaatcaccctcagcacccgccaagacctgcagacacacctgaaaccagagggcaggggcctgtggctcctggtgaaaccttcattcattgcctatgggcactgaggtcatcaagttcaggggtcactcatggcagggatgcctggtactgagagactcagggctcctgcctccctcctgggactgtgcaaaagatccctccccccagctgttgccccaccctgatcaggggagggggctgggcaacctagttgggggagagggggccactccctgtcctccagcttagccctgcttcctcccacccccccagaactcaactttggggccatcactctcaacagcatggatgccactagtgagcgggactttgtggccgagttcctgttctgggcttcgctgtgcatgacccatctcagcaggatggccgaggacctcatcctctactgcaccaaggaattcagcttcgtgcagctctcagatgcctacagcacgggaagcagcctgatgccccagaagacccctgtgcctccctcttcccgcatgtgccgggctcctgatgaccctcaagggacttcccagcacctacaacaaagacttacaggaggacaaggaagctgtgtttgaagtgtcagacactatgagtgccgtgctccaggtggccactggcgtcatctctacgctgcagattcaccaagagaacatgggacaggctctcagccccgacatgctggccactgaccttgcctattacctggtccgcaaagggatgccattccgccaggcccacgaggcctccgggaaagctgtgttcatggccgagaccaagggggtcgccctcaaccagctgtcactgcaggagctgcagaccatcagccccctgttctcgggcgacgtgatctgcgtgtgggactacgggcacagtgtggagcagtatggtgccctgggcggcactgcgcgctccagcgtcgactggcagatccgccaggtgcgggcgctactgcaggcacagcaggcctaggtcctcccacacctgccccctaataaagtgggcgcgagagg

SEQ ID NO: 368154 - DNA, 1952 bp, Homo sapiens
gacgccatcccggccagaaaagccctggccagtggcgggcgcgacactatccgtgcggccaggcggaggtgagtgcgcggcggccggatgggcgggacgggcgtggaggacgccgagcaccgtggcgcgcgctcacgtccgcgtccccaagggctgcgctccctcaagcgcagtgcccagaactcggagccagcccggcccgggggaccctgctggccaaggaggtcgtcagtccggtcttgtcttccagacccggaggaccgaagcttccggacgacgaggaaccgcccaacatggcctcggagagtgggaagctttggggtggccggtttgtgggtgcagtggaccccatcatggagaagttcaacgcgtccattgcctacgaccggcacctttgggaggtggatgttcaaggcagcaaagcctacagcaggggcctggagaaggcagggctcctcaccaaggccgagatggaccagatactccatggcctagacaaggtggctgaggagtgggcccagggcaccttcaaactgaactccaatgatgaggacatccacacagccaatgagcgccgcctgaaggagctcattggtgcaacggcagggaagctgcacacgggacggagccggaatgaccaggtggtcacagacctcaggctgtggatgcggcagacctgctccacgctctcgggcctcctctgggagctcattaggaccatggtggatcgggcagaggcggaacgtgatgttctcttcccggggtacacccatttgcagagggcccagcccatccgctggagccactggattctgagccacgccgtggcactgacccgagactctgagcggctgctggaggtgcggaagcggatcaatgtcctgcccctggggagtggggccattgcaggcaatcccctgggtgtggaccgagagctgctccgagcaggtgagacgtcctgcccctcctccccagggagaatcaccctcagcacccgccaagacctgcagacacacctgaaaccagagggcaggggcctgtggctcctggtgaaaccttcattcattgcctatgggcactgaggtcatcaagttcaggggtcactcatggcagggatgcctggtactgagagactcagggctcctgcctccctcctgggactgtgcaaaagatccctccccccagctgttgccccaccctgatcaggggagggggctgggcaacctagttgggggagagggggccactccctgtcctccagcttagccctgcttcctcccacccccccagaactcaactttggggccatcactctcaacagcatggatgccactagtgagcgggactttgtgggtgagtcctggggagccagtcccctgccctgtgcctcactttagtccttcagcccagcttctctccagtttcctcccacacctccacggacaggctggttgtggtgatattgtacactgaagtataaaccttaaatgggtaaagtgggtggggcatggtggttcaccatgcccagcactggccaacatggtgaaaccccatctctactaagaatacaaaatttagctgggtgtgtggtggcaggtgcctgtaatcccagctactcaggagttctgaggccagagaatcacttgaacccaggaggcggaggctgcagtgagccaagatcacgccagtgcactccagcctgggcaacaagagcgaaactccatctcaaaaaaaaaaaaaaaaaaaaggaagggggtgcaggcaatggaggcagatcagggcatggagaaacctgcctcagcgccatcttcctccctggcacccagatgccattccgccaggcccacgaggcctccgggaaagctgtgttcatggccgagaccaagggggtcgccctcaaccagctgtcactgcaggagctgcagaccatcaggtacggcccatccccttcc

SEQ ID NO: 368155 - DNA, 413 bp, Homo sapiens
gacgccatcccggccagaaaagccctggccagtggcgggcgcgacactatccgtgcggccaggcggaggtgagtgcgcggcggccggatgggcgggacgggcgtggaggacgccgagcaccgtggcgcgcgctcacgtccgcgtccccaagggctgcgctccctcaagcgcagtgcccagaactcggagccagcccggcccgggggaccctgctggccaaggaggtcgtcagtccggtcttgtcttccagacccggaggaccgaagcttccggacgacgaggaaccgcccaacatggcctcggaggtgagtgggacctcggggactccggtcctcctagcctccaaaggagagagtgggggcgccagacctgcctcgggccaccctgctgggaatcgccctccaggaagcaat

SEQ ID NO: 368156 - DNA, 418 bp, Homo sapiens
  misc_feature (375)..(375): n is a, c, g, or t
tgtagtaaaaatgtaggttatgtttcttcgtctgaaaataagctattctgaaaagctaagctttcccaatggtacatgagttctctctctaattatatcttctgtattcctctctcacttgaataattttcttttgaaaactttctgaagttatatgctttcagactttgtaaaataatatgttgaacatgattaatcatctctcagttaggttcattattttcaatcatattattgtattgtgctgtgataacaatgtccctagaaactggacagtttatagagcagttcgcccggcctaattttttttttttttttgagatggagtcttgctctgttgcccaggctgcagtacagtgatccaagatcataccnctacactccaggctgtgtgacacaatgagactgtgtcttaaaa

SEQ ID NO: 368157 - DNA, 410 bp, Homo sapiens
agctgtacctcatttaaatctttgggtttactgctcatcttactatatcaggtaagcatgctgctttgtgtctgcccacaagctggactcagggattacagaatgagtgtggctctggtggacacagggaagcatggagataaagaagttcattggtttctctaaatctgtttttcccagaacagtttggcagcacagtgaaaaccaactgcagaatcctcatttcctaggaaacgtctatcaagccacagatccctcaacttgtcaccagcccatagtctgtcaaggcataagccagttgtactcggaagacacgctgcatccttgtgatgccttgccttgtatgggatttattatcaactgttacccattgtttaggggtttttcccccctctctcttcctgacatcc

SEQ ID NO: 368158 - DNA, 3908 bp, Homo sapiens
ctaggcctgggactcctgggtccccggcagtgtctggaggcatggctggggctggcgggggcctcggggtctgggggaacctggtgctgctgggcctgtgcagctggacaggggccagggcgcctgcccccaacccagggaggaacctgacagtggagactcagaccaccagctccatctccctgagctgggaggtccccgatggcctagactcacagaactccaactactgggttcagtgtactggagacggcggcacaacagagactcgaaacacaacagccaccaacgtcaccgtggatggccttggacccgggtcattgtatacgtgttctgtgtgggtggagaaagacggagtaaatagctctgtggggactgtcactactgccacagctcccaacccagtgaggaacctgagagtggaggctcagaccaacagctccatcgccctgacctgggaggtccccgacggcccagacccacagaactccacctacggggttgagtacactggagatggtggcagagcagggactcgaagcacagcacacactaacatcaccgtggatggacttgaacccgggtgtttgtatgcgttttccatgtgggtgggaaagaatggaatcaacagctcccgggagactcgaaatgccaccacagctcacaacccagtgaggaaacctgagagtggaggctcagaccaccagctccatctccctgagctgggaggtccccgatggcacagacccacagaactcgacctactgcgtacgagtgcactggagatggtggcagaacagagactcgaaacacaacagacaccagagtcaccagtggatggccttggacccgggtcattgtatacgtgttctgtgtgggtggagaaagacggagtaaatagctcctcgtggagattggtaactagtaccacagctcccaacccagtgagaaacctgacagtggaggctcagaccaacagctccatcgccctgacctgggaggtccccgatggcccagacccacagaactccacctacggggttgagtacactggagatggtggcagagcagggactcgaagcacagcacacaccaacatcaccgtggatagacttgaacccgggtgtttgtatgtgttttccgtgtgggtggggaagaatggaatcaacagctcccgggagactcgaaatgccaccacagcccccaacccagtgagaaacctccatatggagactcagaccaacagctccatcgccctatgctgggaagtccccgatggcccataccctcaggactacacctactgggtagagtacactggagacggtggtggcacagagacccgaaacacaacaaataccagtgtgacagctgagagacttgagcccggaaccttgtacacattctctgtatgggcagaaaaaaatggagcacgtggctccaggcagaatgtcagcatctccacagtccccaacgcagtgacaagcctcagcaagcaggactggaccaacagcaccattgctttgcgctggacagctccccagggcccaggccagtcttcctacagctactgggtctcatgggtcagggaaggcatgactgaccccaggacccaaagcacctcaggtactgacatcaccctaaaggaactggaagctggcagcctgtaccacctcaccgtctgggccgagaggaatgaggtcagaggctataacagcaccctcactgcagccactgctcccaatgaggtcacagatctccagaatgaaactcagactaagaactcagtcatgctgtggtggaaggcccctggagacccccactctcagttgtacgtatactgggtccagtgggccagcaagggacatccccggagggggcaagatccccaagcgaattgggtcaaccagaccagcaggaccaatgagacgtggtacaaagtggaggccctggaacccgggacgttgtacaatttcaccgtgtgggcagagaggaatgacgtagccagttccacgcagagcctctgtgcgtccacatacccagacacagtcaccatcacttcctgtgtcagcacctcagcgggctatggagtcaacttgatctggtcctgcccccagggaggctacgaggcctttgagttggaggtgggaggacagcggggctcccaggacagatcttcatgtggggaggctgtgtctgtgttgggtctcgggccggctcggtcctacccagccaccatcacgaccatctgggacggaatgaaggtcgtgtctcactctgtggtctgccacaccgagagtgcaggggtcattgccggagcctttgtgggcatcctcctgtttctcatcctcgtgggcctgctgattttcttcctgaagaggaggaataagaagaagcagcagaaaccagaactcagggatctggtctttagctccccaggggacatcccagctgaagacttcgctgaccacgtcaggaagaatgagagggacagcaactgtggttttgcagacgagtaccagcaactctccctggtgggccacagccagtctcagatggtggcttcggcttcagagaacaacgccaagaaccgctacagaaatgtgctgccctatgactggtcccgggtgcccctgaagcccatccatgaggagccaggctctgactacatcaatgccagcttcatgcccggtctctggagcccccaggagttcattgcaacccagggtcccctgccacagacagtgggtgacttctggcgcctggtgtgggaacagcagagccacaccctggtcatgctgaccaactgcatggaggccggccgggtgaagtgtgagcattactggcctctggactcgcagccctgcacccatgggcacctgcgggtaaccctggtaggtgaggaagtgatggagaactggacggtgcgggaactgctgctcctccaggtggaggagcagaagacactgtctgtgcgccaattccactaccaggcctggccggatcacggcgttccctcctccccagacaccttgctggctttctggaggatgcttcggcagtggctggatcagaccatggagggaggcccacccattgtgcactgcagtgctggcgtgggtcgcacaggaaccctcattgccctggacgtcctgctccggcagctgcagtccgagggtctccttgggcccttcagctttgtaaggaagatgagagagagtcggccgttgatggtgcagactgaggctcagtacgtattcctgcatcagtgcatctgcggttcctccaacagtcagcccaggccccagccgagaaggaagtcccgtatgaggatgtcgaaaacctcatctacgagaacgtggccgccatccaggcccacaagttggaggtctaagtgacgagggggctgggtcggcagcccaggcatcctcaagctctggacacccacttgagcccagattcctggaagagcagagggctgggctcccagactcctgggtgctgtgggaggagggggctggtatcccaaactctggtttccccaggagagagtggtctggtgggcttcagatgagtcctatgggagctggggatctggattcctggttccctgaaggaggagagggatgatagcttggattccctaggtctttccaggatgcagaaagaaacaggctggggcctggattctgaggcaggaaggaatttgggtctggagttctggctacttgaggaccaaaggcaggaaggatcctgccttgattttacttcagaaaccaaatcagtcttctataatctggggtcggagggagtccctgtgcccaaggtctctctgcaccccaccatccacatgtatttttccttctatcccataatttattaaatcactgttctccccagaaaaagtt

SEQ ID NO: 368159 - DNA, 3419 bp, Homo sapiens
ctaggcctgggactcctgggtccccggcagtgtctggaggcatggctggggctggcgggggcctcggggtctgggggaacctggtgctgctgggcctgtgcagctggacaggggccagggcgcctgcccccaacccagggaggaacctgacagtggagactcagaccaccagctccatctccctgagctgggaggtccccgatggcctagactcacagaactccaactactgggttcagtgtactggagacggcggcacaacagagactcgaaacacaacagccaccaacgtcaccgtggatggccttggacccgggtcattgtatacgtgttctgtgtgggtggagaaagacggagtaaatagctctgtggggactgtcactactgccacagctcccaacccagtgaggaacctgagagtggaggctcagaccaacagctccatcgccctgacctgggaggtccccgacggcccagacccacagaactccacctacggggttgagtacactggagatggtggcagagcagggactcgaagcacagcacacactaacatcaccgtggatggacttgaacccgggtgtttgtatgcgttttccatgtgggtgggaaagaatggaatcaacagctcccgggagactcgaaatgccaccacagctcacaacccagtgaggaaacctgagagtggaggctcagaccaccagctccatctccctgagctgggaggtccccgatggcacagacccacagaactcgacctactgcgtacgagtgcactggagatggtggcagaacagagactcgaaacacaacagacaccagagtcaccagtggatggccttggacccgggtcattgtatacgtgttctgtgtgggtggagaaagacggagtaaatagctcctcgtggagattggtaactagtaccacagctcccaacccagtgagaaacctgacagtggaggctcagaccaacagctccatcgccctgacctgggaggtccccgatggcccagacccacagaactccacctacggggttgagtacactggagatggtggcagagcagggactcgaagcacagcacacaccaacatcaccgtggatagacttgaacccgggtgtttgtatgtgttttccgtgtgggtggggaagaatggaatcaacagctcccgggagactcgaaatgccaccacagcccccaacccagtgagaaacctccatatggagactcagaccaacagctccatcgccctatgctgggaagtccccgatggcccataccctcaggactacacctactgggtagagtacactggagacggtggtggcacagagacccgaaacacaacaaataccagtgtgacagctgagagacttgagcccggaaccttgtacacattctctgtatgggcagaaaaaaatggagcacgtggctccaggcagaatgtcagcatctccacagccgggacgttgtacaatttcaccgtgtgggcagagaggaatgacgtagccagttccacgcagagcctctgtgcgtccacatacccagacacagtcaccatcacttcctgtgtcagcacctcagcgggctatggagtcaacttgatctggtcctgcccccagggaggctacgaggcctttgagttggaggtgggaggacagcggggctcccaggacagatcttcatgtggggaggctgtgtctgtgttgggtctcgggccggctcggtcctacccagccaccatcacgaccatctgggacggaatgaaggtcgtgtctcactctgtggtctgccacaccgagagtgcaggggtcattgccggagcctttgtgggcatcctcctgtttctcatcctcgtgggcctgctgattttcttcctgaagaggaggaataagaagaagcagcagaaaccagaactcagggatctggtctttagctccccaggggacatcccagctgaagacttcgctgaccacgtcaggaagaatgagagggacagcaactgtggttttgcagacgagtaccagcaactctccctggtgggccacagccagtctcagatggtggcttcggcttcagagaacaacgccaagaaccgctacagaaatgtgctgccctatgactggtcccgggtgcccctgaagcccatccatgaggagccaggctctgactacatcaatgccagcttcatgcccggtctctggagcccccaggagttcattgcaacccagggtcccctgccacagacagtgggtgacttctggcgcctggtgtgggaacagcagagccacaccctggtcatgctgaccaactgcatggaggccggccgggtgaagtgtgagcattactggcctctggactcgcagccctgcacccatgggcacctgcgggtaaccctggtaggtgaggaagtgatggagaactggacggtgcgggaactgctgctcctccaggtggaggagcagaagacactgtctgtgcgccaattccactaccaggcctggccggatcacggcgttccctcctccccagacaccttgctggctttctggaggatgcttcggcagtggctggatcagaccatggagggaggcccacccattgtgcactgcagtgctggcgtgggtcgcacaggaaccctcattgccctggacgtcctgctccggcagctgcagtccgagggtctccttgggcccttcagctttgtaaggaagatgagagagagtcggccgttgatggtgcagactgaggctcagtacgtattcctgcatcagtgcatctgcggttcctccaacagtcagcccaggccccagccgagaaggaagtcccgtatgaggatgtcgaaaacctcatctacgagaacgtggccgccatccaggcccacaagttggaggtctaagtgacgagggggctgggtcggcagcccaggcatcctcaagctctggacacccacttgagcccagattcctggaagagcagagggctgggctcccagactcctgggtgctgtgggaggagggggctggtatcccaaactctggtttccccaggagagagtggtctggtgggcttcagatgagtcctatgggagctggggatctggattcctggttccctgaaggaggagagggatgatagcttggattccctaggtctttccaggatgcagaaagaaacaggctggggcctggattctgaggcaggaaggaatttgggtctggagttctggctacttgaggaccaaaggcaggaaggatcctgccttgattttacttcagaaaccaaatcagtcttctataatctggggtcggagggagtccctgtgcccaaggtctctctgcaccccaccatccacatgtatttttccttctatcccataatttattaaatcactgttctccccagaaaaagtt

SEQ ID NO: 368160 - DNA, 1144 bp, Homo sapiens
ctaggcctgggactcctgggtccccggcagtgtctggaggcatggctggggctggcgggggcctcggggtctgggggaacctggtgctgctgggcctgtgcagctggacaggggccagggcgcctgcccccaacccagggaggaacctgacagtggagactcagaccaccagctccatctccctgagctgggaggtccccgatggcctagactcacagaactccaactactgggttcagtgtactggagacggcggcacaacagagactcgaaacacaacagccaccaacgtcaccgtggatggccttggacccgggtcattgtatacgtgttctgtgtgggtggagaaagacggagtaaatagctctgtggggactgtcactactgccacagctcccaacccagtgaggaacctgagagtggaggctcagaccaacagctccatcgccctgacctgggaggtccccgacggcccagacccacagaactccacctacggggttgagtacactggagatggtggcagagcagggactcgaagcacagcacacactaacatcaccgtggatggacttgaacccgggtgtttgtatgcgttttccatgtgggtgggaaagaatggaatcaacagctcccgggagactcgaaatgccaccacaggtgagaggcagtcgccatttgttttgctcttacttgtttaaggggcagtaggcaggagaacgtagcggatttctattccatagtccctctgggccacattgagccaggtactcatgtccacatcctggggcagtctcagctcaggagatgaagaaggaatgaatgtccatggtacctccagctgctaagctggggccggtctgtgtctaggactctctagaatgtaccttcctgcaccaagaggaatgtgtaggggccaaggcatgttacctgagctttcaaggaattagatactgtgagtggggacactctgaccctctgactcttcttctagtccccagctgcgtcacatattgaggatggaaactcagatcatcagctccatgatcctgatgtggagagctccctctggctagatctccattgtccgatatggtagccaccagccacacatggctatgcgtcttagggaaactctggacag

SEQ ID NO: 368161 - DNA, 3773 bp, Homo sapiens
ctaggcctgggactcctgggtccccggcagtgtctggaggcatggctggggctggcgggggcctcggggtctgggggaacctggtgctgctgggcctgtgcagctggacaggggccagggcgcctgcccccaacccagggaggaacctgacagtggagactcagaccaccagctccatctccctgagctgggaggtccccgatggcctagactcacagaactccaactactgggttcagtgtactggagacggcggcacaacagagactcgaaacacaacagccaccaacgtcaccgtggatggccttggacccgggtcattgtatacgtgttctgtgtgggtggagaaagacggagtaaatagctctgtggggactgtcactactgccacagctcccaacccagtgaggaacctgagagtggaggctcagaccaacagctccatcgccctgacctgggaggtccccgacggcccagacccacagaactccacctacggggttgagtacactggagatggtggcagagcagggactcgaagcacagcacacactaacatcaccgtggatggacttgaacccgggtgtttgtatgcgttttccatgtgggtgggaaagaatggaatcaacagctcccgggagactcgaaatgccaccacagctcacaacccagtgaggaaacctgagagtggaggctcagaccaccagctccatctccctgagctgggaggtccccgatggcacagacccacagaactcgacctactgcgtacgagtgcactggagatggtggcagaacagagactcgaaacacaacagacaccagagtcaccagtggatggccttggacccgggtcattgtatacgtgttctgtgtgggtggagaaagacggagtaaatagctcctcgtggagattggtaactagtaccacagctcccaacccagtgagaaacctgacagtggaggctcagaccaacagctccatcgccctgacctgggaggtccccgatggcccagacccacagaactccacctacggggttgagtacactggagatggtggcagagcagggactcgaagcacagcacacaccaacatcaccgtggatagacttgaacccgggtgtttgtatgtgttttccgtgtgggtggggaagaatggaatcaacagctcccgggagactcgaaatgccaccacagcccccaacccagtgagaaacctccatatggagactcagaccaacagctccatcgccctatgctgggaagtccccgatggcccataccctcaggactacacctactgggtagagtacactggagacggtggtggcacagagacccgaaacacaacaaataccagtgtgacagctgagagacttgagcccggaaccttgtacacattctctgtatgggcagaaaaaaatggagcacgtggctccaggcagaatgtcagcatctccacagtccccaacgcagtgacaagcctcagcaagcaggactggaccaacagcaccattgctttgcgctggacagctccccagggcccaggccagtcttcctacagctactgggtctcatgggtcagggaaggcatgactgaccccaggacccaaagcacctcaggtactgacatcaccctaaaggaactggaagctggcagcctgtaccacctcaccgtctgggccgagaggaatgaggtcagaggctataacagcaccctcactgcagccactgctcccaatgaggtcacagatctccagaatgaaactcagactaagaactcagtcatgctgtggtggaaggcccctggagacccccactctcagttgtacgtatactgggtccagtgggccagcaagggacatccccggagggggcaagatccccaagcgaattgggtcaaccagaccagcaggaccaatgagacgtggtacaaagtggaggccctggaacccgggacgttgtacaatttcaccgtgtgggcagagaggaatgacgtagccagttccacgcagagcctctgtgcgtccacatacccagacacagtcaccatcacttcctgtgtcagcacctcagcgggctatggagtcaacttgatctggtcctgcccccagggaggctacgaggcctttgagttggaggtgggaggacagcggggctcccaggacagatcttcatgtggggaggctgtgtctgtgttgggtctcgggccggctcggtcctacccagccaccatcacgaccatctgggacggaatgaaggtcgtgtctcactctgtggtctgccacaccgagagtgcaggggtcattgccggagcctttgtgggcatcctcctgtttctcatcctcgtgggcctgctgattttcttcctgaagaggaggaataagaagaagcagcagaaaccagaactcagggatctggtctttagctccccaggggacatcccagctgaagacttcgctgaccacgtcaggaagaatgagagggacagcaactgtggttttgcagacgagtaccagcaactctccctggtgggccacagccagtctcagatggtggcttcggcttcagagaacaacgccaagaaccgctacagaaatgtgctgccctatgactggtcccgggtgcccctgaagcccatccatgaggagccaggctctgactacatcaatgccagcttcatgcccgtgaagtgtgagcattactggcctctggactcgcagccctgcacccatgggcacctgcgggtaaccctggtaggtgaggaagtgatggagaactggacggtgcgggaactgctgctcctccaggtggaggagcagaagacactgtctgtgcgccaattccactaccaggcctggccggatcacggcgttccctcctccccagacaccttgctggctttctggaggatgcttcggcagtggctggatcagaccatggagggaggcccacccattgtgcactgcagtgctggcgtgggtcgcacaggaaccctcattgccctggacgtcctgctccggcagctgcagtccgagggtctccttgggcccttcagctttgtaaggaagatgagagagagtcggccgttgatggtgcagactgaggctcagtacgtattcctgcatcagtgcatctgcggttcctccaacagtcagcccaggccccagccgagaaggaagtcccgtatgaggatgtcgaaaacctcatctacgagaacgtggccgccatccaggcccacaagttggaggtctaagtgacgagggggctgggtcggcagcccaggcatcctcaagctctggacacccacttgagcccagattcctggaagagcagagggctgggctcccagactcctgggtgctgtgggaggagggggctggtatcccaaactctggtttccccaggagagagtggtctggtgggcttcagatgagtcctatgggagctggggatctggattcctggttccctgaaggaggagagggatgatagcttggattccctaggtctttccaggatgcagaaagaaacaggctggggcctggattctgaggcaggaaggaatttgggtctggagttctggctacttgaggaccaaaggcaggaaggatcctgccttgattttacttcagaaaccaaatcagtcttctataatctggggtcggagggagtccctgtgcccaaggtctctctgcaccccaccatccacatgtatttttccttctatcccataatttattaaatcactgttctccccagaaaaagtt

SEQ ID NO: 368162 - DNA, 953 bp, Homo sapiens
gggtgcagccttgccagagaagcagagaagcgtctgtggctgggtgggtgatattgaaagattcctttcaccagggtggaagccaggatctgaggcgtgatggaatgtggacagtgaggcagtgacagcgccacaaggcaggagtcatctccaggcacgtccttggcctggagcccatagggacaagctcctggtggtgcctcactttgccatcctctctaagccgcagaccttgaatggaatcagtgctcaagagtctaattgggcccactctgaggatgcctgcgggaatatcagcttttaccgcaccacactgcactttacagtgtgggagggcctgccccacgcaccacctcacctgtactgcggttctcaaacttcaccctacagccattctgttgtaggtgatctcaggggcagtttgagaaacagtggctcagggtctcacagcagccctctgagataggttggttgctattgtcccgattttttctcatcaagaaactgaggctcaggtgagctaaggaatgtgcccagggccactgtttataagaagtagcctcaagccttgctcatggttactgccctgacagggatctaggaaagagtgagcaggagaatgggatgaggcaggaccctccgccccagccctgctttctctgcccagacacctcctgccttgcagacccaaccccaccccagatggtttcctttccagtcacccagctgctagttctccaggttcctggtctcactccaggttcctcctgttagagaagcatcccagagacattcattcctggcaaggacacaggcctgcggacctgaaggtcaggtgggcagagccacataagatctggtgccccatcctccatttaaaaaattatactttccaacggcattggtataaaggtgaatatattaatatcatatattaaaacattttctttgaa

SEQ ID NO: 368163 - DNA, 500 bp, Homo sapiens
tgcccagggatggtgaggtcctggctggggcaccccaggggctggtgcagattgaggggcagcagggctgagagccgcaacctggctgggttcctggcctgtgaaaagggagctgtgtgttccttccttacctgcttgtaatagaaagctgctccttcgattgagctgtttccttcttttgccctgagctatgaggagtagattagatgaaaaaattatcaagcctcctcgtctagaataaatattcttgaaatggagcaagttataaataagcaagcagcaatatcctgtgttatgaatatataatttctatctttaatagctgactaggccccagggactgtctgaaaatggcctgtctggccctgatattttatatatttcttaaaaggcacccaaacttttgtttcttagcccttggacagttaagtcttagggggaaataatgagagttgaaagtctcattgagcaaatgcaccaagcgcaggtacttggtttac

SEQ ID NO: 368164 - DNA, 825 bp, Homo sapiens
tgtcagcacgggagcctctgcttggcagagctttaaggtgaaagcacagagcaaccgccaagcagaggctcccgtgcaggaagagaagctgtcagcaagcacctcaaatttgccatgctggctggtggaagagtttgtggtagcagaagagtgctctccatgctctaatttccgggctaaaactacccctgagtgtggtcccacaggatatgtagagaaaatcacatgcagctcatctaagagaaatgagttcaaaagctgccgctcagctttgatggaacaacgcttattttggaagttcgaaggggctgtcgtgtgtgtggccctgatcttcgcttgtcttgtcatcattcgtcagcgacaattggacagaaaggctctggaaaaggtccggaagcaaatcgagtccatatagctacattccacccttgtatcctgggtcttagagaccctatctcagacagtgaaagtgaaatggactgatttgcactcttggttctttggagccttgtggtggaatccccttttccccatcttcttctttcagatcattaatgagcagaataaaaagagtaaaatggtttccttcccttctgtaacttggagcaggaagtcatgggggcagagagggaaaggaggtggttacttaaggccccaatctaccaagtcttccccaccacttctcccttgttttccccctcttctactacttatttcaaacttctgggatacaatttcagctaaaacgtttatttctcactcaaaacttatttcccctcaaccctatacccaaagaagaaataaaatcacagatacataacagaa

SEQ ID NO: 368165 - DNA, 647 bp, Homo sapiens
gacagagcgagacaccatctcaaaaataataagaaagaagacgggattggagccaaattacttgaacccaagtcccagctctactcctcagcactatgttattggccatattttctcatcagtaaaattggttaatactagctctgcttatccagagaataaattaaatgatctatttgagagggatttatgtactatacacacaatagaagcctggctctgatttcctcttgagtgtatcctggctaggctgaagtagaagggaaattagagggagaagctgtctggccttccttgggaataactattccttcctgccctcagctgccgctcagctttgatggaacaacgcttattttggaagttcgaaggggctgtcgtgtgtgtggccctgatcttcgcttgtcttgtcatcattcgtcagcgacaattggacagaaaggctctggaaaaggtccggaagcaaatcgagtccatatagctacattccacccttgtatcctgggtcttagagaccctatctcagacagtgaaagtgaaatggactgatttgcactcttggttctttggagccttgtggtggaatccccttttccccatcttcttctttcagatcattaatgagcagaataaaaagagtaaaatgg

SEQ ID NO: 368166 - DNA, 432 bp, Homo sapiens
gcaccccctcctgcgctgtccatggataagatctcccccagccccgaggccgggaacgatcctgtcctccagtgacctccttttccctccccttacctcctccttaccagagctttaaggtgaaagcacagagcaaccagcagaggtggcggccctgatcttcgcttgtcttgtcatcattcgtcagcgacaattggacagaaaggctctggaaaaggtccggaagcaaatcgagtccatatagctacattccacccttgtatcctgggtcttagagaccctatctcagacagtgaaagtgaaatggactgatttgcactcttggttctttggagccttgtggtggaatccccttttccccatcttcttctttcagatcattaatgagcagaataaaaagagtaaaatggaaaaaaaaagtcgtatcgatgt

SEQ ID NO: 368167 - DNA, 2515 bp, Homo sapiens
taccttatggcagatatttaatttcagagtagagaccccactctgatgcctggtaaggttattggaagtgaaatatcacaagatcttacagtttgttgtgagataaggtaggatttggtgaggagtaacaaatactagcagatttcggcccaaacttcaattatagctaaacattactggaaaaaaccccacaacctactttatgtaacatataactactcacacacatacacaaaaataatacacacacaatttcagcaaacacaaataataatttaaagaaacaaattcaaaattagagccaggtatggtggcacatgcctgaaatcccagctacttgggaggatccctgaagacgagaagttccaggctgtaatgcgctatgatggctcctgtgacttgccactgcactccagtctggcaacatagccagagtccatctcgttcaaaaacaaaaacaaacaaacaaaaaacggcgaaatgaaggctcagccctcatcaggtttaggtgacagagctagaccctgtctaagaaaaaaaataaaattaaatgaaaattcgttatcagacagtaaagcatgaacccacagtgctggtcaagtcactgcagatctgagtgtgtatcaaggtttaactccataagatgaaaagcaggcaatgaatctttggcctgggtgttgacagtctaggctcaagcctcagctttcccactcattagcttgctgaccttggacaagtcacttatattctctgaacttactcatgaaacggagatacatttcatctgcctctcgcaagaaaaagtcctggtaaatacacattagcatttccgttttacacagaacactgacagatactttcctaagatcatggagttaataaccaccagaacctagactcaatacttatggaacttcaaatctcatgcttttctcattgcacttatgattactccattatgtaggagcaagggagagttgagagcatttgaagaggttatgcaaaggaccagctctgaggagtaggcttagcaaagtaacatgagggaaggtaacaccgttcatctgtgtagcggagtgggagccaagagacaaggagaaagtttcatgttcgtcatgtgtctcggatattccggtttctgcagggacgagaacgcgcagtttcgcctccatcccttgacctccaacacagcttctccactggatcatcggtggcgatgaaggggcggctggggaaggatgtcagagaaaccagaagcttgacggtgaatcctcgggttttaaggagagagcaaagtcctgagagggcgacgtattgtccctgctcacctagcccagaatgaacaaacacgcgccagccagggagcagcgagccgagaattcggacgagcctctgcaaccgccatttgccgttctcgcaaagactaccaagaccacaatgcaacggggcgccgagctaattcccagtgagcagcaggcgaggcgccaccgacgcggaagactataagccccagcgggcgacgaccgaacgcccccgggaacaccgggccccgagctcggtcccgcgcccgaggatcctccacggggctagatggctgcgtcgggggcgggagcggaggtgagcgggcgctagggccgcgagcccccgccggcccttcctccagcgccctgcggaccccgcagaaggcgctcgcctccctagcccgcaaaaacatatcgatttttctcgctgtggcaacggggacgtcctgatagatcctctgctccaataggcaactccggccttccctgccctgacctggaacctctgggagggctgcagagtaagtgccgcctctgcgctccgacggaggcacgaggcctgtggagtaggtccctctgttccgacaggtgcgacacttggcgctccatgcttgcgggtgccgggaggcctggcctcccccagggccgccacctctgctggttgctctgtgctttcaccttaaagctctgccaagcagaggctcccgtgcaggaagagaagctgtcagcaagcacctcaaatttgccatgctggctggtggaagagtttgtggtagcagaagagtgctctccatgctctaatttccgggctaaaactacccctgagtgtggtcccacaggatatgtagagaaaatcacatgcagctcatctaagagaaatgagttcaaaagctgccgctcagctttgatggaacaacgcttattttggaagttcgaaggggctgtcgtgtgtgtggccctgatcttcgcttgtcttgtcatcattcgtcagcgacaattggacagaaaggctctggaaaaggtccggaagcaaatcgagtccatatagctacattccacccttgtatcctgggtcttagagaccctatctcagacagtgaaagtgaaatggactgatttgcactcttggttctttggagccttgtggtggaatccccttttccccatcttcttctttcagatcattaatgagcagaataaaaagagtaaaatgg

SEQ ID NO: 368168 - DNA, 2759 bp, Homo sapiens
taccttatggcagatatttaatttcagagtagagaccccactctgatgcctggtaaggttattggaagtgaaatatcacaagatcttacagtttgttgtgagataaggtaggatttggtgaggagtaacaaatactagcagatttcggcccaaacttcaattatagctaaacattactggaaaaaaccccacaacctactttatgtaacatataactactcacacacatacacaaaaataatacacacacaatttcagcaaacacaaataataatttaaagaaacaaattcaaaattagagccaggtatggtggcacatgcctgaaatcccagctacttgggaggatccctgaagacgagaagttccaggctgtaatgcgctatgatggctcctgtgacttgccactgcactccagtctggcaacatagccagagtccatctcgttcaaaaacaaaaacaaacaaacaaaaaacggcgaaatgaaggctcagccctcatcaggtttaggtgacagagctagaccctgtctaagaaaaaaaataaaattaaatgaaaattcgttatcagacagtaaagcatgaacccacagtgctggtcaagtcactgcagatctgagtgtgtatcaaggtttaactccataagatgaaaagcaggcaatgaatctttggcctgggtgttgacagtctaggctcaagcctcagctttcccactcattagcttgctgaccttggacaagtcacttatattctctgaacttactcatgaaacggagatacatttcatctgcctctcgcaagaaaaagtcctggtaaatacacattagcatttccgttttacacagaacactgacagatactttcctaagatcatggagttaataaccaccagaacctagactcaatacttatggaacttcaaatctcatgcttttctcattgcacttatgattactccattatgtaggagcaagggagagttgagagcatttgaagaggttatgcaaaggaccagctctgaggagtaggcttagcaaagtaacatgagggaaggtaacaccgttcatctgtgtagcggagtgggagccaagagacaaggagaaagtttcatgttcgtcatgtgtctcggatattccggtttctgcagggacgagaacgcgcagtttcgcctccatcccttgacctccaacacagcttctccactggatcatcggtggcgatgaaggggcggctggggaaggatgtcagagaaaccagaagcttgacggtgaatcctcgggttttaaggagagagcaaagtcctgagagggcgacgtattgtccctgctcacctagcccagaatgaacaaacacgcgccagccagggagcagcgagccgagaattcggacgagcctctgcaaccgccatttgccgttctcgcaaagactaccaagaccacaatgcaacggggcgccgagctaattcccagtgagcagcaggcgaggcgccaccgacgcggaagactataagccccagcgggcgacgaccgaacgcccccgggaacaccgggccccgagctcggtcccgcgcccgaggatcctccacggggctagatggctgcgtcgggggcgggagcggaggtgagcgggcgctagggccgcgagcccccgccggcccttcctccagcgccctgcggaccccgcagaaggcgctcgcctccctagcccgcaaaaacatatcgatttttctcgctgtggcaacggggacgtcctgatagatcctctgctccaataggcaactccggccttccctgccctgacctggaacctctgggagggctgcagagtaagtgccgcctctgcgctccgacggaggcacgaggcctgtggagtaggtccctctgttccgacaggtgcgacacttggcgctccatgcttgcgggtgccgggaggcctggcctcccccagggccgccacctctgctggttgctctgtgctttcaccttaaagctctgccaagcagaggctcccgtgcaggaagagaagctgtcagcaagcacctcaaatttgccatgctggctggtggaagagtttgtggtagcagaagagtgctctccatgctctaatttccgggctaaaactacccctgagtgtggtcccacaggatatgtagagaaaatcacatgcagctcatctaagagaaatgagttcaaaagctgccgctcagctttgatggaacaacgcttattttggaagttcgaaggggctgtcgtgtgtgtggccctgatcttcgcttgtcttgtcatcattcgtcagcgacaattggacagaaaggctctggaaaaggtccggaagcaaatcgagtccatatagctacattccacccttgtatcctgggtcttagagaccctatctcagacagtgaaagtgaaatggactgatttgcactcttggttctttggagccttgtggtggaatccccttttccccatcttcttctttcagatcattaatgagcagaataaaaagagtaaaatggtttccttcccttctgtaacttggagcaggaagtcatgggggcagagagggaaaggaggtggttacttaaggccccaatctaccaagtcttccccaccacttctcccttgttttccccctcttctactacttatttcaaacttctgggatacaatttcagctaaaacgtttatttctcactcaaaacttatttcccctcaaccctatacccaaagaagaaataaaatcacagatacataacagaa

SEQ ID NO: 368169 - DNA, 2976 bp, Homo sapiens
taccttatggcagatatttaatttcagagtagagaccccactctgatgcctggtaaggttattggaagtgaaatatcacaagatcttacagtttgttgtgagataaggtaggatttggtgaggagtaacaaatactagcagatttcggcccaaacttcaattatagctaaacattactggaaaaaaccccacaacctactttatgtaacatataactactcacacacatacacaaaaataatacacacacaatttcagcaaacacaaataataatttaaagaaacaaattcaaaattagagccaggtatggtggcacatgcctgaaatcccagctacttgggaggatccctgaagacgagaagttccaggctgtaatgcgctatgatggctcctgtgacttgccactgcactccagtctggcaacatagccagagtccatctcgttcaaaaacaaaaacaaacaaacaaaaaacggcgaaatgaaggctcagccctcatcaggtttaggtgacagagctagaccctgtctaagaaaaaaaataaaattaaatgaaaattcgttatcagacagtaaagcatgaacccacagtgctggtcaagtcactgcagatctgagtgtgtatcaaggtttaactccataagatgaaaagcaggcaatgaatctttggcctgggtgttgacagtctaggctcaagcctcagctttcccactcattagcttgctgaccttggacaagtcacttatattctctgaacttactcatgaaacggagatacatttcatctgcctctcgcaagaaaaagtcctggtaaatacacattagcatttccgttttacacagaacactgacagatactttcctaagatcatggagttaataaccaccagaacctagactcaatacttatggaacttcaaatctcatgcttttctcattgcacttatgattactccattatgtaggagcaagggagagttgagagcatttgaagaggttatgcaaaggaccagctctgaggagtaggcttagcaaagtaacatgagggaaggtaacaccgttcatctgtgtagcggagtgggagccaagagacaaggagaaagtttcatgttcgtcatgtgtctcggatattccggtttctgcagggacgagaacgcgcagtttcgcctccatcccttgacctccaacacagcttctccactggatcatcggtggcgatgaaggggcggctggggaaggatgtcagagaaaccagaagcttgacggtgaatcctcgggttttaaggagagagcaaagtcctgagagggcgacgtattgtccctgctcacctagcccagaatgaacaaacacgcgccagccagggagcagcgagccgagaattcggacgagcctctgcaaccgccatttgccgttctcgcaaagactaccaagaccacaatgcaacggggcgccgagctaattcccagtgagcagcaggcgaggcgccaccgacgcggaagactataagccccagcgggcgacgaccgaacgcccccgggaacaccgggccccgagctcggtcccgcgcccgaggatcctccacggggctagatggctgcgtcgggggcgggagcggaggtgagcgggcgctagggccgcgagcccccgccggcccttcctccagcgccctgcggaccccgcagaaggcgctcgcctccctagcccgcaaaaacatatcgatttttctcgctgtggcaacggggacgtcctgatagatcctctgctccaataggcaactccggccttccctgccctgacctggaacctctgggagggctgcagagtaagtgccgcctctgcgctccgacggaggcacgaggcctgtggagtaggtccctctgttccgacaggtgcgacacttggcgctccatgcttgcgggtgccgggaggcctggcctcccccagggccgccacctctgctggttgctctgtgctttcaccttaaagctctgccaagcagaggctcccgtgcaggaagagaagctgtcagcaagcacctcaaatttgccatgctggctggtggaagagtttgtggtagcagaagagtgctctccatgctctaatttccgggctaaaactacccctgagtgtggtcccacaggatatgtagagaaaatcacatgcagctcatctaagagaaatgagttcaaaagctgccgctcagctttgatggaacaacgcttattttggaagttcgaaggggctgtcgtgtgtgtggccctgatcttcgcttgtcttgtcatcattcgtcagcgacaattggacagaaaggctctggaaaaggtccggaagcaaatcgagtccatatagctacattccacccttgtatcctgggtcttagagaccctatctcagacagtgaaagtgaaatggactgatttgcactcttggttctttggagccttgtggtggaatccccttttccccatcttcttctttcagatcattaatgagcagaataaaaagagtaaaatggtttccttcccttctgtaacttggagcaggaagtcatgggggcagagagggaaaggaggtggttacttaaggccccaatctaccaagtcttccccaccacttctcccttgttttccccctcttctactacttatttcaaacttctgggatacaatttcagctaaaacgtttatttctcactcaaaacttatttcccctcaaccctatacccaaagaagaaataaaatcacagatacataacagaaaaaaaaaaaaaaaaaaaaaaaaaataaaaaaacagaagagaaataatggggggggggaaaaggagggtactggaatggggcccatggggcataaggtggtatcattggaccagagttttctctggtaccaaaggggggaagatttctggcgggtctacacttataagagagtcggtataaaattgcagaaaagccagggttacgctgctttatacgg

SEQ ID NO: 368170 - DNA, 3147 bp, Homo sapiens
taccttatggcagatatttaatttcagagtagagaccccactctgatgcctggtaaggttattggaagtgaaatatcacaagatcttacagtttgttgtgagataaggtaggatttggtgaggagtaacaaatactagcagatttcggcccaaacttcaattatagctaaacattactggaaaaaaccccacaacctactttatgtaacatataactactcacacacatacacaaaaataatacacacacaatttcagcaaacacaaataataatttaaagaaacaaattcaaaattagagccaggtatggtggcacatgcctgaaatcccagctacttgggaggatccctgaagacgagaagttccaggctgtaatgcgctatgatggctcctgtgacttgccactgcactccagtctggcaacatagccagagtccatctcgttcaaaaacaaaaacaaacaaacaaaaaacggcgaaatgaaggctcagccctcatcaggtttaggtgacagagctagaccctgtctaagaaaaaaaataaaattaaatgaaaattcgttatcagacagtaaagcatgaacccacagtgctggtcaagtcactgcagatctgagtgtgtatcaaggtttaactccataagatgaaaagcaggcaatgaatctttggcctgggtgttgacagtctaggctcaagcctcagctttcccactcattagcttgctgaccttggacaagtcacttatattctctgaacttactcatgaaacggagatacatttcatctgcctctcgcaagaaaaagtcctggtaaatacacattagcatttccgttttacacagaacactgacagatactttcctaagatcatggagttaataaccaccagaacctagactcaatacttatggaacttcaaatctcatgcttttctcattgcacttatgattactccattatgtaggagcaagggagagttgagagcatttgaagaggttatgcaaaggaccagctctgaggagtaggcttagcaaagtaacatgagggaaggtaacaccgttcatctgtgtagcggagtgggagccaagagacaaggagaaagtttcatgttcgtcatgtgtctcggatattccggtttctgcagggacgagaacgcgcagtttcgcctccatcccttgacctccaacacagcttctccactggatcatcggtggcgatgaaggggcggctggggaaggatgtcagagaaaccagaagcttgacggtgaatcctcgggttttaaggagagagcaaagtcctgagagggcgacgtattgtccctgctcacctagcccagaatgaacaaacacgcgccagccagggagcagcgagccgagaattcggacgagcctctgcaaccgccatttgccgttctcgcaaagactaccaagaccacaatgcaacggggcgccgagctaattcccagtgagcagcaggcgaggcgccaccgacgcggaagactataagccccagcgggcgacgaccgaacgcccccgggaacaccgggccccgagctcggtcccgcgcccgaggatcctccacggggctagatggctgcgtcgggggcgggagcggaggtgagcgggcgctagggccgcgagcccccgccggcccttcctccagcgccctgcggaccccgcagaaggcgctcgcctccctagcccgcaaaaacatatcgatttttctcgctgtggcaacggggacgtcctgatagatcctctgctccaataggcaactccggccttccctgccctgacctggaacctctgggagggctgcagagtaagtgccgcctctgcgctccgacggaggcacgaggcctgtggagtaggtccctctgttccgacaggtgcgacacttggcgctccatgcttgcgggtgccgggaggcctggcctcccccagggccgccacctctgctggttgctctgtgctttcaccttaaagctctgccaagcagaggctcccgtgcaggaagagaagctgtcagcaagcacctcaaatttgccatgctggctggtggaagagtttgtggtagcagaagagtgctctccatgctctaatttccgggctaaaactacccctgagtgtggtcccacaggatatgtagagaaaatcacatgcagctcatctaagagaaatgagttcaaaagctgccgctcagctttgatggaacaacgcttattttggaagttcgaaggggctgtcgtgtgtgtggccctgatcttcgcttgtcttgtcatcattcgtcagcgacaattggacagaaaggctctggaaaaggtccggaagcaaatcgagtccatatagctacattccacccttgtatcctgggtcttagagaccctatctcagacagtgaaagtgaaatggactgatttgcactcttggttctttggagccttgtggtggaatccccttttccccatcttcttctttcagatcattaatgagcagaataaaaagagtaaaatggtttccttcccttctgtaacttggagcaggaagtcatgggggcagagagggaaaggaggtggttacttaaggccccaatctaccaagtcttccccaccacttctcccttgttttccccctcttctactacttatttcaaacttctgggatacaatttcagctaaaacgtttatttctcactcaaaacttatttcccctcaaccctatacccaaagaagaaataaaatcacagatacataacagaaaaaaaaaaaaaaaaaaaaaaaaacaaaaaaaaaacacttgtggggtgcggcgcgcgggcctctgcggccccccgagaaaaagggtttttttaagaccccaatctctcggttggggcggcggggggcgcccaagatgaggtctaggggggacacgtgtggccaacaaggcgggggtccccaaaagagaccactccgggcgcacagggcaacaacaggggcggtgggattctcctcccccaaaattaaaaaaaacgcgccggggggggaacaccgggaggggttcttttagaacacaacttccaagaaggggagctctgaagaggggcacaagcgggggcctacatcaaccaaggggcctccaaaggagggcacgatataaaaatacgcg

SEQ ID NO: 368171 - DNA, 2903 bp, Homo sapiens
taccttatggcagatatttaatttcagagtagagaccccactctgatgcctggtaaggttattggaagtgaaatatcacaagatcttacagtttgttgtgagataaggtaggatttggtgaggagtaacaaatactagcagatttcggcccaaacttcaattatagctaaacattactggaaaaaaccccacaacctactttatgtaacatataactactcacacacatacacaaaaataatacacacacaatttcagcaaacacaaataataatttaaagaaacaaattcaaaattagagccaggtatggtggcacatgcctgaaatcccagctacttgggaggatccctgaagacgagaagttccaggctgtaatgcgctatgatggctcctgtgacttgccactgcactccagtctggcaacatagccagagtccatctcgttcaaaaacaaaaacaaacaaacaaaaaacggcgaaatgaaggctcagccctcatcaggtttaggtgacagagctagaccctgtctaagaaaaaaaataaaattaaatgaaaattcgttatcagacagtaaagcatgaacccacagtgctggtcaagtcactgcagatctgagtgtgtatcaaggtttaactccataagatgaaaagcaggcaatgaatctttggcctgggtgttgacagtctaggctcaagcctcagctttcccactcattagcttgctgaccttggacaagtcacttatattctctgaacttactcatgaaacggagatacatttcatctgcctctcgcaagaaaaagtcctggtaaatacacattagcatttccgttttacacagaacactgacagatactttcctaagatcatggagttaataaccaccagaacctagactcaatacttatggaacttcaaatctcatgcttttctcattgcacttatgattactccattatgtaggagcaagggagagttgagagcatttgaagaggttatgcaaaggaccagctctgaggagtaggcttagcaaagtaacatgagggaaggtaacaccgttcatctgtgtagcggagtgggagccaagagacaaggagaaagtttcatgttcgtcatgtgtctcggatattccggtttctgcagggacgagaacgcgcagtttcgcctccatcccttgacctccaacacagcttctccactggatcatcggtggcgatgaaggggcggctggggaaggatgtcagagaaaccagaagcttgacggtgaatcctcgggttttaaggagagagcaaagtcctgagagggcgacgtattgtccctgctcacctagcccagaatgaacaaacacgcgccagccagggagcagcgagccgagaattcggacgagcctctgcaaccgccatttgccgttctcgcaaagactaccaagaccacaatgcaacggggcgccgagctaattcccagtgagcagcaggcgaggcgccaccgacgcggaagactataagccccagcgggcgacgaccgaacgcccccgggaacaccgggccccgagctcggtcccgcgcccgaggatcctccacggggctagatggctgcgtcgggggcgggagcggaggtgagcgggcgctagggccgcgagcccccgccggcccttcctccagcgccctgcggaccccgcagaaggcgctcgcctccctagcccgcaaaaacatatcgatttttctcgctgtggcaacggggacgtcctgatagatcctctgctccaataggcaactccggccttccctgccctgacctggaacctctgggagggctgcagagtaagtgccgcctctgcgctccgacggaggcacgaggcctgtggagtaggtccctctgttccgacaggtgcgacacttggcgctccatgcttgcgggtgccgggaggcctggcctcccccagggccgccacctctgctggttgctctgtgctttcaccttaaagctctgccaagcagaggctcccgtgcaggaagagaagctgtcagcaagcacctcaaatttgccatgctggctggtggaagagtttgtggtagcagaagagtgctctccatgctctaatttccgggctaaaactacccctgagtgtggtcccacaggatatgtagagaaaatcacatgcagctcatctaagagaaatgagttcaaaagctgccgctcagctttgatggaacaacgcttattttggaagttcgaaggggctgtcgtgtgtgtggccctgatcttcgcttgtcttgtcatcattcgtcagcgacaattggacagaaaggctctggaaaaggtccggaagcaaatcgagtccatatagctacattccacccttgtatcctgggtcttagagaccctatctcagacagtgaaagtgaaatggactgatttgcactcttggttctttggagccttgtggtggaatccccttttccccatcttcttctttcagatcattaatgagcagaataaaaagagtaaaatggaaaaaaaaaaaaaaaaaaaaaaacaaaaaaaaaacacttgtggggtgcggcgcgcgggcctctgcggccccccgagaaaaagggtttttttaagaccccaatctctcggttggggcggcggggggcgcccaagatgaggtctaggggggacacgtgtggccaacaaggcgggggtccccaaaagagaccactccgggcgcacagggcaacaacaggggcggtgggattctcctcccccaaaattaaaaaaaacgcgccggggggggaacaccgggaggggttcttttagaacacaacttccaagaaggggagctctgaagaggggcacaagcgggggcctacatcaaccaaggggcctccaaaggagggcacgatataaaaatacgcg

SEQ ID NO: 368172 - DNA, 2537 bp, Homo sapiens
taccttatggcagatatttaatttcagagtagagaccccactctgatgcctggtaaggttattggaagtgaaatatcacaagatcttacagtttgttgtgagataaggtaggatttggtgaggagtaacaaatactagcagatttcggcccaaacttcaattatagctaaacattactggaaaaaaccccacaacctactttatgtaacatataactactcacacacatacacaaaaataatacacacacaatttcagcaaacacaaataataatttaaagaaacaaattcaaaattagagccaggtatggtggcacatgcctgaaatcccagctacttgggaggatccctgaagacgagaagttccaggctgtaatgcgctatgatggctcctgtgacttgccactgcactccagtctggcaacatagccagagtccatctcgttcaaaaacaaaaacaaacaaacaaaaaacggcgaaatgaaggctcagccctcatcaggtttaggtgacagagctagaccctgtctaagaaaaaaaataaaattaaatgaaaattcgttatcagacagtaaagcatgaacccacagtgctggtcaagtcactgcagatctgagtgtgtatcaaggtttaactccataagatgaaaagcaggcaatgaatctttggcctgggtgttgacagtctaggctcaagcctcagctttcccactcattagcttgctgaccttggacaagtcacttatattctctgaacttactcatgaaacggagatacatttcatctgcctctcgcaagaaaaagtcctggtaaatacacattagcatttccgttttacacagaacactgacagatactttcctaagatcatggagttaataaccaccagaacctagactcaatacttatggaacttcaaatctcatgcttttctcattgcacttatgattactccattatgtaggagcaagggagagttgagagcatttgaagaggttatgcaaaggaccagctctgaggagtaggcttagcaaagtaacatgagggaaggtaacaccgttcatctgtgtagcggagtgggagccaagagacaaggagaaagtttcatgttcgtcatgtgtctcggatattccggtttctgcagggacgagaacgcgcagtttcgcctccatcccttgacctccaacacagcttctccactggatcatcggtggcgatgaaggggcggctggggaaggatgtcagagaaaccagaagcttgacggtgaatcctcgggttttaaggagagagcaaagtcctgagagggcgacgtattgtccctgctcacctagcccagaatgaacaaacacgcgccagccagggagcagcgagccgagaattcggacgagcctctgcaaccgccatttgccgttctcgcaaagactaccaagaccacaatgcaacggggcgccgagctaattcccagtgagcagcaggcgaggcgccaccgacgcggaagactataagccccagcgggcgacgaccgaacgcccccgggaacaccgggccccgagctcggtcccgcgcccgaggatcctccacggggctagatggctgcgtcgggggcgggagcggaggtgagcgggcgctagggccgcgagcccccgccggcccttcctccagcgccctgcggaccccgcagaaggcgctcgcctccctagcccgcaaaaacatatcgatttttctcgctgtggcaacggggacgtcctgatagatcctctgctccaataggcaactccggccttccctgccctgacctggaacctctgggagggctgcagagtaagtgccgcctctgcgctccgacggaggcacgaggcctgtggagtaggtccctctgttccgacaggtgcgacacttggcgctccatgcttgcgggtgccgggaggcctggcctcccccagggccgccacctctgctggttgctctgtgctttcaccttaaagctctgccaagcagaggctcccgtgcaggaagagaagctgtcagcaagcacctcaaatttgccatgctggctggtggaagagtttgtggtagcagaagagtgctctccatgctctaatttccgggctaaaactacccctgagtgtggtcccacaggatatgtagagaaaatcacatgcagctcatctaagagaaatgagttcaaaagctgccgctcagctttgatggaacaacgcttattttggaagttcgaaggggctgtcgtgtgtgtggccctgatcttcgcttgtcttgtcatcattcgtcagcgacaattggacagaaaggctctggaaaaggtccggaagcaaatcgagtccatatagctacattccacccttgtatcctgggtcttagagaccctatctcagacagtgaaagtgaaatggactgatttgcactcttggttctttggagccttgtggtggaatccccttttccccatcttcttctttcagatcattaatgagcagaataaaaagagtaaaatggaaaaaaaaagtcgtatcgatgt

SEQ ID NO: 368173 - DNA, 2471 bp, Homo sapiens
taccttatggcagatatttaatttcagagtagagaccccactctgatgcctggtaaggttattggaagtgaaatatcacaagatcttacagtttgttgtgagataaggtaggatttggtgaggagtaacaaatactagcagatttcggcccaaacttcaattatagctaaacattactggaaaaaaccccacaacctactttatgtaacatataactactcacacacatacacaaaaataatacacacacaatttcagcaaacacaaataataatttaaagaaacaaattcaaaattagagccaggtatggtggcacatgcctgaaatcccagctacttgggaggatccctgaagacgagaagttccaggctgtaatgcgctatgatggctcctgtgacttgccactgcactccagtctggcaacatagccagagtccatctcgttcaaaaacaaaaacaaacaaacaaaaaacggcgaaatgaaggctcagccctcatcaggtttaggtgacagagctagaccctgtctaagaaaaaaaataaaattaaatgaaaattcgttatcagacagtaaagcatgaacccacagtgctggtcaagtcactgcagatctgagtgtgtatcaaggtttaactccataagatgaaaagcaggcaatgaatctttggcctgggtgttgacagtctaggctcaagcctcagctttcccactcattagcttgctgaccttggacaagtcacttatattctctgaacttactcatgaaacggagatacatttcatctgcctctcgcaagaaaaagtcctggtaaatacacattagcatttccgttttacacagaacactgacagatactttcctaagatcatggagttaataaccaccagaacctagactcaatacttatggaacttcaaatctcatgcttttctcattgcacttatgattactccattatgtaggagcaagggagagttgagagcatttgaagaggttatgcaaaggaccagctctgaggagtaggcttagcaaagtaacatgagggaaggtaacaccgttcatctgtgtagcggagtgggagccaagagacaaggagaaagtttcatgttcgtcatgtgtctcggatattccggtttctgcagggacgagaacgcgcagtttcgcctccatcccttgacctccaacacagcttctccactggatcatcggtggcgatgaaggggcggctggggaaggatgtcagagaaaccagaagcttgacggtgaatcctcgggttttaaggagagagcaaagtcctgagagggcgacgtattgtccctgctcacctagcccagaatgaacaaacacgcgccagccagggagcagcgagccgagaattcggacgagcctctgcaaccgccatttgccgttctcgcaaagactaccaagaccacaatgcaacggggcgccgagctaattcccagtgagcagcaggcgaggcgccaccgacgcggaagactataagccccagcgggcgacgaccgaacgcccccgggaacaccgggccccgagctcggtcccgcgcccgaggatcctccacggggctagatggctgcgtcgggggcgggagcggaggtgagcgggcgctagggccgcgagcccccgccggcccttcctccagcgccctgcggaccccgcagaaggcgctcgcctccctagcccgcaaaaacatatcgatttttctcgctgtggcaacggggacgtcctgatagatcctctgctccaataggcaactccggccttccctgccctgacctggaacctctgggagggctgcagagtaagtgccgcctctgcgctccgacggaggcacgaggcctgtggagtaggtccctctgttccgacaggtgcgacacttggcgctccatgcttgcgggtgccgggaggcctggcctcccccagggccgccacctctgctggttgctctgtgctttcaccttaaagctctgccaagcagaggctcccgtgcaggaagagaagctgtcagcaagcacctcaaatttgccatgctggctggtggaagagtttgtggtagcagaagagtgctctccatgctctaatttccgggctaaaactacccctgagtgtggtcccacaggatatgtagagaaaatcacatgcagctcatctaagagaaatgagttcaaaagctgccgctcagctttgatggaacaacgcttattttggaagttcgaaggggctgtcgtgtgtgtggccctgatcttcgcttgtcttgtcatcattcgtcagcgacaattggacagaaaggctctggaaaaggtccggaagcaaatcgagtccatatagctacattccacccttgtatcctgggtcttagagaccctatctcagacagtgaaagtgaaatggactgatttgcactcttggttctttggagccttgtggtgtatcagctaagctcctctaga

SEQ ID NO: 368174 - DNA, 2361 bp, Homo sapiens
taccttatggcagatatttaatttcagagtagagaccccactctgatgcctggtaaggttattggaagtgaaatatcacaagatcttacagtttgttgtgagataaggtaggatttggtgaggagtaacaaatactagcagatttcggcccaaacttcaattatagctaaacattactggaaaaaaccccacaacctactttatgtaacatataactactcacacacatacacaaaaataatacacacacaatttcagcaaacacaaataataatttaaagaaacaaattcaaaattagagccaggtatggtggcacatgcctgaaatcccagctacttgggaggatccctgaagacgagaagttccaggctgtaatgcgctatgatggctcctgtgacttgccactgcactccagtctggcaacatagccagagtccatctcgttcaaaaacaaaaacaaacaaacaaaaaacggcgaaatgaaggctcagccctcatcaggtttaggtgacagagctagaccctgtctaagaaaaaaaataaaattaaatgaaaattcgttatcagacagtaaagcatgaacccacagtgctggtcaagtcactgcagatctgagtgtgtatcaaggtttaactccataagatgaaaagcaggcaatgaatctttggcctgggtgttgacagtctaggctcaagcctcagctttcccactcattagcttgctgaccttggacaagtcacttatattctctgaacttactcatgaaacggagatacatttcatctgcctctcgcaagaaaaagtcctggtaaatacacattagcatttccgttttacacagaacactgacagatactttcctaagatcatggagttaataaccaccagaacctagactcaatacttatggaacttcaaatctcatgcttttctcattgcacttatgattactccattatgtaggagcaagggagagttgagagcatttgaagaggttatgcaaaggaccagctctgaggagtaggcttagcaaagtaacatgagggaaggtaacaccgttcatctgtgtagcggagtgggagccaagagacaaggagaaagtttcatgttcgtcatgtgtctcggatattccggtttctgcagggacgagaacgcgcagtttcgcctccatcccttgacctccaacacagcttctccactggatcatcggtggcgatgaaggggcggctggggaaggatgtcagagaaaccagaagcttgacggtgaatcctcgggttttaaggagagagcaaagtcctgagagggcgacgtattgtccctgctcacctagcccagaatgaacaaacacgcgccagccagggagcagcgagccgagaattcggacgagcctctgcaaccgccatttgccgttctcgcaaagactaccaagaccacaatgcaacggggcgccgagctaattcccagtgagcagcaggcgaggcgccaccgacgcggaagactataagccccagcgggcgacgaccgaacgcccccgggaacaccgggccccgagctcggtcccgcgcccgaggatcctccacggggctagatggctgcgtcgggggcgggagcggaggcaactccggccttccctgccctgacctggaacctctgggagggctgcagagtaagtgccgcctctgcgctccgacggaggcacgaggcctgtggagtaggtccctctgttccgacaggtgcgacacttggcgctccatgcttgcgggtgccgggaggcctggcctcccccagggccgccacctctgctggttgctctgtgctttcaccttaaagctctgccaagcagaggctcccgtgcaggaagagaagctgtcagcaagcacctcaaatttgccatgctggctggtggaagagtttgtggtagcagaagagtgctctccatgctctaatttccgggctaaaactacccctgagtgtggtcccacaggatatgtagagaaaatcacatgcagctcatctaagagaaatgagttcaaaagctgccgctcagctttgatggaacaacgcttattttggaagttcgaaggggctgtcgtgtgtgtggccctgatcttcgcttgtcttgtcatcattcgtcagcgacaattggacagaaaggctctggaaaaggtccggaagcaaatcgagtccatatagctacattccacccttgtatcctgggtcttagagaccctatctcagacagtgaaagtgaaatggactgatttgcactcttggttctttggagccttgtggtggaatccccttttccccatcttcttctttcagatcattaatgagcagaataaaaagagtaaaatgg

SEQ ID NO: 368175 - DNA, 2871 bp, Homo sapiens
taccttatggcagatatttaatttcagagtagagaccccactctgatgcctggtaaggttattggaagtgaaatatcacaagatcttacagtttgttgtgagataaggtaggatttggtgaggagtaacaaatactagcagatttcggcccaaacttcaattatagctaaacattactggaaaaaaccccacaacctactttatgtaacatataactactcacacacatacacaaaaataatacacacacaatttcagcaaacacaaataataatttaaagaaacaaattcaaaattagagccaggtatggtggcacatgcctgaaatcccagctacttgggaggatccctgaagacgagaagttccaggctgtaatgcgctatgatggctcctgtgacttgccactgcactccagtctggcaacatagccagagtccatctcgttcaaaaacaaaaacaaacaaacaaaaaacggcgaaatgaaggctcagccctcatcaggtttaggtgacagagctagaccctgtctaagaaaaaaaataaaattaaatgaaaattcgttatcagacagtaaagcatgaacccacagtgctggtcaagtcactgcagatctgagtgtgtatcaaggtttaactccataagatgaaaagcaggcaatgaatctttggcctgggtgttgacagtctaggctcaagcctcagctttcccactcattagcttgctgaccttggacaagtcacttatattctctgaacttactcatgaaacggagatacatttcatctgcctctcgcaagaaaaagtcctggtaaatacacattagcatttccgttttacacagaacactgacagatactttcctaagatcatggagttaataaccaccagaacctagactcaatacttatggaacttcaaatctcatgcttttctcattgcacttatgattactccattatgtaggagcaagggagagttgagagcatttgaagaggttatgcaaaggaccagctctgaggagtaggcttagcaaagtaacatgagggaaggtaacaccgttcatctgtgtagcggagtgggagccaagagacaaggagaaagtttcatgttcgtcatgtgtctcggatattccggtttctgcagggacgagaacgcgcagtttcgcctccatcccttgacctccaacacagcttctccactggatcatcggtggcgatgaaggggcggctggggaaggatgtcagagaaaccagaagcttgacggtgaatcctcgggttttaaggagagagcaaagtcctgagagggcgacgtattgtccctgctcacctagcccagaatgaacaaacacgcgccagccagggagcagcgagccgagaattcggacgagcctctgcaaccgccatttgccgttctcgcaaagactaccaagaccacaatgcaacggggcgccgagctaattcccagtgagcagcaggcgaggcgccaccgacgcggaagactataagccccagcgggcgacgaccgaacgcccccgggaacaccgggccccgagctcggtcccgcgcccgaggatcctccacggggctagatggctgcgtcgggggcgggagcggaggtgagcgggcgctagggccgcgagcccccgccggcccttcctccagcgccctgcggaccccgcagaaggcgctcgcctccctagcccgcaaaaacatatcgatttttctcgctgtggcaacggggacgtcctgatagatcctctgctccaataggcaactccggccttccctgccctgacctggaacctctgggagggctgcagagtaagtgccgcctctgcgctccgacggaggcacgaggcctgtggagtaggtccctctgttccgacaggtgcgacacttggcgctccatgcttgcgggtgccgggaggcctggcctcccccagggccgccacctctgctggttgctctgtgctttcaccttaaagctctggtaaggaggaggtaaggggagggaaaaggaggtcactggaggacaggatcgttcccggcctcggggctgggggagatcttatccatggacagcgcaggagggggtgccctattttctgggttttgacttttgtcccttcccccaactccgctacagccaagcagaggctcccgtgcaggaagagaagctgtcaggtgggtgattgtctgggaacccgacacgtcccgtcgtttgtttttggttttagtatcttccccatataccaagagcacaggtggaaaaggccggcaccacatggaatgagggcaagcgctgtgccgggaagttggatgggcagagcctgggagaaatgttttctgaatggcctggggctggcatttatctttcctttcagcaagcacctcaaatttgccatgctggctggtggaagagtttgtggtagcagaagagtgctctccatgctctaatttccgggctaaaactacccctgagtgtggtcccacaggatatgtagagaaaatcacatgcagctcatctaagagaaatgagttcaaaagctgccgctcagctttgatggaacaacgcttattttggaagttcgaaggggctgtcgtgtgtgtggccctgatcttcgcttgtcttgtcatcattcgtcagcgacaattggacagaaaggctctggaaaaggtccggaagcaaatcgagtccatatagctacattccacccttgtatcctgggtcttagagaccctatctcagacagtgaaagtgaaatggactgatttgcactcttggttctttggagccttgtggtggaatccccttttccccatcttcttctttcagatcattaatgagcagaataaaaagagtaaaatgg

SEQ ID NO: 368176 - DNA, 2624 bp, Homo sapiens
taccttatggcagatatttaatttcagagtagagaccccactctgatgcctggtaaggttattggaagtgaaatatcacaagatcttacagtttgttgtgagataaggtaggatttggtgaggagtaacaaatactagcagatttcggcccaaacttcaattatagctaaacattactggaaaaaaccccacaacctactttatgtaacatataactactcacacacatacacaaaaataatacacacacaatttcagcaaacacaaataataatttaaagaaacaaattcaaaattagagccaggtatggtggcacatgcctgaaatcccagctacttgggaggatccctgaagacgagaagttccaggctgtaatgcgctatgatggctcctgtgacttgccactgcactccagtctggcaacatagccagagtccatctcgttcaaaaacaaaaacaaacaaacaaaaaacggcgaaatgaaggctcagccctcatcaggtttaggtgacagagctagaccctgtctaagaaaaaaaataaaattaaatgaaaattcgttatcagacagtaaagcatgaacccacagtgctggtcaagtcactgcagatctgagtgtgtatcaaggtttaactccataagatgaaaagcaggcaatgaatctttggcctgggtgttgacagtctaggctcaagcctcagctttcccactcattagcttgctgaccttggacaagtcacttatattctctgaacttactcatgaaacggagatacatttcatctgcctctcgcaagaaaaagtcctggtaaatacacattagcatttccgttttacacagaacactgacagatactttcctaagatcatggagttaataaccaccagaacctagactcaatacttatggaacttcaaatctcatgcttttctcattgcacttatgattactccattatgtaggagcaagggagagttgagagcatttgaagaggttatgcaaaggaccagctctgaggagtaggcttagcaaagtaacatgagggaaggtaacaccgttcatctgtgtagcggagtgggagccaagagacaaggagaaagtttcatgttcgtcatgtgtctcggatattccggtttctgcagggacgagaacgcgcagtttcgcctccatcccttgacctccaacacagcttctccactggatcatcggtggcgatgaaggggcggctggggaaggatgtcagagaaaccagaagcttgacggtgaatcctcgggttttaaggagagagcaaagtcctgagagggcgacgtattgtccctgctcacctagcccagaatgaacaaacacgcgccagccagggagcagcgagccgagaattcggacgagcctctgcaaccgccatttgccgttctcgcaaagactaccaagaccacaatgcaacggggcgccgagctaattcccagtgagcagcaggcgaggcgccaccgacgcggaagactataagccccagcgggcgacgaccgaacgcccccgggaacaccgggccccgagctcggtcccgcgcccgaggatcctccacggggctagatggctgcgtcgggggcgggagcggaggtgagcgggcgctagggccgcgagcccccgccggcccttcctccagcgccctgcggaccccgcagaaggcgctcgcctccctagcccgcaaaaacatatcgatttttctcgctgtggcaacggggacgtcctgatagatcctctgctccaataggcaactccggccttccctgccctgacctggaacctctgggagggctgcagagtaagtgccgcctctgcgctccgacggaggcacgaggcctgtggagtaggtccctctgttccgacaggtgcgacacttggcgctccatgcttgcgggtgccgggaggcctggcctcccccagggccgccacctctgctggttgctctgtgctttcaccttaaagctctgtatcttccccatataccaagagcacaggtggaaaaggccggcaccacatggaatgagggcaagcgctgtgccgggaagttggatgggcagagcctgggagaaatgttttctgaatggcctggggctggcatttatctttcctttcagcaagcacctcaaatttgccatgctggctggtggaagagtttgtggtagcagaagagtgctctccatgctctaatttccgggctaaaactacccctgagtgtggtcccacaggatatgtagagaaaatcacatgcagctcatctaagagaaatgagttcaaaagctgccgctcagctttgatggaacaacgcttattttggaagttcgaaggggctgtcgtgtgtgtggccctgatcttcgcttgtcttgtcatcattcgtcagcgacaattggacagaaaggctctggaaaaggtccggaagcaaatcgagtccatatagctacattccacccttgtatcctgggtcttagagaccctatctcagacagtgaaagtgaaatggactgatttgcactcttggttctttggagccttgtggtggaatccccttttccccatcttcttctttcagatcattaatgagcagaataaaaagagtaaaatgg

SEQ ID NO: 368177 - DNA, 2453 bp, Homo sapiens
taccttatggcagatatttaatttcagagtagagaccccactctgatgcctggtaaggttattggaagtgaaatatcacaagatcttacagtttgttgtgagataaggtaggatttggtgaggagtaacaaatactagcagatttcggcccaaacttcaattatagctaaacattactggaaaaaaccccacaacctactttatgtaacatataactactcacacacatacacaaaaataatacacacacaatttcagcaaacacaaataataatttaaagaaacaaattcaaaattagagccaggtatggtggcacatgcctgaaatcccagctacttgggaggatccctgaagacgagaagttccaggctgtaatgcgctatgatggctcctgtgacttgccactgcactccagtctggcaacatagccagagtccatctcgttcaaaaacaaaaacaaacaaacaaaaaacggcgaaatgaaggctcagccctcatcaggtttaggtgacagagctagaccctgtctaagaaaaaaaataaaattaaatgaaaattcgttatcagacagtaaagcatgaacccacagtgctggtcaagtcactgcagatctgagtgtgtatcaaggtttaactccataagatgaaaagcaggcaatgaatctttggcctgggtgttgacagtctaggctcaagcctcagctttcccactcattagcttgctgaccttggacaagtcacttatattctctgaacttactcatgaaacggagatacatttcatctgcctctcgcaagaaaaagtcctggtaaatacacattagcatttccgttttacacagaacactgacagatactttcctaagatcatggagttaataaccaccagaacctagactcaatacttatggaacttcaaatctcatgcttttctcattgcacttatgattactccattatgtaggagcaagggagagttgagagcatttgaagaggttatgcaaaggaccagctctgaggagtaggcttagcaaagtaacatgagggaaggtaacaccgttcatctgtgtagcggagtgggagccaagagacaaggagaaagtttcatgttcgtcatgtgtctcggatattccggtttctgcagggacgagaacgcgcagtttcgcctccatcccttgacctccaacacagcttctccactggatcatcggtggcgatgaaggggcggctggggaaggatgtcagagaaaccagaagcttgacggtgaatcctcgggttttaaggagagagcaaagtcctgagagggcgacgtattgtccctgctcacctagcccagaatgaacaaacacgcgccagccagggagcagcgagccgagaattcggacgagcctctgcaaccgccatttgccgttctcgcaaagactaccaagaccacaatgcaacggggcgccgagctaattcccagtgagcagcaggcgaggcgccaccgacgcggaagactataagccccagcgggcgacgaccgaacgcccccgggaacaccgggccccgagctcggtcccgcgcccgaggatcctccacggggctagatggctgcgtcgggggcgggagcggaggtgagcgggcgctagggccgcgagcccccgccggcccttcctccagcgccctgcggaccccgcagaaggcgctcgcctccctagcccgcaaggcaactccggccttccctgccctgacctggaacctctgggagggctgcagagtaagtgccgcctctgcgctccgacggaggcacgaggcctgtggagtaggtccctctgttccgacaggtgcgacacttggcgctccatgcttgcgggtgccgggaggcctggcctcccccagggccgccacctctgctggttgctctgtgctttcaccttaaagctctgccaagcagaggctcccgtgcaggaagagaagctgtcagcaagcacctcaaatttgccatgctggctggtggaagagtttgtggtagcagaagagtgctctccatgctctaatttccgggctaaaactacccctgagtgtggtcccacaggatatgtagagaaaatcacatgcagctcatctaagagaaatgagttcaaaagctgccgctcagctttgatggaacaacgcttattttggaagttcgaaggggctgtcgtgtgtgtggccctgatcttcgcttgtcttgtcatcattcgtcagcgacaattggacagaaaggctctggaaaaggtccggaagcaaatcgagtccatatagctacattccacccttgtatcctgggtcttagagaccctatctcagacagtgaaagtgaaatggactgatttgcactcttggttctttggagccttgtggtggaatccccttttccccatcttcttctttcagatcattaatgagcagaataaaaagagtaaaatgg

SEQ ID NO: 368178 - DNA, 752 bp, Homo sapiens
aggcggcacttactctgcagccctcccagaggttccaggtcaggacagggaaggccggagtaagtgccgcctctgcgctccgacggaggcacgaggcctgtggagtaggtccctctgttccgacaggtgcgacacttggcgctccatgcttgcgggtgccgggaggcctggcctcccccagggccgccacctctgctggttgctctgtgctttcaccttaaagctctgccaagcagaggctcccgtgcaggaagagaagctgtcagcaagcacctcaaatttgccatgctggctggtggaagagtttgtggtagcagaagagtgctctccatgctctaatttccgggctaaaactacccctgagtgtggtcccacaggatatgtagagaaaatcacatgcagctcatctaagagaaatgagttcaaaagctgccgctcagctttgatggaacaacgcttattttggaagttcgaaggggctgtcgtgtgtgtggccctgatcttcgcttgtcttgtcatcattcgtcagcgacaattggacagaaaggctctggaaaaggtccggaagcaaatcgagtccatatagctacattccacccttgtatcctgggtcttagagaccctatctcagacagtgaaagtgaaatggactgatttgcactcttggttctttggagccttgtggtggaatccccttttccccatcttcttctttcagatcattaatgagcagaataaaaagagtaaaatgg

SEQ ID NO: 368179 - DNA, 2561 bp, Homo sapiens
taccttatggcagatatttaatttcagagtagagaccccactctgatgcctggtaaggttattggaagtgaaatatcacaagatcttacagtttgttgtgagataaggtaggatttggtgaggagtaacaaatactagcagatttcggcccaaacttcaattatagctaaacattactggaaaaaaccccacaacctactttatgtaacatataactactcacacacatacacaaaaataatacacacacaatttcagcaaacacaaataataatttaaagaaacaaattcaaaattagagccaggtatggtggcacatgcctgaaatcccagctacttgggaggatccctgaagacgagaagttccaggctgtaatgcgctatgatggctcctgtgacttgccactgcactccagtctggcaacatagccagagtccatctcgttcaaaaacaaaaacaaacaaacaaaaaacggcgaaatgaaggctcagccctcatcaggtttaggtgacagagctagaccctgtctaagaaaaaaaataaaattaaatgaaaattcgttatcagacagtaaagcatgaacccacagtgctggtcaagtcactgcagatctgagtgtgtatcaaggtttaactccataagatgaaaagcaggcaatgaatctttggcctgggtgttgacagtctaggctcaagcctcagctttcccactcattagcttgctgaccttggacaagtcacttatattctctgaacttactcatgaaacggagatacatttcatctgcctctcgcaagaaaaagtcctggtaaatacacattagcatttccgttttacacagaacactgacagatactttcctaagatcatggagttaataaccaccagaacctagactcaatacttatggaacttcaaatctcatgcttttctcattgcacttatgattactccattatgtaggagcaagggagagttgagagcatttgaagaggttatgcaaaggaccagctctgaggagtaggcttagcaaagtaacatgagggaaggtaacaccgttcatctgtgtagcggagtgggagccaagagacaaggagaaagtttcatgttcgtcatgtgtctcggatattccggtttctgcagggacgagaacgcgcagtttcgcctccatcccttgacctccaacacagcttctccactggatcatcggtggcgatgaaggggcggctggggaaggatgtcagagaaaccagaagcttgacggtgaatcctcgggttttaaggagagagcaaagtcctgagagggcgacgtattgtccctgctcacctagcccagaatgaacaaacacgcgccagccagggagcagcgagccgagaattcggacgagcctctgcaaccgccatttgccgttctcgcaaagactaccaagaccacaatgcaacggggcgccgagctaattcccagtgagcagcaggcgaggcgccaccgacgcggaagactataagccccagcgggcgacgaccgaacgcccccgggaacaccgggccccgagctcggtcccgcgcccgaggatcctccacggggctagatggctgcgtcgggggcgggagcggaggcaactccggccttccctgccctgacctggaacctctgggagggctgcagagtaagtgccgcctctgcgctccgacggaggcacgaggcctgtggagtaggtccctctgttccgacaggtgcgacacttggcgctccatgcttgcgggtgccgggaggcctggcctcccccagggccgccacctctgctggttgctctgtgctttcaccttaaagctctgccaagcagaggctcccgtgcaggaagagaagctgtcaggtgggtgattgtctgggaacccgacacgtcccgtcgtttgtttttggttttagtatcttccccatataccaagagcacaggtggaaaaggccggcaccacatggaatgagggcaagcgctgtgccgggaagttggatgggcagagcctgggagaaatgttttctgaatggcctggggctggcatttatctttcctttcagcaagcacctcaaatttgccatgctggctggtggaagagtttgtggtagcagaagagtgctctccatgctctaatttccgggctaaaactacccctgagtgtggtcccacaggatatgtagagaaaatcacatgcagctcatctaagagaaatgagttcaaaagctgccgctcagctttgatggaacaacgcttattttggaagttcgaaggggctgtcgtgtgtgtggccctgatcttcgcttgtcttgtcatcattcgtcagcgacaattggacagaaaggctctggaaaaggtccggaagcaaatcgagtccatatagctacattccacccttgtatcctgggtcttagagaccctatctcagacagtgaaagtgaaatggactgatttgcactcttggttctttggagccttgtggtggaatccccttttccccatcttcttctttcagatcattaatgagcagaataaaaagagtaaaatgg

SEQ ID NO: 368180 - DNA, 581 bp, Homo sapiens
tgtcagcacgggagcctctgcttggcagagctttaaggtgaaagcacagagcaaccgccaagcagaggctcccgtgcaggaagagaagctgtcagcaagcacctcaaatttgccatgctggctggtggaagagtttgtggtagcagaagagtgctctccatgctctaatttccgggctaaaactacccctgagtgtggtcccacaggatatgtagagaaaatcacatgcagctcatctaagagaaatgagttcaaaagctgccgctcagctttgatggaacaacgcttattttggaagttcgaaggggctgtcgtgtgtgtggccctgatcttcgcttgtcttgtcatcattcgtcagcgacaattggacagaaaggctctggaaaaggtccggaagcaaatcgagtccatatagctacattccacccttgtatcctgggtcttagagaccctatctcagacagtgaaagtgaaatggactgatttgcactcttggttctttggagccttgtggtggaatccccttttccccatcttcttctttcagatcattaatgagcagaataaaaagagtaaaatgg

SEQ ID NO: 368181 - DNA, 2932 bp, Homo sapiens
taccttatggcagatatttaatttcagagtagagaccccactctgatgcctggtaaggttattggaagtgaaatatcacaagatcttacagtttgttgtgagataaggtaggatttggtgaggagtaacaaatactagcagatttcggcccaaacttcaattatagctaaacattactggaaaaaaccccacaacctactttatgtaacatataactactcacacacatacacaaaaataatacacacacaatttcagcaaacacaaataataatttaaagaaacaaattcaaaattagagccaggtatggtggcacatgcctgaaatcccagctacttgggaggatccctgaagacgagaagttccaggctgtaatgcgctatgatggctcctgtgacttgccactgcactccagtctggcaacatagccagagtccatctcgttcaaaaacaaaaacaaacaaacaaaaaacggcgaaatgaaggctcagccctcatcaggtttaggtgacagagctagaccctgtctaagaaaaaaaataaaattaaatgaaaattcgttatcagacagtaaagcatgaacccacagtgctggtcaagtcactgcagatctgagtgtgtatcaaggtttaactccataagatgaaaagcaggcaatgaatctttggcctgggtgttgacagtctaggctcaagcctcagctttcccactcattagcttgctgaccttggacaagtcacttatattctctgaacttactcatgaaacggagatacatttcatctgcctctcgcaagaaaaagtcctggtaaatacacattagcatttccgttttacacagaacactgacagatactttcctaagatcatggagttaataaccaccagaacctagactcaatacttatggaacttcaaatctcatgcttttctcattgcacttatgattactccattatgtaggagcaagggagagttgagagcatttgaagaggttatgcaaaggaccagctctgaggagtaggcttagcaaagtaacatgagggaaggtaacaccgttcatctgtgtagcggagtgggagccaagagacaaggagaaagtttcatgttcgtcatgtgtctcggatattccggtttctgcagggacgagaacgcgcagtttcgcctccatcccttgacctccaacacagcttctccactggatcatcggtggcgatgaaggggcggctggggaaggatgtcagagaaaccagaagcttgacggtgaatcctcgggttttaaggagagagcaaagtcctgagagggcgacgtattgtccctgctcacctagcccagaatgaacaaacacgcgccagccagggagcagcgagccgagaattcggacgagcctctgcaaccgccatttgccgttctcgcaaagactaccaagaccacaatgcaacggggcgccgagctaattcccagtgagcagcaggcgaggcgccaccgacgcggaagactataagccccagcgggcgacgaccgaacgcccccgggaacaccgggccccgagctcggtcccgcgcccgaggatcctccacggggctagatggctgcgtcgggggcgggagcggaggtgagcgggcgctagggccgcgagcccccgccggcccttcctccagcgccctgcggaccccgcagaaggcgctcgcctccctagcccgcaaaaacatatcgatttttctcgctgtggcaacggggacgtcctgatagatcctctgctccaataggcaactccggccttccctgccctgacctggaacctctgggagggctgcagagtaagtgccgcctctgcgctccgacggaggcacgaggcctgtggagtaggtccctctgttccgacaggtgcgacacttggcgctccatgcttgcgggtgccgggaggcctggcctcccccagggccgccacctctgctggttgctctgtgctttcaccttaaagctctgccaagcagaggctcccgtgcaggaagagaagctgtcaggtgggtgattgtctgggaacccgacacgtcccgtcgtttgtttttggttttagtatcttccccatataccaagagcacaggtggaaaaggccggcaccacatggaatgagggcaagcgctgtgccgggaagttggatgggcagagcctgggagaaatgttttctgaatggcctggggctggcatttatctttcctttcagcaagcacctcaaatttgccatgctggctggtggaagagtttgtggtagcagaagagtgctctccatgctctaatttccgggctaaaactacccctgagtgtggtcccacaggatatgtagagaaaatcacatgcagctcatctaagagaaatgagttcaaaagctgccgctcagctttgatggaacaacgcttattttggaagttcgaaggggctgtcgtgtgtgtggccctgatcttcgcttgtcttgtcatcattcgtcagcgacaattggacagaaaggctctggaaaaggtccggaagcaaatcgagtccatatagctacattccacccttgtatcctgggtcttagagaccctatctcagacagtgaaagtgaaatggactgatttgcactcttggttctttggagccttgtggtggaatccccttttccccatcttcttctttcagatcattaatgagcagaataaaaagagtaaaatggaaaaaaaaaaaaaaaaaaaaaaaataaaaaaacagaagagaaataatggggggggggaaaaggagggtactggaatggggcccatggggcataaggtggtatcattggaccagagttttctctggtaccaaaggggggaagatttctggcgggtctacacttataagagagtcggtataaaattgcagaaaagccagggttacgctgctttatacgg

SEQ ID NO: 368182 - DNA, 2430 bp, Homo sapiens
taccttatggcagatatttaatttcagagtagagaccccactctgatgcctggtaaggttattggaagtgaaatatcacaagatcttacagtttgttgtgagataaggtaggatttggtgaggagtaacaaatactagcagatttcggcccaaacttcaattatagctaaacattactggaaaaaaccccacaacctactttatgtaacatataactactcacacacatacacaaaaataatacacacacaatttcagcaaacacaaataataatttaaagaaacaaattcaaaattagagccaggtatggtggcacatgcctgaaatcccagctacttgggaggatccctgaagacgagaagttccaggctgtaatgcgctatgatggctcctgtgacttgccactgcactccagtctggcaacatagccagagtccatctcgttcaaaaacaaaaacaaacaaacaaaaaacggcgaaatgaaggctcagccctcatcaggtttaggtgacagagctagaccctgtctaagaaaaaaaataaaattaaatgaaaattcgttatcagacagtaaagcatgaacccacagtgctggtcaagtcactgcagatctgagtgtgtatcaaggtttaactccataagatgaaaagcaggcaatgaatctttggcctgggtgttgacagtctaggctcaagcctcagctttcccactcattagcttgctgaccttggacaagtcacttatattctctgaacttactcatgaaacggagatacatttcatctgcctctcgcaagaaaaagtcctggtaaatacacattagcatttccgttttacacagaacactgacagatactttcctaagatcatggagttaataaccaccagaacctagactcaatacttatggaacttcaaatctcatgcttttctcattgcacttatgattactccattatgtaggagcaagggagagttgagagcatttgaagaggttatgcaaaggaccagctctgaggagtaggcttagcaaagtaacatgagggaaggtaacaccgttcatctgtgtagcggagtgggagccaagagacaaggagaaagtttcatgttcgtcatgtgtctcggatattccggtttctgcagggacgagaacgcgcagtttcgcctccatcccttgacctccaacacagcttctccactggatcatcggtggcgatgaaggggcggctggggaaggatgtcagagaaaccagaagcttgacggtgaatcctcgggttttaaggagagagcaaagtcctgagagggcgacgtattgtccctgctcacctagcccagaatgaacaaacacgcgccagccagggagcagcgagccgagaattcggacgagcctctgcaaccgccatttgccgttctcgcaaagactaccaagaccacaatgcaacggggcgccgagctaattcccagtgagcagcaggcgaggcgccaccgacgcggaagactataagccccagcgggcgacgaccgaacgcccccgggaacaccgggccccgagctcggtcccgcgcccgaggatcctccacggggctagatggctgcgtcgggggcgggagcggaggtgagcgggcgctagggccgcgagcccccgccggcccttcctccagcgccctgcggaccccgcagaaggcgctcgcctccctagcccgcaaaaacatatcgatttttctcgctgtggcaacggggacgtcctgatagatcctctgctccaataggcaactccggccttccctgccctgacctggaacctctgggagggctgcagagtaagtgccgcctctgcgctccgacggaggcacgaggcctgtggagtaggtccctctgttccgacaggtgcgacacttggcgctccatgcttgcgggtgccgggaggcctggcctcccccagggccgccacctctgctggttgctctgtgctttcaccttaaagctctgccaagcagaggctcccgtgcaggaagagaagctgtcaaaactacccctgagtgtggtcccacaggatatgtagagaaaatcacatgcagctcatctaagagaaatgagttcaaaagctgccgctcagctttgatggaacaacgcttattttggaagttcgaaggggctgtcgtgtgtgtggccctgatcttcgcttgtcttgtcatcattcgtcagcgacaattggacagaaaggctctggaaaaggtccggaagcaaatcgagtccatatagctacattccacccttgtatcctgggtcttagagaccctatctcagacagtgaaagtgaaatggactgatttgcactcttggttctttggagccttgtggtggaatccccttttccccatcttcttctttcagatcattaatgagcagaataaaaagagtaaaatgg

SEQ ID NO: 368183 - DNA, 3342 bp, Homo sapiens
taccttatggcagatatttaatttcagagtagagaccccactctgatgcctggtaaggttattggaagtgaaatatcacaagatcttacagtttgttgtgagataaggtaggatttggtgaggagtaacaaatactagcagatttcggcccaaacttcaattatagctaaacattactggaaaaaaccccacaacctactttatgtaacatataactactcacacacatacacaaaaataatacacacacaatttcagcaaacacaaataataatttaaagaaacaaattcaaaattagagccaggtatggtggcacatgcctgaaatcccagctacttgggaggatccctgaagacgagaagttccaggctgtaatgcgctatgatggctcctgtgacttgccactgcactccagtctggcaacatagccagagtccatctcgttcaaaaacaaaaacaaacaaacaaaaaacggcgaaatgaaggctcagccctcatcaggtttaggtgacagagctagaccctgtctaagaaaaaaaataaaattaaatgaaaattcgttatcagacagtaaagcatgaacccacagtgctggtcaagtcactgcagatctgagtgtgtatcaaggtttaactccataagatgaaaagcaggcaatgaatctttggcctgggtgttgacagtctaggctcaagcctcagctttcccactcattagcttgctgaccttggacaagtcacttatattctctgaacttactcatgaaacggagatacatttcatctgcctctcgcaagaaaaagtcctggtaaatacacattagcatttccgttttacacagaacactgacagatactttcctaagatcatggagttaataaccaccagaacctagactcaatacttatggaacttcaaatctcatgcttttctcattgcacttatgattactccattatgtaggagcaagggagagttgagagcatttgaagaggttatgcaaaggaccagctctgaggagtaggcttagcaaagtaacatgagggaaggtaacaccgttcatctgtgtagcggagtgggagccaagagacaaggagaaagtttcatgttcgtcatgtgtctcggatattccggtttctgcagggacgagaacgcgcagtttcgcctccatcccttgacctccaacacagcttctccactggatcatcggtggcgatgaaggggcggctggggaaggatgtcagagaaaccagaagcttgacggtgaatcctcgggttttaaggagagagcaaagtcctgagagggcgacgtattgtccctgctcacctagcccagaatgaacaaacacgcgccagccagggagcagcgagccgagaattcggacgagcctctgcaaccgccatttgccgttctcgcaaagactaccaagaccacaatgcaacggggcgccgagctaattcccagtgagcagcaggcgaggcgccaccgacgcggaagactataagccccagcgggcgacgaccgaacgcccccgggaacaccgggccccgagctcggtcccgcgcccgaggatcctccacggggctagatggctgcgtcgggggcgggagcggaggtgagcgggcgctagggccgcgagcccccgccggcccttcctccagcgccctgcggaccccgcagaaggcgctcgcctccctagcccgcaaaaacatatcgatttttctcgctgtggcaacggggacgtcctgatagatcctctgctccaataggcaactccggccttccctgccctgacctggaacctctgggagggctgcagagtaagtgccgcctctgcgctccgacggaggcacgaggcctgtggagtaggtccctctgttccgacaggtgcgacacttggcgctccatgcttgcgggtgccgggaggcctggcctcccccagggccgccacctctgctggttgctctgtgctttcaccttaaagctctgccaagcagaggctcccgtgcaggaagagaagctgtcaggtgggtgattgtctgggaacccgacacgtcccgtcgtttgtttttggttttagtatcttccccatataccaagagcacaggtggaaaaggccggcaccacatggaatgagggcaagcgctgtgccgggaagttggatgggcagagcctgggagaaatgttttctgaatggcctggggctggcatttatctttcctttcagcaagcacctcaaatttgccatgctggctggtggaagagtttgtggtagcagaagagtgctctccatgctctaatttccgggctaaaactacccctgagtgtggtcccacaggatatgtagagaaaatcacatgcagctcatctaagagaaatgagttcaaaagctgccgctcagctttgatggaacaacgcttattttggaagttcgaaggggctgtcgtgtgtgtggccctgatcttcgcttgtcttgtcatcattcgtcagcgacaattggacagaaaggctctggaaaaggtccggaagcaaatcgagtccatatagctacattccacccttgtatcctgggtcttagagaccctatctcagacagtgaaagtgaaatggactgatttgcactcttggttctttggagccttgtggtggaatccccttttccccatcttcttctttcagatcattaatgagcagaataaaaagagtaaaatggtttccttcccttctgtaacttggagcaggaagtcatgggggcagagagggaaaggaggtggttacttaaggccccaatctaccaagtcttccccaccacttctcccttgttttccccctcttctactacttatttcaaacttctgggatacaatttcagctaaaacgtttatttctcactcaaaacttatttcccctcaaccctatacccaaagaagaaataaaatcacagatacataacagaagtatttgaggtaccctctcatatatgcaaacaaatgcagactaggcctcaggcagagactaaaggacatctcttggggtgtcctgaagtgatttggacccctgagggcagacacctaagtaggaatcccagtgggaagcaaagccataaggaagcccaggattccttgtgatcaggaagtgggccaggaaggtctgttccagctcacatctcatctgcatgcagcacggaccggatgcgcccactgggtcttggcttccctcccatcttctcaagcagtgtccttgttgagccatttgcatccttggctccaggtggctccctcagtctggactctaccacttgggtctccagattttctgttacgtccttgtgggtcaggat

SEQ ID NO: 368184 - DNA, 2377 bp, Homo sapiens
  misc_feature (2195)..(2195): n is a, c, g, or t
  misc_feature (2377)..(2377): n is a, c, g, or t
taccttatggcagatatttaatttcagagtagagaccccactctgatgcctggtaaggttattggaagtgaaatatcacaagatcttacagtttgttgtgagataaggtaggatttggtgaggagtaacaaatactagcagatttcggcccaaacttcaattatagctaaacattactggaaaaaaccccacaacctactttatgtaacatataactactcacacacatacacaaaaataatacacacacaatttcagcaaacacaaataataatttaaagaaacaaattcaaaattagagccaggtatggtggcacatgcctgaaatcccagctacttgggaggatccctgaagacgagaagttccaggctgtaatgcgctatgatggctcctgtgacttgccactgcactccagtctggcaacatagccagagtccatctcgttcaaaaacaaaaacaaacaaacaaaaaacggcgaaatgaaggctcagccctcatcaggtttaggtgacagagctagaccctgtctaagaaaaaaaataaaattaaatgaaaattcgttatcagacagtaaagcatgaacccacagtgctggtcaagtcactgcagatctgagtgtgtatcaaggtttaactccataagatgaaaagcaggcaatgaatctttggcctgggtgttgacagtctaggctcaagcctcagctttcccactcattagcttgctgaccttggacaagtcacttatattctctgaacttactcatgaaacggagatacatttcatctgcctctcgcaagaaaaagtcctggtaaatacacattagcatttccgttttacacagaacactgacagatactttcctaagatcatggagttaataaccaccagaacctagactcaatacttatggaacttcaaatctcatgcttttctcattgcacttatgattactccattatgtaggagcaagggagagttgagagcatttgaagaggttatgcaaaggaccagctctgaggagtaggcttagcaaagtaacatgagggaaggtaacaccgttcatctgtgtagcggagtgggagccaagagacaaggagaaagtttcatgttcgtcatgtgtctcggatattccggtttctgcagggacgagaacgcgcagtttcgcctccatcccttgacctccaacacagcttctccactggatcatcggtggcgatgaaggggcggctggggaaggatgtcagagaaaccagaagcttgacggtgaatcctcgggttttaaggagagagcaaagtcctgagagggcgacgtattgtccctgctcacctagcccagaatgaacaaacacgcgccagccagggagcagcgagccgagaattcggacgagcctctgcaaccgccatttgccgttctcgcaaagactaccaagaccacaatgcaacggggcgccgagctaattcccagtgagcagcaggcgaggcgccaccgacgcggaagactataagccccagcgggcgacgaccgaacgcccccgggaacaccgggccccgagctcggtcccgcgcccgaggatcctccacggggctagatggctgcgtcgggggcgggagcggaggtgagcgggcgctagggccgcgagcccccgccggcccttcctccagcgccctgcggaccccgcagaaggcgctcgcctccctagcccgcaaaaacatatcgatttttctcgctgtggcaacggggacgtcctgatagatcctctgctccaataggcaactccggccttccctgccctgacctggaacctctgggagggctgcagagtaagtgccgcctctgcgctccgacggaggcacgaggcctgtggagtaggtccctctgttccgacaggtgcgacacttggcgctccatgcttgcgggtgccgggaggcctggcctcccccagggccgccacctctgctggttgctctgtgctttcaccttaaagctctgccaagcagaggctcccgtgcaggaagagaagctgtcagcaagcacctcaaatttgccatgctggctggtggaagagtttgtggtagcagaagagtgctctccatgctctaatttccgggctaaaactacccctgagtgtggtcccacaggatatgtagagaaaatcacatgcagctcatctaagagaaatgagttcaaaagtgncgtcacgtttgaggacaagttattggagtcgaaggtggggtgggggccgaatcgggttggtcacgcgcgagatgggaaggccgaagggggaagggctaggttcccgttggtggacaccagaaagagggggggggggcgcctgggggaagaacagacaacgggcggggggcgggaggcggcgn

SEQ ID NO: 368185 - DNA, 3057 bp, Homo sapiens
taccttatggcagatatttaatttcagagtagagaccccactctgatgcctggtaaggttattggaagtgaaatatcacaagatcttacagtttgttgtgagataaggtaggatttggtgaggagtaacaaatactagcagatttcggcccaaacttcaattatagctaaacattactggaaaaaaccccacaacctactttatgtaacatataactactcacacacatacacaaaaataatacacacacaatttcagcaaacacaaataataatttaaagaaacaaattcaaaattagagccaggtatggtggcacatgcctgaaatcccagctacttgggaggatccctgaagacgagaagttccaggctgtaatgcgctatgatggctcctgtgacttgccactgcactccagtctggcaacatagccagagtccatctcgttcaaaaacaaaaacaaacaaacaaaaaacggcgaaatgaaggctcagccctcatcaggtttaggtgacagagctagaccctgtctaagaaaaaaaataaaattaaatgaaaattcgttatcagacagtaaagcatgaacccacagtgctggtcaagtcactgcagatctgagtgtgtatcaaggtttaactccataagatgaaaagcaggcaatgaatctttggcctgggtgttgacagtctaggctcaagcctcagctttcccactcattagcttgctgaccttggacaagtcacttatattctctgaacttactcatgaaacggagatacatttcatctgcctctcgcaagaaaaagtcctggtaaatacacattagcatttccgttttacacagaacactgacagatactttcctaagatcatggagttaataaccaccagaacctagactcaatacttatggaacttcaaatctcatgcttttctcattgcacttatgattactccattatgtaggagcaagggagagttgagagcatttgaagaggttatgcaaaggaccagctctgaggagtaggcttagcaaagtaacatgagggaaggtaacaccgttcatctgtgtagcggagtgggagccaagagacaaggagaaagtttcatgttcgtcatgtgtctcggatattccggtttctgcagggacgagaacgcgcagtttcgcctccatcccttgacctccaacacagcttctccactggatcatcggtggcgatgaaggggcggctggggaaggatgtcagagaaaccagaagcttgacggtgaatcctcgggttttaaggagagagcaaagtcctgagagggcgacgtattgtccctgctcacctagcccagaatgaacaaacacgcgccagccagggagcagcgagccgagaattcggacgagcctctgcaaccgccatttgccgttctcgcaaagactaccaagaccacaatgcaacggggcgccgagctaattcccagtgagcagcaggcgaggcgccaccgacgcggaagactataagccccagcgggcgacgaccgaacgcccccgggaacaccgggccccgagctcggtcccgcgcccgaggatcctccacggggctagatggctgcgtcgggggcgggagcggaggtgagcgggcgctagggccgcgagcccccgccggcccttcctccagcgccctgcggaccccgcagaaggcgctcgcctccctagcccgcaaaaacatatcgatttttctcgctgtggcaacggggacgtcctgatagatcctctgctccaataggcaactccggccttccctgccctgacctggaacctctgggagggctgcagagtaagtgccgcctctgcgctccgacggaggcacgaggcctgtggagtaggtccctctgttccgacaggtgcgacacttggcgctccatgcttgcgggtgccgggaggcctggcctcccccagggccgccacctctgctggttgctctgtgctttcaccttaaagctctgccaagcagaggctcccgtgcaggaagagaagctgtcaaaactacccctgagtgtggtcccacaggatatgtagagaaaatcacatgcagctcatctaagagaaatgagttcaaaagctgccgctcagctttgatggaacaacgcttattttggaagttcgaaggggctgtcgtgtgtgtggccctgatcttcgcttgtcttgtcatcattcgtcagcgacaattggacagaaaggctctggaaaaggtccggaagcaaatcgagtccatatagctacattccacccttgtatcctgggtcttagagaccctatctcagacagtgaaagtgaaatggactgatttgcactcttggttctttggagccttgtggtggaatccccttttccccatcttcttctttcagatcattaatgagcagaataaaaagagtaaaatggtttccttcccttctgtaacttggagcaggaagtcatgggggcagagagggaaaggaggtggttacttaaggccccaatctaccaagtcttccccaccacttctcccttgttttccccctcttctactacttatttcaaacttctgggatacaatttcagctaaaacgtttatttctcactcaaaacttatttcccctcaaccctatacccaaagaagaaataaaatcacagatacataacagaagtatttgaggtaccctctcatatatgcaaacaaatgcagactaggcctcaggcagagactaaaggacatctcttggggtgtcctgaagtgatttggacccctgagggcagacacctaagtaggaatcccagtgggaagcaaagccataaggaagcccaggattccttgtgatcaggaagtgggccaggaaggtctgttccagctcacatctcatctgcatgcagcacggaccggatgcgcccactgggtcttggcttccctcccatcttctcaagcagtgtccttgttgagccatttgcatccttggctccaggtggctccctcagtctggactctaccacttgggtctccagattttctgttacgtccttgtgggtcaggat

SEQ ID NO: 368186 - DNA, 646 bp, Homo sapiens
ggcacgaggccccagggccgccacctctgctggttgccctgggggaggccaggcctcccggcacccgcaagcatggagcgccacctctgctggttgctctgtgctttcaccttaaagctctgccaagcagaggctcccgtgcaggaagagaagctgtcagcaagcacctcaaatttgccatgctggctggtggaagagtttgtggtagcagaagagtgctctccatgctctaatttccgggctaaaactacccctgagtgtggtcccacaggatatgtagagaaaatcacatgcagctcatctaagagaaatgagttcaaaagctgccgctcagctttgatggaacaacgcttattttggaagttcgaaggggctgtcgtgtgtgtggccctgatcttcgcttgtcttgtcatcattcgtcagcgacaattggacagaaaggctctggaaaaggtccggaagcaaatcgagtccatatagctacattccacccttgtatcctgggtcttagagaccctatctcagacagtgaaagtgaaatggactgatttgcactcttggttctttggagccttgtggtggaatccccttttccccatcttcttctttcagatcattaatgagcagaataaaaagagtaaaatgg

SEQ ID NO: 368187 - DNA, 3079 bp, Homo sapiens
taccttatggcagatatttaatttcagagtagagaccccactctgatgcctggtaaggttattggaagtgaaatatcacaagatcttacagtttgttgtgagataaggtaggatttggtgaggagtaacaaatactagcagatttcggcccaaacttcaattatagctaaacattactggaaaaaaccccacaacctactttatgtaacatataactactcacacacatacacaaaaataatacacacacaatttcagcaaacacaaataataatttaaagaaacaaattcaaaattagagccaggtatggtggcacatgcctgaaatcccagctacttgggaggatccctgaagacgagaagttccaggctgtaatgcgctatgatggctcctgtgacttgccactgcactccagtctggcaacatagccagagtccatctcgttcaaaaacaaaaacaaacaaacaaaaaacggcgaaatgaaggctcagccctcatcaggtttaggtgacagagctagaccctgtctaagaaaaaaaataaaattaaatgaaaattcgttatcagacagtaaagcatgaacccacagtgctggtcaagtcactgcagatctgagtgtgtatcaaggtttaactccataagatgaaaagcaggcaatgaatctttggcctgggtgttgacagtctaggctcaagcctcagctttcccactcattagcttgctgaccttggacaagtcacttatattctctgaacttactcatgaaacggagatacatttcatctgcctctcgcaagaaaaagtcctggtaaatacacattagcatttccgttttacacagaacactgacagatactttcctaagatcatggagttaataaccaccagaacctagactcaatacttatggaacttcaaatctcatgcttttctcattgcacttatgattactccattatgtaggagcaagggagagttgagagcatttgaagaggttatgcaaaggaccagctctgaggagtaggcttagcaaagtaacatgagggaaggtaacaccgttcatctgtgtagcggagtgggagccaagagacaaggagaaagtttcatgttcgtcatgtgtctcggatattccggtttctgcagggacgagaacgcgcagtttcgcctccatcccttgacctccaacacagcttctccactggatcatcggtggcgatgaaggggcggctggggaaggatgtcagagaaaccagaagcttgacggtgaatcctcgggttttaaggagagagcaaagtcctgagagggcgacgtattgtccctgctcacctagcccagaatgaacaaacacgcgccagccagggagcagcgagccgagaattcggacgagcctctgcaaccgccatttgccgttctcgcaaagactaccaagaccacaatgcaacggggcgccgagctaattcccagtgagcagcaggcgaggcgccaccgacgcggaagactataagccccagcgggcgacgaccgaacgcccccgggaacaccgggccccgagctcggtcccgcgcccgaggatcctccacggggctagatggctgcgtcgggggcgggagcggaggtgagcgggcgctagggccgcgagcccccgccggcccttcctccagcgccctgcggaccccgcagaaggcgctcgcctccctagcccgcaaaaacatatcgatttttctcgctgtggcaacggggacgtcctgatagatcctctgctccaataggcaactccggccttccctgccctgacctggaacctctgggagggctgcagagtaagtgccgcctctgcgctccgacggaggcacgaggcctgtggagtaggtccctctgttccgacaggtgcgacacttggcgctccatgcttgcgggtgccgggaggcctggcctcccccagggccgccacctctgctggttgctctgtgctttcaccttaaagctctgccaagcagaggctcccgtgcaggaagagaagctgtcagcaagcacctcaaatttgccatgctggctggtggaagagtttgtggtagcagaagagtgctctccatgctctaatttccgggctaaaactacccctgagtgtggtcccacaggatatgtagagaaaatcacatgcagctcatctaagagaaatgagttcaaaagctgccgctcagctttgatggaacaacgcttattttggaagttcgaaggggctgtcgtgtgtgtggccctgatcttcgcttgtcttgtcatcattcgtcagcgacaattggacagaaaggctctggaaaaggtccggaagcaaatcgagtccatatagctacattccacccttgtatcctgggtcttagagaccctatctcagacagtgaaagtgaaatggactgatttgcactcttggttctttggagccttgtggtggaatccccttttccccatcttcttctttcagatcattaatgagcagaataaaaagagtaaaatggacccacaccccaccaccccccccccccacccccacaccacacccacacgggggcgcgccacaaaacaaccccccaggcggccccacaatccccccgccccacttatgcacaagcgcgcccacaaacgcggcgaacaaacggcgacccgccgctaacaccgcgaccgaccaccgccagcagcatcaaagaacccccagcgggcgcactcggccccaacagccggaacacaaatccggccacctgccggcgcgtacccacatcaacagccgcccgcccgctgtcacccccgcccacgaagacgccacagcacgccacctcctcgcaccgctctgaccctcgcaaccgtgctccctgacgacgtcacgtcgccagacgtggtggactggacgctcgcccgccgctgggccgcagcgcgccatggctcgcgcgcggccgagccctactgccttcgtccggacctagctcggccgtgacctcggccgcccataggcgtaagtcccacgtcgcacacagatgagatagcagaccgacaccacacaacgcccaccacaccacacccccacg

SEQ ID NO: 368188 - DNA, 2592 bp, Homo sapiens
taccttatggcagatatttaatttcagagtagagaccccactctgatgcctggtaaggttattggaagtgaaatatcacaagatcttacagtttgttgtgagataaggtaggatttggtgaggagtaacaaatactagcagatttcggcccaaacttcaattatagctaaacattactggaaaaaaccccacaacctactttatgtaacatataactactcacacacatacacaaaaataatacacacacaatttcagcaaacacaaataataatttaaagaaacaaattcaaaattagagccaggtatggtggcacatgcctgaaatcccagctacttgggaggatccctgaagacgagaagttccaggctgtaatgcgctatgatggctcctgtgacttgccactgcactccagtctggcaacatagccagagtccatctcgttcaaaaacaaaaacaaacaaacaaaaaacggcgaaatgaaggctcagccctcatcaggtttaggtgacagagctagaccctgtctaagaaaaaaaataaaattaaatgaaaattcgttatcagacagtaaagcatgaacccacagtgctggtcaagtcactgcagatctgagtgtgtatcaaggtttaactccataagatgaaaagcaggcaatgaatctttggcctgggtgttgacagtctaggctcaagcctcagctttcccactcattagcttgctgaccttggacaagtcacttatattctctgaacttactcatgaaacggagatacatttcatctgcctctcgcaagaaaaagtcctggtaaatacacattagcatttccgttttacacagaacactgacagatactttcctaagatcatggagttaataaccaccagaacctagactcaatacttatggaacttcaaatctcatgcttttctcattgcacttatgattactccattatgtaggagcaagggagagttgagagcatttgaagaggttatgcaaaggaccagctctgaggagtaggcttagcaaagtaacatgagggaaggtaacaccgttcatctgtgtagcggagtgggagccaagagacaaggagaaagtttcatgttcgtcatgtgtctcggatattccggtttctgcagggacgagaacgcgcagtttcgcctccatcccttgacctccaacacagcttctccactggatcatcggtggcgatgaaggggcggctggggaaggatgtcagagaaaccagaagcttgacggtgaatcctcgggttttaaggagagagcaaagtcctgagagggcgacgtattgtccctgctcacctagcccagaatgaacaaacacgcgccagccagggagcagcgagccgagaattcggacgagcctctgcaaccgccatttgccgttctcgcaaagactaccaagaccacaatgcaacggggcgccgagctaattcccagtgagcagcaggcgaggcgccaccgacgcggaagactataagccccagcgggcgacgaccgaacgcccccgggaacaccgggccccgagctcggtcccgcgcccgaggatcctccacggggctagatggctgcgtcgggggcgggagcggaggtgagcgggcgctagggccgcgagcccccgccggcccttcctccagcgccctgcggaccccgcagaaggcgctcgcctccctagcccgcaaaaacatatcgatttttctcgctgtggcaacggggacgtcctgatagatcctctgctccaataggcaactccggccttccctgccctgacctggaacctctgggagggctgcagagtaagtgccgcctctgcgctccgacggaggcacgaggcctgtggagtaggtccctctgttccgacaggtgcgacacttggcgctccatgcttgcgggtgccgggaggcctggcctcccccagggccgccacctctgctggttgctctgtgctttcaccttaaagctctgccaagcagaggctcccgtgcaggaagagaagctgtcagcaagcacctcaaatttgccatgctggctggtggaagagtttctgcctgggtttaaggcccaagggaaaaaagggaaaagggggttggggcctttacctttccccaatggccttccttaaaagttttttcccccggggcttaaaacgtaacgcccccttgaaaaactacccctgagtgtggtcccacaggatatgtagagaaaatcacatgcagctcatctaagagaaatgagttcaaaagctgccgctcagctttgatggaacaacgcttattttggaagttcgaaggggctgtcgtgtgtgtggccctgatcttcgcttgtcttgtcatcattcgtcagcgacaattggacagaaaggctctggaaaaggtccggaagcaaatcgagtccatatagctacattccacccttgtatcctgggtcttagagaccctatctcagacagtgaaagtgaaatggactgatttgcactcttggttctttggagccttgtggtggaatccccttttccccatcttcttctttcagatcattaatgagcagaataaaaagagtaaaatgg

SEQ ID NO: 368189 - DNA, 3188 bp, Homo sapiens
taccttatggcagatatttaatttcagagtagagaccccactctgatgcctggtaaggttattggaagtgaaatatcacaagatcttacagtttgttgtgagataaggtaggatttggtgaggagtaacaaatactagcagatttcggcccaaacttcaattatagctaaacattactggaaaaaaccccacaacctactttatgtaacatataactactcacacacatacacaaaaataatacacacacaatttcagcaaacacaaataataatttaaagaaacaaattcaaaattagagccaggtatggtggcacatgcctgaaatcccagctacttgggaggatccctgaagacgagaagttccaggctgtaatgcgctatgatggctcctgtgacttgccactgcactccagtctggcaacatagccagagtccatctcgttcaaaaacaaaaacaaacaaacaaaaaacggcgaaatgaaggctcagccctcatcaggtttaggtgacagagctagaccctgtctaagaaaaaaaataaaattaaatgaaaattcgttatcagacagtaaagcatgaacccacagtgctggtcaagtcactgcagatctgagtgtgtatcaaggtttaactccataagatgaaaagcaggcaatgaatctttggcctgggtgttgacagtctaggctcaagcctcagctttcccactcattagcttgctgaccttggacaagtcacttatattctctgaacttactcatgaaacggagatacatttcatctgcctctcgcaagaaaaagtcctggtaaatacacattagcatttccgttttacacagaacactgacagatactttcctaagatcatggagttaataaccaccagaacctagactcaatacttatggaacttcaaatctcatgcttttctcattgcacttatgattactccattatgtaggagcaagggagagttgagagcatttgaagaggttatgcaaaggaccagctctgaggagtaggcttagcaaagtaacatgagggaaggtaacaccgttcatctgtgtagcggagtgggagccaagagacaaggagaaagtttcatgttcgtcatgtgtctcggatattccggtttctgcagggacgagaacgcgcagtttcgcctccatcccttgacctccaacacagcttctccactggatcatcggtggcgatgaaggggcggctggggaaggatgtcagagaaaccagaagcttgacggtgaatcctcgggttttaaggagagagcaaagtcctgagagggcgacgtattgtccctgctcacctagcccagaatgaacaaacacgcgccagccagggagcagcgagccgagaattcggacgagcctctgcaaccgccatttgccgttctcgcaaagactaccaagaccacaatgcaacggggcgccgagctaattcccagtgagcagcaggcgaggcgccaccgacgcggaagactataagccccagcgggcgacgaccgaacgcccccgggaacaccgggccccgagctcggtcccgcgcccgaggatcctccacggggctagatggctgcgtcgggggcgggagcggaggcaactccggccttccctgccctgacctggaacctctgggagggctgcagagtaagtgccgcctctgcgctccgacggaggcacgaggcctgtggagtaggtccctctgttccgacaggtgcgacacttggcgctccatgcttgcgggtgccgggaggcctggcctcccccagggccgccacctctgctggttgctctgtgctttcaccttaaagctctgccaagcagaggctcccgtgcaggaagagaagctgtcaggtgggtgattgtctgggaacccgacacgtcccgtcgtttgtttttggttttagtatcttccccatataccaagagcacaggtggaaaaggccggcaccacatggaatgagggcaagcgctgtgccgggaagttggatgggcagagcctgggagaaatgttttctgaatggcctggggctggcatttatctttcctttcagcaagcacctcaaatttgccatgctggctggtggaagagtttgtggtagcagaagagtgctctccatgctctaatttccgggctaaaactacccctgagtgtggtcccacaggatatgtagagaaaatcacatgcagctcatctaagagaaatgagttcaaaagctgccgctcagctttgatggaacaacgcttattttggaagttcgaaggggctgtcgtgtgtgtggccctgatcttcgcttgtcttgtcatcattcgtcagcgacaattggacagaaaggctctggaaaaggtccggaagcaaatcgagtccatatagctacattccacccttgtatcctgggtcttagagaccctatctcagacagtgaaagtgaaatggactgatttgcactcttggttctttggagccttgtggtggaatccccttttccccatcttcttctttcagatcattaatgagcagaataaaaagagtaaaatggtttccttcccttctgtaacttggagcaggaagtcatgggggcagagagggaaaggaggtggttacttaaggccccaatctaccaagtcttccccaccacttctcccttgttttccccctcttctactacttatttcaaacttctgggatacaatttcagctaaaacgtttatttctcactcaaaacttatttcccctcaaccctatacccaaagaagaaataaaatcacagatacataacagaagtatttgaggtaccctctcatatatgcaaacaaatgcagactaggcctcaggcagagactaaaggacatctcttggggtgtcctgaagtgatttggacccctgagggcagacacctaagtaggaatcccagtgggaagcaaagccataaggaagcccaggattccttgtgatcaggaagtgggccaggaaggtctgttccagctcacatctcatctgcatgcagcacggaccggatgcgcccactgggtcttggcttccctcccatcttctcaagcagtgtccttgttgagccatttgcatccttggctccaggtggctccctcagtctggactctaccacttgggtctccagattttctgttacgtccttgtgggtcaggat

SEQ ID NO: 368190 - DNA, 2715 bp, Homo sapiens
taccttatggcagatatttaatttcagagtagagaccccactctgatgcctggtaaggttattggaagtgaaatatcacaagatcttacagtttgttgtgagataaggtaggatttggtgaggagtaacaaatactagcagatttcggcccaaacttcaattatagctaaacattactggaaaaaaccccacaacctactttatgtaacatataactactcacacacatacacaaaaataatacacacacaatttcagcaaacacaaataataatttaaagaaacaaattcaaaattagagccaggtatggtggcacatgcctgaaatcccagctacttgggaggatccctgaagacgagaagttccaggctgtaatgcgctatgatggctcctgtgacttgccactgcactccagtctggcaacatagccagagtccatctcgttcaaaaacaaaaacaaacaaacaaaaaacggcgaaatgaaggctcagccctcatcaggtttaggtgacagagctagaccctgtctaagaaaaaaaataaaattaaatgaaaattcgttatcagacagtaaagcatgaacccacagtgctggtcaagtcactgcagatctgagtgtgtatcaaggtttaactccataagatgaaaagcaggcaatgaatctttggcctgggtgttgacagtctaggctcaagcctcagctttcccactcattagcttgctgaccttggacaagtcacttatattctctgaacttactcatgaaacggagatacatttcatctgcctctcgcaagaaaaagtcctggtaaatacacattagcatttccgttttacacagaacactgacagatactttcctaagatcatggagttaataaccaccagaacctagactcaatacttatggaacttcaaatctcatgcttttctcattgcacttatgattactccattatgtaggagcaagggagagttgagagcatttgaagaggttatgcaaaggaccagctctgaggagtaggcttagcaaagtaacatgagggaaggtaacaccgttcatctgtgtagcggagtgggagccaagagacaaggagaaagtttcatgttcgtcatgtgtctcggatattccggtttctgcagggacgagaacgcgcagtttcgcctccatcccttgacctccaacacagcttctccactggatcatcggtggcgatgaaggggcggctggggaaggatgtcagagaaaccagaagcttgacggtgaatcctcgggttttaaggagagagcaaagtcctgagagggcgacgtattgtccctgctcacctagcccagaatgaacaaacacgcgccagccagggagcagcgagccgagaattcggacgagcctctgcaaccgccatttgccgttctcgcaaagactaccaagaccacaatgcaacggggcgccgagctaattcccagtgagcagcaggcgaggcgccaccgacgcggaagactataagccccagcgggcgacgaccgaacgcccccgggaacaccgggccccgagctcggtcccgcgcccgaggatcctccacggggctagatggctgcgtcgggggcgggagcggaggtgagcgggcgctagggccgcgagcccccgccggcccttcctccagcgccctgcggaccccgcagaaggcgctcgcctccctagcccgcaaaaacatatcgatttttctcgctgtggcaacggggacgtcctgatagatcctctgctccaataggcaactccggccttccctgccctgacctggaacctctgggagggctgcagagtaagtgccgcctctgcgctccgacggaggcacgaggcctgtggagtaggtccctctgttccgacaggtgcgacacttggcgctccatgcttgcgggtgccgggaggcctggcctcccccagggccgccacctctgctggttgctctgtgctttcaccttaaagctctgccaagcagaggctcccgtgcaggaagagaagctgtcaggtgggtgattgtctgggaacccgacacgtcccgtcgtttgtttttggttttagtatcttccccatataccaagagcacaggtggaaaaggccggcaccacatggaatgagggcaagcgctgtgccgggaagttggatgggcagagcctgggagaaatgttttctgaatggcctggggctggcatttatctttcctttcagcaagcacctcaaatttgccatgctggctggtggaagagtttgtggtagcagaagagtgctctccatgctctaatttccgggctaaaactacccctgagtgtggtcccacaggatatgtagagaaaatcacatgcagctcatctaagagaaatgagttcaaaagctgccgctcagctttgatggaacaacgcttattttggaagttcgaaggggctgtcgtgtgtgtggccctgatcttcgcttgtcttgtcatcattcgtcagcgacaattggacagaaaggctctggaaaaggtccggaagcaaatcgagtccatatagctacattccacccttgtatcctgggtcttagagaccctatctcagacagtgaaagtgaaatggactgatttgcactcttggttctttggagccttgtggtggaatccccttttccccatcttcttctttcagatcattaatgagcagaataaaaagagtaaaatgg

SEQ ID NO: 368191 - DNA, 2674 bp, Homo sapiens
taccttatggcagatatttaatttcagagtagagaccccactctgatgcctggtaaggttattggaagtgaaatatcacaagatcttacagtttgttgtgagataaggtaggatttggtgaggagtaacaaatactagcagatttcggcccaaacttcaattatagctaaacattactggaaaaaaccccacaacctactttatgtaacatataactactcacacacatacacaaaaataatacacacacaatttcagcaaacacaaataataatttaaagaaacaaattcaaaattagagccaggtatggtggcacatgcctgaaatcccagctacttgggaggatccctgaagacgagaagttccaggctgtaatgcgctatgatggctcctgtgacttgccactgcactccagtctggcaacatagccagagtccatctcgttcaaaaacaaaaacaaacaaacaaaaaacggcgaaatgaaggctcagccctcatcaggtttaggtgacagagctagaccctgtctaagaaaaaaaataaaattaaatgaaaattcgttatcagacagtaaagcatgaacccacagtgctggtcaagtcactgcagatctgagtgtgtatcaaggtttaactccataagatgaaaagcaggcaatgaatctttggcctgggtgttgacagtctaggctcaagcctcagctttcccactcattagcttgctgaccttggacaagtcacttatattctctgaacttactcatgaaacggagatacatttcatctgcctctcgcaagaaaaagtcctggtaaatacacattagcatttccgttttacacagaacactgacagatactttcctaagatcatggagttaataaccaccagaacctagactcaatacttatggaacttcaaatctcatgcttttctcattgcacttatgattactccattatgtaggagcaagggagagttgagagcatttgaagaggttatgcaaaggaccagctctgaggagtaggcttagcaaagtaacatgagggaaggtaacaccgttcatctgtgtagcggagtgggagccaagagacaaggagaaagtttcatgttcgtcatgtgtctcggatattccggtttctgcagggacgagaacgcgcagtttcgcctccatcccttgacctccaacacagcttctccactggatcatcggtggcgatgaaggggcggctggggaaggatgtcagagaaaccagaagcttgacggtgaatcctcgggttttaaggagagagcaaagtcctgagagggcgacgtattgtccctgctcacctagcccagaatgaacaaacacgcgccagccagggagcagcgagccgagaattcggacgagcctctgcaaccgccatttgccgttctcgcaaagactaccaagaccacaatgcaacggggcgccgagctaattcccagtgagcagcaggcgaggcgccaccgacgcggaagactataagccccagcgggcgacgaccgaacgcccccgggaacaccgggccccgagctcggtcccgcgcccgaggatcctccacggggctagatggctgcgtcgggggcgggagcggaggtgagcgggcgctagggccgcgagcccccgccggcccttcctccagcgccctgcggaccccgcagaaggcgctcgcctccctagcccgcaaaaacatatcgatttttctcgctgtggcaacggggacgtcctgatagatcctctgctccaataggcaactccggccttccctgccctgacctggaacctctgggagggctgcagagtaagtgccgcctctgcgctccgacggaggcacgaggcctgtggagtaggtccctctgttccgacaggtgcgacacttggcgctccatgcttgcgggtgccgggaggcctggcctcccccagggccgccacctctgctggttgctctgtgctttcaccttaaagctctgccaagcagaggctcccgtgcaggaagagaagctgtcagcaagcacctcaaatttgccatgctggctggtggaagagtttgtggtagcagaagagtgctctccatgctctaatttccgggctaaaactacccctgagtgtggtcccacaggatatgtagagaaaatcacatgcagctcatctaagagaaatgagttcaaaagctgccgctcagctttgatggaacaacgcttattttggaagttcgaaggggctgtcgtgtgtgtggccctgatcttcgcttgtcttgtcatcattcgtcagcgacaattggacagaaaggctctggaaaaggtccggaagcaaatcgagtccatatagctacattccacccttgtatcctgggtcttagagaccctatctcagacagtgaaagtgaaatggactgatttgcactcttggttctttggagccttgtggtggaatccccttttccccatcttcttctttcagatcattaatgagcagaataaaaagagtaaaatggtaaaaaaaaaacaatccaaaaaaaacgggggcggttaaaagaatcctggggggccaagtttagggaaccaaggttcttggaaagtgggccctataggggggatataaaaggaggaggacgggttaaaaaggtggggtgggaaacggattgggatttgga

SEQ ID NO: 368192 - DNA, 2732 bp, Homo sapiens
taccttatggcagatatttaatttcagagtagagaccccactctgatgcctggtaaggttattggaagtgaaatatcacaagatcttacagtttgttgtgagataaggtaggatttggtgaggagtaacaaatactagcagatttcggcccaaacttcaattatagctaaacattactggaaaaaaccccacaacctactttatgtaacatataactactcacacacatacacaaaaataatacacacacaatttcagcaaacacaaataataatttaaagaaacaaattcaaaattagagccaggtatggtggcacatgcctgaaatcccagctacttgggaggatccctgaagacgagaagttccaggctgtaatgcgctatgatggctcctgtgacttgccactgcactccagtctggcaacatagccagagtccatctcgttcaaaaacaaaaacaaacaaacaaaaaacggcgaaatgaaggctcagccctcatcaggtttaggtgacagagctagaccctgtctaagaaaaaaaataaaattaaatgaaaattcgttatcagacagtaaagcatgaacccacagtgctggtcaagtcactgcagatctgagtgtgtatcaaggtttaactccataagatgaaaagcaggcaatgaatctttggcctgggtgttgacagtctaggctcaagcctcagctttcccactcattagcttgctgaccttggacaagtcacttatattctctgaacttactcatgaaacggagatacatttcatctgcctctcgcaagaaaaagtcctggtaaatacacattagcatttccgttttacacagaacactgacagatactttcctaagatcatggagttaataaccaccagaacctagactcaatacttatggaacttcaaatctcatgcttttctcattgcacttatgattactccattatgtaggagcaagggagagttgagagcatttgaagaggttatgcaaaggaccagctctgaggagtaggcttagcaaagtaacatgagggaaggtaacaccgttcatctgtgtagcggagtgggagccaagagacaaggagaaagtttcatgttcgtcatgtgtctcggatattccggtttctgcagggacgagaacgcgcagtttcgcctccatcccttgacctccaacacagcttctccactggatcatcggtggcgatgaaggggcggctggggaaggatgtcagagaaaccagaagcttgacggtgaatcctcgggttttaaggagagagcaaagtcctgagagggcgacgtattgtccctgctcacctagcccagaatgaacaaacacgcgccagccagggagcagcgagccgagaattcggacgagcctctgcaaccgccatttgccgttctcgcaaagactaccaagaccacaatgcaacggggcgccgagctaattcccagtgagcagcaggcgaggcgccaccgacgcggaagactataagccccagcgggcgacgaccgaacgcccccgggaacaccgggccccgagctcggtcccgcgcccgaggatcctccacggggctagatggctgcgtcgggggcgggagcggaggtgagcgggcgctagggccgcgagcccccgccggcccttcctccagcgccctgcggaccccgcagaaggcgctcgcctccctagcccgcaaaaacatatcgatttttctcgctgtggcaacggggacgtcctgatagatcctctgctccaataggcaactccggccttccctgccctgacctggaacctctgggagggctgcagagtaagtgccgcctctgcgctccgacggaggcacgaggcctgtggagtaggtccctctgttccgacaggtgcgacacttggcgctccatgcttgcgggtgccgggaggcctggcctcccccagggccgccacctctgctggttgctctgtgctttcaccttaaagctctgccaagcagaggctcccgtgcaggaagagaagctgtcagcaagcacctcaaatttgccatgctggctggtggaagagtttgtggtagcagaagagtgctctccatgctctaatttccgggctaaaactacccctgagtgtggtcccacaggatatgtagagaaaatcacatgcagctcatctaagagaaatgagttcaaaagctgccgctcagctttgatggaacaacgcttattttggaagttcgaaggggctgtcgtgtgtgtggccctgatcttcgcttgtcttgtcatcattcgtcagcgacaattggacagaaaggctctggaaaaggtccggaagcaaatcgagtccatatagctacattccacccttgtatcctgggtcttagagaccctatctcagacagtgaaagtgaaatggactgatttgcactcttggttctttggagccttgtggtggaatccccttttccccatcttcttctttcagatcattaatgagcagaataaaaagagtaaaatggaaaaaaaaaaaaaaaaaaaaaaaataaaaaaacagaagagaaataatggggggggggaaaaggagggtactggaatggggcccatggggcataaggtggtatcattggaccagagttttctctggtaccaaaggggggaagatttctggcgggtctacacttataagagagtcggtataaaattgcagaaaagccagggttacgctgctttatacgg

SEQ ID NO: 368193 - DNA, 3142 bp, Homo sapiens
taccttatggcagatatttaatttcagagtagagaccccactctgatgcctggtaaggttattggaagtgaaatatcacaagatcttacagtttgttgtgagataaggtaggatttggtgaggagtaacaaatactagcagatttcggcccaaacttcaattatagctaaacattactggaaaaaaccccacaacctactttatgtaacatataactactcacacacatacacaaaaataatacacacacaatttcagcaaacacaaataataatttaaagaaacaaattcaaaattagagccaggtatggtggcacatgcctgaaatcccagctacttgggaggatccctgaagacgagaagttccaggctgtaatgcgctatgatggctcctgtgacttgccactgcactccagtctggcaacatagccagagtccatctcgttcaaaaacaaaaacaaacaaacaaaaaacggcgaaatgaaggctcagccctcatcaggtttaggtgacagagctagaccctgtctaagaaaaaaaataaaattaaatgaaaattcgttatcagacagtaaagcatgaacccacagtgctggtcaagtcactgcagatctgagtgtgtatcaaggtttaactccataagatgaaaagcaggcaatgaatctttggcctgggtgttgacagtctaggctcaagcctcagctttcccactcattagcttgctgaccttggacaagtcacttatattctctgaacttactcatgaaacggagatacatttcatctgcctctcgcaagaaaaagtcctggtaaatacacattagcatttccgttttacacagaacactgacagatactttcctaagatcatggagttaataaccaccagaacctagactcaatacttatggaacttcaaatctcatgcttttctcattgcacttatgattactccattatgtaggagcaagggagagttgagagcatttgaagaggttatgcaaaggaccagctctgaggagtaggcttagcaaagtaacatgagggaaggtaacaccgttcatctgtgtagcggagtgggagccaagagacaaggagaaagtttcatgttcgtcatgtgtctcggatattccggtttctgcagggacgagaacgcgcagtttcgcctccatcccttgacctccaacacagcttctccactggatcatcggtggcgatgaaggggcggctggggaaggatgtcagagaaaccagaagcttgacggtgaatcctcgggttttaaggagagagcaaagtcctgagagggcgacgtattgtccctgctcacctagcccagaatgaacaaacacgcgccagccagggagcagcgagccgagaattcggacgagcctctgcaaccgccatttgccgttctcgcaaagactaccaagaccacaatgcaacggggcgccgagctaattcccagtgagcagcaggcgaggcgccaccgacgcggaagactataagccccagcgggcgacgaccgaacgcccccgggaacaccgggccccgagctcggtcccgcgcccgaggatcctccacggggctagatggctgcgtcgggggcgggagcggaggtgagcgggcgctagggccgcgagcccccgccggcccttcctccagcgccctgcggaccccgcagaaggcgctcgcctccctagcccgcaaaaacatatcgatttttctcgctgtggcaacggggacgtcctgatagatcctctgctccaataggcaactccggccttccctgccctgacctggaacctctgggagggctgcagagtaagtgccgcctctgcgctccgacggaggcacgaggcctgtggagtaggtccctctgttccgacaggtgcgacacttggcgctccatgcttgcgggtgccgggaggcctggcctcccccagggccgccacctctgctggttgctctgtgctttcaccttaaagctctgccaagcagaggctcccgtgcaggaagagaagctgtcagcaagcacctcaaatttgccatgctggctggtggaagagtttgtggtagcagaagagtgctctccatgctctaatttccgggctaaaactacccctgagtgtggtcccacaggatatgtagagaaaatcacatgcagctcatctaagagaaatgagttcaaaagctgccgctcagctttgatggaacaacgcttattttggaagttcgaaggggctgtcgtgtgtgtggccctgatcttcgcttgtcttgtcatcattcgtcagcgacaattggacagaaaggctctggaaaaggtccggaagcaaatcgagtccatatagctacattccacccttgtatcctgggtcttagagaccctatctcagacagtgaaagtgaaatggactgatttgcactcttggttctttggagccttgtggtggaatccccttttccccatcttcttctttcagatcattaatgagcagaataaaaagagtaaaatggtttccttcccttctgtaacttggagcaggaagtcatgggggcagagagggaaaggaggtggttacttaaggccccaatctaccaagtcttccccaccacttctcccttgttttccccctcttctactacttatttcaaacttctgggatacaatttcagctaaaacgtttatttctcactcaaaacttatttcccctcaaccctatacccaaagaagaaataaaatcacagatacataacagaagtatttgaggtaccctctcatatatgcaaacaaatgcagactaggcctcaggcagagactaaaggacatctcttggggtgtcctgaagtgatttggacccctgagggcagacacctaagtaggaatcccagtgggaagcaaagccataaggaagcccaggattccttgtgatcaggaagtgggccaggaaggtctgttccagctcacatctcatctgcatgcagcacggaccggatgcgcccactgggtcttggcttccctcccatcttctcaagcagtgtccttgttgagccatttgcatccttggctccaggtggctccctcagtctggactctaccacttgggtctccagattttctgttacgtccttgtgggtcaggat

SEQ ID NO: 368194 - DNA, 2081 bp, Homo sapiens
  misc_feature (86)..(86): n is a, c, g, or t
ggtggtgtgagacgttgtgtagtgtgttgggtgggtggtggtgctgtggggtgtgtgtgtgggtgttggggcgagttgttttgtanaaaaaaaatataacaaaaatgaggcaggaggattgtttcccgagagcgctgacaagcaccgattgcccctcgtgctgcgcttagatttttgagctgtccgcgagcatccccggggagccccatcgagttacagttacccaagtgaaccgcagattttgcctgggtgacattaaggcaaacccaggttccactcattagcttgctgaccttggacaagtcacttatattctctgaacttactcatgaaacggagatacatttcatctgcctctcgcaagaaaaagtcctggtaaatacacattagcatttccgttttacacagaacactgacagatactttcctaagatcatggagttaataaccaccagaacctagactcaatacttatggaacttcaaatctcatgcttttctcattgcacttatgattactccattatgtaggagcaagggagagttgagagcatttgaagaggttatgcaaaggaccagctctgaggagtaggcttagcaaagtaacatgagggaaggtaacaccgttcatctgtgtagcggagtgggagccaagagacaaggagaaagtttcatgttcgtcatgtgtctcggatattccggtttctgcagggacgagaacgcgcagtttcgcctccatcccttgacctccaacacagcttctccactggatcatcggtggcgatgaaggggcggctggggaaggatgtcagagaaaccagaagcttgacggtgaatcctcgggttttaaggagagagcaaagtcctgagagggcgacgtattgtccctgctcacctagcccagaatgaacaaacacgcgccagccagggagcagcgagccgagaattcggacgagcctctgcaaccgccatttgccgttctcgcaaagactaccaagaccacaatgcaacggggcgccgagctaattcccagtgagcagcaggcgaggcgccaccgacgcggaagactataagccccagcgggcgacgaccgaacgcccccgggaacaccgggccccgagctcggtcccgcgcccgaggatcctccacggggctagatggctgcgtcgggggcgggagcggaggtgagcgggcgctagggccgcgagcccccgccggcccttcctccagcgccctgcggaccccgcagaaggcgctcgcctccctagcccgcaaaaacatatcgatttttctcgctgtggcaacggggacgtcctgatagatcctctgctccaataggcaactccggccttccctgccctgacctggaacctctgggagggctgcagagtaagtgccgcctctgcgctccgacggaggcacgaggcctgtggagtaggtccctctgttccgacaggtgcgacacttggcgctccatgcttgcgggtgccgggaggcctggcctcccccagggccgccacctctgctggttgctctgtgctttcaccttaaagctctgccaagcagaggctcccgtgcaggaagagaagctgtcagcaagcacctcaaatttgccatgctggctggtggaagagtttgtggtagcagaagagtgctctccatgctctaatttccgggctaaaactacccctgagtgtggtcccacaggatatgtagagaaaatcacatgcagctcatctaagagaaatgagttcaaaagctgccgctcagctttgatggaacaacgcttattttggaagttcgaaggggctgtcgtgtgtgtggccctgatcttcgcttgtcttgtcatcattcgtcagcgacaattggacagaaaggctctggaaaaggtccggaagcaaatcgagtccatatagctacattccacccttgtatcctgggtcttagagaccctatctcagacagtgaaagtgaaatggactgatttgcactcttggttctttggagccttgtggtggaatccccttttccccatcttcttctttcagatcattaatgagcagaataaaaagagtaaaatgg

SEQ ID NO: 368195 - DNA, 453 bp, Homo sapiens
cttaacaaatctgtccattgttcagagggttgattttctttctatttaatgcttttgcaacccaggacaacagttagcagccatcactgcctgggattcctcagctaccaatattacctctcatattacagtagtaaccccgtttggtgggtaataggctgttcttcctcttcttttataattttatttaagaaatagtttataaaagtatgctccatgtgcatgttgcttttactttatgtaaattgctacataaaatttgattgcttgcatttttataaattatagttacagagtttgttatgattcatagatctgtttatgaacttgaatttaaatttgcaattcagtaaaagatagggtgagcaaataaaggtatgagtaggcctattttagacttggaaattgatgtgtgctctgaattttcagattaaaagtgattaatgaacatta

SEQ ID NO: 368196 - DNA, 486 bp, Homo sapiens
actatcataatttacttgtggcttaaattgttccagctttagccattgggctccttttgagattggctcctgtatccttttgatatatcccaccttttcttctgattttttactttgtctttcttgtcttcagactcagccatttcttcaaggaaccctggttccttttggagaatggtatttggaaaccaagatctggatgttacatgtgcacattactattgtattgttgcttctaggctctcactggacagagctaagaaaaatatgtgtacatactaacccatgagaatagacatactcatgtttatttatttatttatttatttatttaatttttgcttttgagacagggtctggctctctttcctatgctgtagtgcagtggcatgatcatagctcactgcagcctcaacctcctgggttcaagccatcttcctgcctcagcctcccaagtagctgggactatatgcatgtgccactgta

SEQ ID NO: 368197 - DNA, 164 bp, Homo sapiens
caaaagtcttaactcattccaaatgtaaaaacttcaaagtctcatctgagacaaggctacattctcttctgcctatgagtccctgaattcaaaagggatttcttttctttcaaggtacaatgatggtacaggtattgggtaagctttctcaatccaaagggaaa

SEQ ID NO: 368198 - DNA, 461 bp, Homo sapiens
gtctcctagaagaattggtgcaaaacttgagtctcaaaggatgagctgggtgaggagttgggcacagtattctgggcagtgggaacatcatggacagaagcctgaatgcagcggagagactgactcacttgtgggcatgaaggagatcagcatgactggattggagctcacttcctggtgttttcacctcattgcatccctggttggtttctgttgcttgcaatgaaagaacccttacaaatgcaataatgcagaagtaacaatgaagatgacactgattcacacaagatttaatttgttacatgagtaaataaacaaagcaaaatgaacagaatttactatactgcatccctgctgggagtatgttgagctatctggcctggaaggcctttgtgacctgttgaaagaatatacatggatttacttcaggagaaaaataaagtgttattttaaaaatggat

SEQ ID NO: 368199 - DNA, 2786 bp, Homo sapiens
accattcttgctggtagccatcttgagtgagggcggaccagaggatgagagagctgtggcagggctactggaacgctgtccctcattgttttagccttctgtgcttcatctcgagctcagaagactagcgaagaacgaaaagtcttatatatttcgagactaaagaacccaggaacccaagaagactccttgaccacaacaaagatggcgaaatctgcctgttgctcgtgctagattgaggttacgtagattggcgtgctgcaaaccagctctaggcggctctgggatcttcagcctgttaaacaagaaaacgaaaaaccccttccagaaaacatggatgcatttgaaaaagtgagaacaaaattagaaacacagccacaagaagaatatgaaatcatcaatgtggaagttaaacatggtggttttgtttattaccaagaaggttgttgcttggttcgttccaaagatgaagaagcagacaatgataattatgaagttttattcaatttggaggaacttaagttagaccagcccttcattgattgtatcagagttgctccagatgaaaaatatgtggctgccaagataagaactgaagattctgaagcatctacctgtgtaattataaagctcagcgatcagcccgtaatggaagcttctttcccgaatgtgtccagttttgaatgggtaaaggacgaggaagatgaagatgttttattctacaccttccagaggaaccttcgctgtcatgacgtatatcgagccacttttggtgataacaaacgtaatgaacgcttttacacagaaaaagacccaagctactttgttttcctttatcttacaaaagacagtcgtttcctcaccataaatattatgaacaagactacttctgaagtgtggttgatagatggcctgagcccttgggacccaccagtacttatccagaagcgaatacatggggtcctttactatgttgaacacagagatgatgaattatacattctcactaatgttggagaacctacagaatttaagctaatgagaacagcggctgatacccctgcaattatgaattgggatttattttttacaatgaagagaaatacaaaagtgatagacttggacatgtttaaggatcactgtgttctatttctgaagcacagcaatctcctttatgttaatgtgattggtctggctgatgattcagttcggtctctaaagctccctccttgggcctgtggattcataatggatacaaattctgacccaaagaactgcccctttcaactttgctctccaatacgtcccccaaaatattacacatacaagtttgcagaaggcaaactgtttgaggaaactgggcatgaagacccaatcacaaagactagtcgcgttttacgtctagaagccaaaagcaaggatggaaaattagtgccaatgactgttttccacaaaactgactctgaggacttgcagaagaaacctctcttggtacatgtatatggagcttatggaatggatttgaaaatgaatttcaggcctgagaggcgggtcctggtggatgatggatggatattagcatactgccatgttcgaggtggtggtgagttaggcctccagtggcacgctgatggccgcctaactaaaaaactcaatggccttgctgatttagaggcttgcattaagacgcttcatggccaaggcttttctcagccaagtctaacaaccctgactgctttcagtgctggaggggtgcttgcaggagcattgtgtaattctaatccagagctggtgagagcggtgactttggaggcacctttcttggatgttctcaacaccatgatggacactacacttcctctgacattagaagaattagaagaatgggggaatccttcatctgatgaaaaacacaagaactacataaaacgttactgtccctatcaaaatattaaacctcagcattatccttcaattcacataacggcatatgaaaacgatgaacgggtacctctgaaaggaattgtaagttatactgagaaactcaaggaagccatcgcggagcatgctaaggacacaggtgaaggctatcagacccctaatattattctagatattcagcctggaggcaatcatgtaattgaggattctcacaaaaagattacagcccaaattaaattcctgtacgaggaacttggacttgacagcaccagtgttttcgaggatcttaagaaatacctgaaattctgaaacactgcattcaactgggaattggaaacacactgaaatatttcatagtcttacttccaattgagttagcaaaaaaaaaattaataacttgagacttttaagttattaattttttaaaatgtgcttctccatctaaattttgcttagtctacatctcacttgcttatactattctctccattgatgcacatgcccattaacctaggaaagtagttttcaaatcatgctccttagaaggatgtggagtagagggaagggaaggattggtgatagcagagctccaggcctcccttccagtcagaacagttgagcagtttacaaattagtgtcctgcctctttgctagcaaatgcttttagacactgtggcagtgagtcatcctctaatttctatgactgcattttaagggaaaagataaaattcttccccttaaaattcgttaaagtttttgaataatctggggtcctaatgtgttctggtcatccctgattgatgctatctgaataaagttataagctcctataagccataatttac

SEQ ID NO: 368200 - DNA, 332 bp, Homo sapiens
tttgtggaagacttccataatgacattcagcggtgtgcaacatacctagattattcctgtcgtaaataatagcaactgccatttattgagtggtcactatgtgccaggcactgtatggtcttaatgttaagctgtctcattttgtctttacaacaacaaccctagaaggtaaatggtgtcatttcatttttgcagatgaagaaactgaggcccggagacacagttaagtgtaggagctaagacctcaacccaggtctctctgactcttaactacttattagcaatcaaggttaataaaagctacctcctgacaaaccagagatggccttaca

SEQ ID NO: 368201 - DNA, 4789 bp, Homo sapiens
accattcttgctggtagccatcttgagtgagggcggaccagaggatgagagagctgtggcagggctactggaacgctgtccctcattgttttagccttctgtgcttcatctcgagctcagaagactagcgaagaacgaaaagtcttatatatttcgagactaaagaacccaggaacccaagaagactccttgaccacaacaaagatggcgaaatctgcctgttgctcgtgctagattgaggttacgtagattggcgtgctgcaaaccagctctaggcggctctgggtaagttgtcgttctgtgggctgcggaacgcagacttcggctggacttgcctgcggtgacacctgctcccctctgagagcttcaggttctccggcctgccttcactggtttgtgtccagagccggactgattctctcaatttgcgatcttcagcctgttaaacaagaaaacgaaaaaccccttccagaaaacatggatgcatttgaaaaagtgagaacaaaattagaaacacagccacaagaagaatatgaaatcatcaatgtggaagttaaacatggtggttttgtttattaccaagaaggttgttgcttggttcgttccaaagatgaagaagcagacaatgataattatgaagttttattcaatttggaggaacttaagttagaccagcccttcattgattgtatcagagttgctccagatgaaaaatatgtggctgccaagataagaactgaagattctgaagcatctacctgtgtaattataaagctcagcgatcagcccgtaatggaagcttctttcccgaatgtgtccagttttgaatgggtaaaggacgaggaagatgaagatgttttattctacaccttccagaggaaccttcgctgtcatgacgtatatcgagccacttttggtgataacaaacgtaatgaacgcttttacacagaaaaagacccaagctactttgttttcctttatcttacaaaagacagtcgtttcctcaccataaatattatgaacaagactacttctgaagtgtggttgatagatggcctgagcccttgggacccaccagtacttatccagaagcgaatacatggggtcctttactatgttgaacacagagatgatgaattatacattctcactaatgttggagaacctacagaatttaagctaatgagaacagcggctgatacccctgcaattatgaattgggatttattttttacaatgaagagaaatacaaaagtgatagacttggacatgtttaaggatcactgtgttctatttctgaagcacagcaatctcctttatgttaatgtgattggtctggctgatgattcagttcggtctctaaaggatggaaaattagtgccaatgactgttttccacaaaactgactctgaggacttgcagaagaaacctctcttggtacatgtatatggagcttatggaatggatttgaaaatgaatttcaggcctgagaggcgggtcctggtggatgatggatggatattagcatactgccatgttcgaggtggtggtgagttaggcctccagtggcacgctgatggccgcctaactaaaaaactcaatggccttgctgatttagaggcttgcattaagacgcttcatggccaaggcttttctcagccaagtctaacaaccctgactgctttcagtgctggaggggtgcttgcaggagcattgtgtaattctaatccagagctggtgagagcggtgactttggaggcacctttcttggatgttctcaacaccatgatggacactacacttcctctgacattagaagaattagaagaatgggggaatccttcatctgatgaaaaacacaagaactacataaaacgttactgtccctatcaaaatattaaacctcagcattatccttcaattcacataacggcatatgaaaacgatgaacgggtacctctgaaaggaattgtaagttatactgagaaactcaaggaagccatcgcggagcatgctaaggacacaggtgaaggctatcagacccctaatattattctagatattcagcctggaggcaatcatgtaattgaggattctcacaaaaagattacagcccaaattaaattcctgtacgaggaacttggacttgacagcaccagtgttttcgaggatcttaagaaatacctgaaattctgaaacactgcattcaactgggaattggaaacacactgaaatatttcatagtcttacttccaattgagttagcaaaaaaaaaattaataacttgagacttttaagttattaattttttaaaatgtgcttctccatctaaattttgcttagtctacatctcacttgcttatactattctctccattgatgcacatgcccattaacctaggaaagtagttttcaaatcatgctccttagaaggatgtggagtagagggaagggaaggattggtgatagcagagctccaggcctcccttccagtcagaacagttgagcagtttacaaattagtgtcctgcctctttgctagcaaatgcttttagacactgtggcagtgagtcatcctctaatttctatgactgcattttaagggaaaagataaaattcttccccttaaaattcgttaaagtttttgaataatctggggtcctaatgtgttctggtcatccctgattgatgctatctgaataaagttataagctcctataagccataatttacttttaaacattttatttttttcaaaacatttgagaacctttcttaaagcggttacattcaagctacagaaatatcgaagaattaatgattgttcaccaagcagcatgctgtacatgaagctattacaaatgcttacaatcccactgaaatgccagtgtcttcatctcttcataaaggtgcctaacacgaggtatacagtatgttcagtacactggaatagcatgctcgattggaaacaaagcatctatctctgaaagctgtttggcgatgaaggagattcttcgtgttgtgttcaaagatgagtccctctcccttgtccagaaaaatgccacttgtatcaactttactgcctttgtcggcagaattggtacttaaccttattcttattttagcgggaaggcccgaaatcatattatgtagatttaacagtgttgattctccaaaattcagaaccacgataaagattctgtcgatgccatccagctctcttgtgtacacaacatagtggctgtcattcctcaaatggcaaaaccagcccctgttgaggagtagctcattggcatgaagtagacttaaatcttgatataacttcaaagccgatctgggctgagtcttttggacctatttttttaaaaaagtatttacgtaagtgtttgattctaagaattgtttgtaagtatttttaatatattgtaaggagttatttacccaaaacacttgctccaattttgccccttataattgccaaattgtaagcatcaataagtaggtaagaacaatttatataaaaactgatagaaatgacaaattcggggtttcggcttgtccgggagtcaataagtacgcacagtgctctgctacattgtagagtttctgtagagatcaaatttgactccactttaggagtcccaaagcaaatgtccatgtctaagatgaatatttaacttgcatagtcattctgtgctatattgtaactgccagatggccagaaagaaggcaacagtggactcagacttctgaggaatttgggtttgttcccctttgtagactaatgtgtaggttgctgttgtgcgaagatcgtgtaactttagcagacatgtatttcttgcacagctaatagaagacaaagttgaaaaaaaggatgcaaaataaaaagctgcctaaggtgaaagttagaaattgtagacttttttttaccataatagtatgtgttcattgaagatgatttgggtttattttacagctatataaaacataatttgatgatgtacttctaacctttcaagcattttctgttattgactatataatatagcctccataaatgtttttaatgacaatattctgttgaacggttgtaccatactcagccatgccctttcattttgacgatagtgtttctaatattttgtatttttattcccctccccccatttttgtattacttaagatagattatcagaaagacagttactttgtcaaagagtatgggcacttgatacataatgccaaattattcttcataagagctgttgccaaatcagtgataatgttcatttaattgtattcttgccagccatgtttactggggtgatagttgttattgtggttgttattgttctttaggggtaggttcccaatatgtggtctttaaataattatctaatggtgtttaaaaagatgtttattctgtttgtcaggtacaaagatatttatgatacatgtatgacttgtctaagttattaacattttctctagccttaggtaatgcatgaaagcacatgtttcagtgccactcacataagaagtgcccggtaagtgttagctattattgtctacttgagttactactttctaaaagtatgttgaagtctttttctgtaattgcagatttgttgattttgcatttgagtattttctatattttgaagctgttagatgcatagtcatgatttttggtggaatgttttatcaatttttgaaaattgcctttgtctcatataatgcttttcatattgaactatattttgtctgctattaaatacttccaagcctga

SEQ ID NO: 368202 - DNA, 4950 bp, Homo sapiens
accattcttgctggtagccatcttgagtgagggcggaccagaggatgagagagctgtggcagggctactggaacgctgtccctcattgttttagccttctgtgcttcatctcgagctcagaagactagcgaagaacgaaaagtcttatatatttcgagactaaagaacccaggaacccaagaagactccttgaccacaacaaagatggcgaaatctgcctgttgctcgtgctagattgaggttacgtagattggcgtgctgcaaaccagctctaggcggctctgggtaagttgtcgttctgtgggctgcggaacgcagacttcggctggacttgcctgcggtgacacctgctcccctctgagagcttcaggttctccggcctgccttcactggatcttcagcctgttaaacaagaaaacgaaaaaccccttccagaaaacatggatgcatttgaaaaagtgagaacaaaattagaaacacagccacaagaagaatatgaaatcatcaatgtggaagttaaacatggtggttttgtttattaccaagaaggttgttgcttggttcgttccaaagatgaagaagcagacaatgataattatgaagttttattcaatttggaggaacttaagttagaccagcccttcattgattgtatcagagttgctccagatgaaaaatatgtggctgccaagataagaactgaagattctgaagcatctacctgtgtaattataaagctcagcgatcagcccgtaatggaagcttctttcccgaatgtgtccagttttgaatgggtaaaggacgaggaagatgaagatgttttattctacaccttccagaggaaccttcgctgtcatgacgtatatcgagccacttttggtgataacaaacgtaatgaacgcttttacacagaaaaagacccaagctactttgttttcctttatcttacaaaagacagtcgtttcctcaccataaatattatgaacaagactacttctgaagtgtggttgatagatggcctgagcccttgggacccaccagtacttatccagaagcgaatacatggggtcctttactatgttgaacacagagatgatgaattatacattctcactaatgttggagaacctacagaatttaagctaatgagaacagcggctgatacccctgcaattatgaattgggatttattttttacaatgaagagaaatacaaaagtgatagacttggacatgtttaaggatcactgtgttctatttctgaagcacagcaatctcctttatgttaatgtgattggtctggctgatgattcagttcggtctctaaagctccctccttgggcctgtggattcataatggatacaaattctgacccaaagaactgcccctttcaactttgctctccaatacgtcccccaaaatattacacatacaagtttgcagaaggcaaactgtttgaggaaactgggcatgaagacccaatcacaaagactagtcgcgttttacgtctagaagccaaaagcaaggatggaaaattagtgccaatgactgttttccacaaaactgactctgaggacttgcagaagaaacctctcttggtacatgtatatggagcttatggaatggatttgaaaatgaatttcaggcctgagaggcgggtcctggtggatgatggatggatattagcatactgccatgttcgaggtggtggtgagttaggcctccagtggcacgctgatggccgcctaactaaaaaactcaatggccttgctgatttagaggcttgcattaagacgcttcatggccaaggcttttctcagccaagtctaacaaccctgactgctttcagtgctggaggggtgcttgcaggagcattgtgtaattctaatccagagctggtgagagcggtgactttggaggcacctttcttggatgttctcaacaccatgatggacactacacttcctctgacattagaagaattagaagaatgggggaatccttcatctgatgaaaaacacaagaactacataaaacgttactgtccctatcaaaatattaaacctcagcattatccttcaattcacataacggcatatgaaaacgatgaacgggtacctctgaaaggaattgtaagttatactgagaaactcaaggaagccatcgcggagcatgctaaggacacaggtgaaggctatcagacccctaatattattctagatattcagcctggaggcaatcatgtaattgaggattctcacaaaaagattacagcccaaattaaattcctgtacgaggaacttggacttgacagcaccagtgttttcgaggatcttaagaaatacctgaaattctgaaacactgcattcaactgggaattggaaacacactgaaatatttcatagtcttacttccaattgagttagcaaaaaaaaaattaataacttgagacttttaagttattaattttttaaaatgtgcttctccatctaaattttgcttagtctacatctcacttgcttatactattctctccattgatgcacatgcccattaacctaggaaagtagttttcaaatcatgctccttagaaggatgtggagtagagggaagggaaggattggtgatagcagagctccaggcctcccttccagtcagaacagttgagcagtttacaaattagtgtcctgcctctttgctagcaaatgcttttagacactgtggcagtgagtcatcctctaatttctatgactgcattttaagggaaaagataaaattcttccccttaaaattcgttaaagtttttgaataatctggggtcctaatgtgttctggtcatccctgattgatgctatctgaataaagttataagctcctataagccataatttacttttaaacattttatttttttcaaaacatttgagaacctttcttaaagcggttacattcaagctacagaaatatcgaagaattaatgattgttcaccaagcagcatgctgtacatgaagctattacaaatgcttacaatcccactgaaatgccagtgtcttcatctcttcataaaggtgcctaacacgaggtatacagtatgttcagtacactggaatagcatgctcgattggaaacaaagcatctatctctgaaagctgtttggcgatgaaggagattcttcgtgttgtgttcaaagatgagtccctctcccttgtccagaaaaatgccacttgtatcaactttactgcctttgtcggcagaattggtacttaaccttattcttattttagcgggaaggcccgaaatcatattatgtagatttaacagtgttgattctccaaaattcagaaccacgataaagattctgtcgatgccatccagctctcttgtgtacacaacatagtggctgtcattcctcaaatggcaaaaccagcccctgttgaggagtagctcattggcatgaagtagacttaaatcttgatataacttcaaagccgatctgggctgagtcttttggacctatttttttaaaaaagtatttacgtaagtgtttgattctaagaattgtttgtaagtatttttaatatattgtaaggagttatttacccaaaacacttgctccaattttgccccttataattgccaaattgtaagcatcaataagtaggtaagaacaatttatataaaaactgatagaaatgacaaattcggggtttcggcttgtccgggagtcaataagtacgcacagtgctctgctacattgtagagtttctgtagagatcaaatttgactccactttaggagtcccaaagcaaatgtccatgtctaagatgaatatttaacttgcatagtcattctgtgctatattgtaactgccagatggccagaaagaaggcaacagtggactcagacttctgaggaatttgggtttgttcccctttgtagactaatgtgtaggttgctgttgtgcgaagatcgtgtaactttagcagacatgtatttcttgcacagctaatagaagacaaagttgaaaaaaaggatgcaaaataaaaagctgcctaaggtgaaagttagaaattgtagacttttttttaccataatagtatgtgttcattgaagatgatttgggtttattttacagctatataaaacataatttgatgatgtacttctaacctttcaagcattttctgttattgactatataatatagcctccataaatgtttttaatgacaatattctgttgaacggttgtaccatactcagccatgccctttcattttgacgatagtgtttctaatattttgtatttttattcccctccccccatttttgtattacttaagatagattatcagaaagacagttactttgtcaaagagtatgggcacttgatacataatgccaaattattcttcataagagctgttgccaaatcagtgataatgttcatttaattgtattcttgccagccatgtttactggggtgatagttgttattgtggttgttattgttctttaggggtaggttcccaatatgtggtctttaaataattatctaatggtgtttaaaaagatgtttattctgtttgtcaggtacaaagatatttatgatacatgtatgacttgtctaagttattaacattttctctagccttaggtaatgcatgaaagcacatgtttcagtgccactcacataagaagtgcccggtaagtgttagctattattgtctacttgagttactactttctaaaagtatgttgaagtctttttctgtaattgcagatttgttgattttgcatttgagtattttctatattttgaagctgttagatgcatagtcatgatttttggtggaatgttttatcaatttttgaaaattgcctttgtctcatataatgcttttcatattgaactatattttgtctgctattaaatacttccaagcctga

SEQ ID NO: 368203 - DNA, 6197 bp, Homo sapiens
accattcttgctggtagccatcttgagtgagggcggaccagaggatgagagagctgtggcagggctactggaacgctgtccctcattgttttagccttctgtgcttcatctcgagctcagaagactagcgaagaacgaaaagtcttatatatttcgagactaaagaacccaggaacccaagaagactccttgaccacaacaaagatggcgaaatctgcctgttgctcgtgctagattgaggttacgtagattggcgtgctgcaaaccagctctaggcggctctgggtaagttgtcgttctgtgggctgcggaacgcagacttcggctggacttgcctgcggtgacacctgctcccctctgagagcttcaggttctccggcctgccttcactggtttgtgtccagagccggactgattctctcaatttgcgatcttcagcctgttaaacaagaaaacgaaaaaccccttccagaaaacatggatgcatttgaaaaagtgagaacaaaattagaaacacagccacaagaagaatatgaaatcatcaatgtggaagttaaacatggtggttttgtttattaccaagaaggttgttgcttggttcgttccaaagatgaagaagcagacaatgataattatgaagttttattcaatttggaggaacttaagttagaccagcccttcattgattgtatcagagttgctccagatgaaaaatatgtggctgccaagataagaactgaagattctgaagcatctacctgtgtaattataaagctcagcgatcagcccgtaatggaagcttctttcccgaatgtgtccagttttgaatgggtaaaggacgaggaagatgaagatgttttattctacaccttccagaggaaccttcgctgtcatgacgtatatcgagccacttttggtgataacaaacgtaatgaacgcttttacacagaaaaagacccaagctactttgttttcctttatcttacaaaagacagtcgtttcctcaccataaatattatgaacaagactacttctgaagtgtggttgatagatggcctgagcccttgggacccaccagtacttatccagaagcgaatacatggggtcctttactatgttgaacacagagatgatgaattatacattctcactaatgttggagaacctacagaatttaagctaatgagaacagcggctgatacccctgcaattatgaattgggatttattttttacaatgaagagaaatacaaaagtgatagacttggacatgtttaaggatcactgtgttctatttctgaagcacagcaatctcctttatgttaatgtgattggtctggctgatgattcagttcggtctctaaagctccctccttgggcctgtggattcataatggatacaaattctgacccaaagaactgcccctttcaactttgctctccaatacgtcccccaaaatattacacatacaagtttgcagaaggcaaactgtttgaggaaactgggcatgaagacccaatcacaaagactagtcgcgttttacgtctagaagccaaaagcaaggatggaaaattagtgccaatgactgttttccacaaaactgactctgaggacttgcagaagaaacctctcttggtacatgtatatggagcttatggaatggatttgaaaatgaatttcaggcctgagaggcgggtcctggtggatgatggatggatattagcatactgccatgttcgaggtggtggtgagttaggcctccagtggcacgctgatggccgcctaactaaaaaactcaatggccttgctgatttagaggcttgcattaagacgcttcatggccaaggcttttctcagccaagtctaacaaccctgactgctttcagtgctggaggggtgcttgcaggagcattgtgtaattctaatccagagctggtgagagcggtgactttggaggcacctttcttggatgttctcaacaccatgatggacactacacttcctctgacattagaagaattagaagaatgggggaatccttcatctgatgaaaaacacaagaactacataaaacgttactgtccctatcaaaatattaaacctcagcattatccttcaattcacataacggcatatgaaaacgatgaacgggtacctctgaaaggaattgtaagttatactgagaaactcaaggaagccatcgcggagcatgctaaggacacaggtgaaggtaggagaccccctagaagcagggaacatggccaaacagactactacccacagcacactgctcagaggaatatatttcaggctgtagccaaatcatctgcccaggatttagggcaaacaattattttgctatgttgactccccagttaaagtgtacgtaactacatgtctatacatacactgcctcacctctttttcaaaggacagtattaaaatagataggcaggacacaaaggaaacaggaaatttaagaatcagatataacttggagatgcactgccatacaattattaattcatttaacaatatttattgagccgttattcttgggaatctctaaaagacagattctgagatttttgttttgggccatcagtgcccaaactgtttagctgcatgaatttcctctagctagctgtttcagctttatgagataagaatccctcccttttgccttgaaactacatgccatatcagtctccctgtattcatctccatttgtcacccccatccattgctgtagttggtgtttccagggcataagactctcagattccacagggcaggttgatgatctcctgggtttcaaccttgtccgtgtggcaccatatagtcttttccatacggcctcttcctgcttttgctgtgtcagaagtttgtcttctgctgcttgtcccctcccatctttttgttgatgatggtggtttttgctttttattcctttactattatttgaactgagtactcaaagaagaggggaggaatgggtctcgatcttccaaagaagatcccatacatcttctaattgttctacatgttaactcttccaggctatcagacccctaatattattctagatattcagcctggaggcaatcatgtaattgaggattctcacaaaaaggtatgttatcaaggccctctcagtggacagattcccgaactagatacatgttgttttcacattttcagtggttgcagcaggtttatgacaaagccacttcacaaatgtcctatctatgggtgagacccaggaggggagggagggacactgtgtcaatcaagagaaatgtctctctcttgtacttgatacgtgagctctgttaaagaaaataatttaatcttaattgttggaagccttctgcctctctctcgaatgaaagtattcttgccataaattgctgacttcacggttaggtaaagatggatagataaagagaagcttaaacagtggcattttactacaaaggccttctatttaatttttttaatgtgtttcttttagattacagcccaaattaaattcctgtacgaggaacttggacttgacagcaccagtgttttcgaggatcttaagaaatacctgaaattctgaaacactgcattcaactgggaattggaaacacactgaaatatttcatagtcttacttccaattgagttagcaaaaaaaaaattaataacttgagacttttaagttattaattttttaaaatgtgcttctccatctaaattttgcttagtctacatctcacttgcttatactattctctccattgatgcacatgcccattaacctaggaaagtagttttcaaatcatgctccttagaaggatgtggagtagagggaagggaaggattggtgatagcagagctccaggcctcccttccagtcagaacagttgagcagtttacaaattagtgtcctgcctctttgctagcaaatgcttttagacactgtggcagtgagtcatcctctaatttctatgactgcattttaagggaaaagataaaattcttccccttaaaattcgttaaagtttttgaataatctggggtcctaatgtgttctggtcatccctgattgatgctatctgaataaagttataagctcctataagccataatttacttttaaacattttatttttttcaaaacatttgagaacctttcttaaagcggttacattcaagctacagaaatatcgaagaattaatgattgttcaccaagcagcatgctgtacatgaagctattacaaatgcttacaatcccactgaaatgccagtgtcttcatctcttcataaaggtgcctaacacgaggtatacagtatgttcagtacactggaatagcatgctcgattggaaacaaagcatctatctctgaaagctgtttggcgatgaaggagattcttcgtgttgtgttcaaagatgagtccctctcccttgtccagaaaaatgccacttgtatcaactttactgcctttgtcggcagaattggtacttaaccttattcttattttagcgggaaggcccgaaatcatattatgtagatttaacagtgttgattctccaaaattcagaaccacgataaagattctgtcgatgccatccagctctcttgtgtacacaacatagtggctgtcattcctcaaatggcaaaaccagcccctgttgaggagtagctcattggcatgaagtagacttaaatcttgatataacttcaaagccgatctgggctgagtcttttggacctatttttttaaaaaagtatttacgtaagtgtttgattctaagaattgtttgtaagtatttttaatatattgtaaggagttatttacccaaaacacttgctccaattttgccccttataattgccaaattgtaagcatcaataagtaggtaagaacaatttatataaaaactgatagaaatgacaaattcggggtttcggcttgtccgggagtcaataagtacgcacagtgctctgctacattgtagagtttctgtagagatcaaatttgactccactttaggagtcccaaagcaaatgtccatgtctaagatgaatatttaacttgcatagtcattctgtgctatattgtaactgccagatggccagaaagaaggcaacagtggactcagacttctgaggaatttgggtttgttcccctttgtagactaatgtgtaggttgctgttgtgcgaagatcgtgtaactttagcagacatgtatttcttgcacagctaatagaagacaaagttgaaaaaaaggatgcaaaataaaaagctgcctaaggtgaaagttagaaattgtagacttttttttaccataatagtatgtgttcattgaagatgatttgggtttattttacagctatataaaacataatttgatgatgtacttctaacctttcaagcattttctgttattgactatataatatagcctccataaatgtttttaatgacaatattctgttgaacggttgtaccatactcagccatgccctttcattttgacgatagtgtttctaatattttgtatttttattcccctccccccatttttgtattacttaagatagattatcagaaagacagttactttgtcaaagagtatgggcacttgatacataatgccaaattattcttcataagagctgttgccaaatcagtgataatgttcatttaattgtattcttgccagccatgtttactggggtgatagttgttattgtggttgttattgttctttaggggtaggttcccaatatgtggtctttaaataattatctaatggtgtttaaaaagatgtttattctgtttgtcaggtacaaagatatttatgatacatgtatgacttgtctaagttattaacattttctctagccttaggtaatgcatgaaagcacatgtttcagtgccactcacataagaagtgcccggtaagtgttagctattattgtctacttgagttactactttctaaaagtatgttgaagtctttttctgtaattgcagatttgttgattttgcatttgagtattttctatattttgaagctgttagatgcatagtcatgatttttggtggaatgttttatcaatttttgaaaattgcctttgtctcatataatgcttttcatattgaactatattttgtctgctattaaatacttccaagcctga

SEQ ID NO: 368204 - DNA, 4994 bp, Homo sapiens
atgaaactttaacttacacaggtttttagatttagttagcctaagttatcagctgtctgaagttattcataacctaagtggggcatggccctgaaaaggagggatgagaactgctgatcttagttactctgagaacccactactctgtaatcatacctataaaatcattcgtgtgctggcagccccaaaaggagcataaaccagggactttgatatcatgcagcagaagaccaaattatttctccaagctttgaagtatagtattcctcaccttggaaaatgcatgcagaaacagcatttgaatcactataacttcgctgatcattgttacaatagaataaaattgaaaaaatatcacctaaccaagtgtcttcagaataaacccaagatatcagagttagcaagaaacatcccaagtcggagcttctcatgtaaggatcttcagcctgttaaacaagaaaacgaaaaaccccttccagaaaacatggatgcatttgaaaaagtgagaacaaaattagaaacacagccacaagaagaatatgaaatcatcaatgtggaagttaaacatggtggttttgtttattaccaagaaggttgttgcttggttcgttccaaagatgaagaagcagacaatgataattatgaagttttattcaatttggaggaacttaagttagaccagcccttcattgattgtatcagagttgctccagatgaaaaatatgtggctgccaagataagaactgaagattctgaagcatctacctgtgtaattataaagctcagcgatcagcccgtaatggaagcttctttcccgaatgtgtccagttttgaatgggtaaaggacgaggaagatgaagatgttttattctacaccttccagaggaaccttcgctgtcatgacgtatatcgagccacttttggtgataacaaacgtaatgaacgcttttacacagaaaaagacccaagctactttgttttcctttatcttacaaaagacagtcgtttcctcaccataaatattatgaacaagactacttctgaagtgtggttgatagatggcctgagcccttgggacccaccagtacttatccagaagcgaatacatggggtcctttactatgttgaacacagagatgatgaattatacattctcactaatgttggagaacctacagaatttaagctaatgagaacagcggctgatacccctgcaattatgaattgggatttattttttacaatgaagagaaatacaaaagtgatagacttggacatgtttaaggatcactgtgttctatttctgaagcacagcaatctcctttatgttaatgtgattggtctggctgatgattcagttcggtctctaaagctccctccttgggcctgtggattcataatggatacaaattctgacccaaagaactgcccctttcaactttgctctccaatacgtcccccaaaatattacacatacaagtttgcagaaggcaaactgtttgaggaaactgggcatgaagacccaatcacaaagactagtcgcgttttacgtctagaagccaaaagcaaggatggaaaattagtgccaatgactgttttccacaaaactgactctgaggacttgcagaagaaacctctcttggtacatgtatatggagcttatggaatggatttgaaaatgaatttcaggcctgagaggcgggtcctggtggatgatggatggatattagcatactgccatgttcgaggtggtggtgagttaggcctccagtggcacgctgatggccgcctaactaaaaaactcaatggccttgctgatttagaggcttgcattaagacgcttcatggccaaggcttttctcagccaagtctaacaaccctgactgctttcagtgctggaggggtgcttgcaggagcattgtgtaattctaatccagagctggtgagagcggtgactttggaggcacctttcttggatgttctcaacaccatgatggacactacacttcctctgacattagaagaattagaagaatgggggaatccttcatctgatgaaaaacacaagaactacataaaacgttactgtccctatcaaaatattaaacctcagcattatccttcaattcacataacggcatatgaaaacgatgaacgggtacctctgaaaggaattgtaagttatactgagaaactcaaggaagccatcgcggagcatgctaaggacacaggtgaaggctatcagacccctaatattattctagatattcagcctggaggcaatcatgtaattgaggattctcacaaaaagattacagcccaaattaaattcctgtacgaggaacttggacttgacagcaccagtgttttcgaggatcttaagaaatacctgaaattctgaaacactgcattcaactgggaattggaaacacactgaaatatttcatagtcttacttccaattgagttagcaaaaaaaaaattaataacttgagacttttaagttattaattttttaaaatgtgcttctccatctaaattttgcttagtctacatctcacttgcttatactattctctccattgatgcacatgcccattaacctaggaaagtagttttcaaatcatgctccttagaaggatgtggagtagagggaagggaaggattggtgatagcagagctccaggcctcccttccagtcagaacagttgagcagtttacaaattagtgtcctgcctctttgctagcaaatgcttttagacactgtggcagtgagtcatcctctaatttctatgactgcattttaagggaaaagataaaattcttccccttaaaattcgttaaagtttttgaataatctggggtcctaatgtgttctggtcatccctgattgatgctatctgaataaagttataagctcctataagccataatttacttttaaacattttatttttttcaaaacatttgagaacctttcttaaagcggttacattcaagctacagaaatatcgaagaattaatgattgttcaccaagcagcatgctgtacatgaagctattacaaatgcttacaatcccactgaaatgccagtgtcttcatctcttcataaaggtgcctaacacgaggtatacagtatgttcagtacactggaatagcatgctcgattggaaacaaagcatctatctctgaaagctgtttggcgatgaaggagattcttcgtgttgtgttcaaagatgagtccctctcccttgtccagaaaaatgccacttgtatcaactttactgcctttgtcggcagaattggtacttaaccttattcttattttagcgggaaggcccgaaatcatattatgtagatttaacagtgttgattctccaaaattcagaaccacgataaagattctgtcgatgccatccagctctcttgtgtacacaacatagtggctgtcattcctcaaatggcaaaaccagcccctgttgaggagtagctcattggcatgaagtagacttaaatcttgatataacttcaaagccgatctgggctgagtcttttggacctatttttttaaaaaagtatttacgtaagtgtttgattctaagaattgtttgtaagtatttttaatatattgtaaggagttatttacccaaaacacttgctccaattttgccccttataattgccaaattgtaagcatcaataagtaggtaagaacaatttatataaaaactgatagaaatgacaaattcggggtttcggcttgtccgggagtcaataagtacgcacagtgctctgctacattgtagagtttctgtagagatcaaatttgactccactttaggagtcccaaagcaaatgtccatgtctaagatgaatatttaacttgcatagtcattctgtgctatattgtaactgccagatggccagaaagaaggcaacagtggactcagacttctgaggaatttgggtttgttcccctttgtagactaatgtgtaggttgctgttgtgcgaagatcgtgtaactttagcagacatgtatttcttgcacagctaatagaagacaaagttgaaaaaaaggatgcaaaataaaaagctgcctaaggtgaaagttagaaattgtagacttttttttaccataatagtatgtgttcattgaagatgatttgggtttattttacagctatataaaacataatttgatgatgtacttctaacctttcaagcattttctgttattgactatataatatagcctccataaatgtttttaatgacaatattctgttgaacggttgtaccatactcagccatgccctttcattttgacgatagtgtttctaatattttgtatttttattcccctccccccatttttgtattacttaagatagattatcagaaagacagttactttgtcaaagagtatgggcacttgatacataatgccaaattattcttcataagagctgttgccaaatcagtgataatgttcatttaattgtattcttgccagccatgtttactggggtgatagttgttattgtggttgttattgttctttaggggtaggttcccaatatgtggtctttaaataattatctaatggtgtttaaaaagatgtttattctgtttgtcaggtacaaagatatttatgatacatgtatgacttgtctaagttattaacattttctctagccttaggtaatgcatgaaagcacatgtttcagtgccactcacataagaagtgcccggtaagtgttagctattattgtctacttgagttactactttctaaaagtatgttgaagtctttttctgtaattgcagatttgttgattttgcatttgagtattttctatattttgaagctgttagatgcatagtcatgatttttggtggaatgttttatcaatttttgaaaattgcctttgtctcatataatgcttttcatattgaactatattttgtctgctattaaatacttccaagcctga

SEQ ID NO: 368205 - DNA, 4933 bp, Homo sapiens
accattcttgctggtagccatcttgagtgagggcggaccagaggatgagagagctgtggcagggctactggaacgctgtccctcattgttttagccttctgtgcttcatctcgagctcagaagactagcgaagaacgaaaagtcttatatatttcgagactaaagaacccaggaacccaagaagactccttgaccacaacaaagatggcgaaatctgcctgttgctcgtgctagattgaggttacgtagattggcgtgctgcaaaccagctctaggcggctctgggtaagttgtcgttctgtgggctgcggaacgcagacttcggctggacttgcctgcggtgacacctgctcccctctgagagcttcaggttctccggcctgccttcactggtttgtgtccagagccggactgattctctcaatttgcgatcttcagcctgttaaacaagaaaacgaaaaaccccttccagaaaacatggatgcatttgaaaaagtgagaacaaaattagaaacacagccacaagaagaatatgaaatcatcaatgtggaagttaaacatggtggttttgtttattaccaagaaggttgttgcttggttcgttccaaagatgaagaagcagacaatgataattatgaagttttattcaatttggaggaacttaagttagaccagcccttcattgattgtatcagagttgctccagatgaaaaatatgtggctgccaagataagaactgaagattctgaagcatctacctgtgtaattataaagctcagcgatcagcccgtaatggaagcttctttcccgaatgtgtccagttttgaatgggtaaaggacgaggaagatgaagatgttttattctacaccttccagaggaaccttcgctgtcatgacgtatatcgagccacttttggtgataacaaacgtaatgaacgcttttacacagaaaaagacccaagctactttgttttcctttatcttacaaaagacagtcgtttcctcaccataaatattatgaacaagactacttctgaagtgtggttgatagatggcctgagcccttgggacccaccagtacttatccagaagcgaatacatggggtcctttactatgttgaacacagagatgatgaattatacattctcactaatgttggagaacctacagaatttaagctaatgagaacagcggctgatacccctgcaattatgaattgggatttattttttacaatgaagagaaatacaaaagtgatagacttggacatgtttaaggatcactgtgttctatttctgaagcacagcaatctcctttatgttaatgtgattggtctggctgatgattcagttcggtctctaaagctccctccttgggcctgtggattcataatggatacaaattctgacccaaagaactgcccctttcaactttgctctccaatacgtcccccaaaatattacacatacaagtttgcagaaggcaaactgtttgaggaaactgggcatgaagacccaatcacaaagactagtcgcgttttacgtctagaagccaaaagcaaggatggaaaattagtgccaatgactgttttccacaaaactgactctgaggacttgcagaagaaacctctcttggtacatgtatatggagcttatggaatggatttgaaaatgaatttcaggcctgagaggcgggtcctggtggatgatggatggatattagcatactgccatgttcgaggtggtggtgagttaggcctccagtggcacgctgatggccgcctaactaaaaaactcaatggccttgctgatttagaggcttgcattaagacgcttcatggccaaggcttttctcagccaagtctaacaaccctgactgctttcagtgctggaggggtgcttgcaggagcattgtgtaattctaatccagagctggtgagagcggtgactttggaggcacctttcttggatgttctcaacaccatgatggacactacacttcctctgacattagaagaattagaagaatgggggaatccttcatctgatgaaaaacacaagaactacataaaacgttactgtccctatcaaaatattaaacctcagcattatccttcaattcacataacggcatatgaaaacgatgaacgggtacctctgaaaggaattgtaagttatactgagaaactcaaggaagccatcgcggagcatgctaaggacacaggtgaaggctatcagacccctaatattattctagatattcagcctggaggcaatcatgtaattgaggattctcacaaaaagattacagcccaaattaaattcctgtacgaggaacttggacttgacagcaccagtgttttcgaggatcttaagaaatacctgaaattctgaaacactgcattcaactgggaattggaaacacactgaaatatttcatagtcttacttccaattgagttagcaaaaaaaaaattaataacttgagacttttaagttattaattttttaaaatgtgcttctccatctaaattttgcttagtctacatctcacttgcttatactattctctccattgatgcacatgcccattaacctaggaaagtagttttcaaatcatgctccttagaaggatgtggagtagagggaagggaaggattggtgatagcagagctccaggcctcccttccagtcagaacagttgagcagtttacaaattagtgtcctgcctctttgctagcaaatgcttttagacactgtggcagtgagtcatcctctaatttctatgactgcattttaagggaaaagataaaattcttccccttaaaattcgttaaagtttttgaataatctggggtcctaatgtgttctggtcatccctgattgatgctatctgaataaagttataagctcctataagccataatttacttttaaacattttatttttttcaaaacatttgagaacctttcttaaagcggttacattcaagctacagaaatatcgaagaattaatgattgttcaccaagcagcatgctgtacatgaagctattacaaatgcttacaatcccactgaaatgccagtgtcttcatctcttcataaaggtgcctaacacgaggtatacagtatgttcagtacactggaatagcatgctcgattggaaacaaagcatctatctctgaaagctgtttggcgatgaaggagattcttcgtgttgtgttcaaagatgagtccctctcccttgtccagaaaaatgccacttgtatcaactttactgcctttgtcggcagaattggtacttaaccttattcttattttagcgggaaggcccgaaatcatattatgtagatttaacagtgttgattctccaaaattcagaaccacgataaagattctgtcgatgccatccagctctcttgtgtacacaacatagtggctgtcattcctcaaatggcaaaaccagcccctgttgaggagtagctcattggcatgaagtagacttaaatcttgatataacttcaaagccgatctgggctgagtcttttggacctatttttttaaaaaagtatttacgtaagtgtttgattctaagaattgtttgtaagtatttttaatatattgtaaggagttatttacccaaaacacttgctccaattttgccccttataattgccaaattgtaagcatcaataagtaggtaagaacaatttatatatacgcacagtgctctgctacattgtagagtttctgtagagatcaaatttgactccactttaggagtcccaaagcaaatgtccatgtctaagatgaatatttaacttgcatagtcattctgtgctatattgtaactgccagatggccagaaagaaggcaacagtggactcagacttctgaggaatttgggtttgttcccctttgtagactaatgtgtaggttgctgttgtgcgaagatcgtgtaactttagcagacatgtatttcttgcacagctaatagaagacaaagttgaaaaaaaggatgcaaaataaaaagctgcctaaggtgaaagttagaaattgtagacttttttttaccataatagtatgtgttcattgaagatgatttgggtttattttacagctatataaaacataatttgatgatgtacttctaacctttcaagcattttctgttattgactatataatatagcctccataaatgtttttaatgacaatattctgttgaacggttgtaccatactcagccatgccctttcattttgacgatagtgtttctaatattttgtatttttattcccctccccccatttttgtattacttaagatagattatcagaaagacagttactttgtcaaagagtatgggcacttgatacataatgccaaattattcttcataagagctgttgccaaatcagtgataatgttcatttaattgtattcttgccagccatgtttactggggtgatagttgttattgtggttgttattgttctttaggggtaggttcccaatatgtggtctttaaataattatctaatggtgtttaaaaagatgtttattctgtttgtcaggtacaaagatatttatgatacatgtatgacttgtctaagttattaacattttctctagccttaggtaatgcatgaaagcacatgtttcagtgccactcacataagaagtgcccggtaagtgttagctattattgtctacttgagttactactttctaaaagtatgttgaagtctttttctgtaattgcagatttgttgattttgcatttgagtattttctatattttgaagctgttagatgcatagtcatgatttttggtggaatgttttatcaatttttgaaaattgcctttgtctcatataatgcttttcatattgaactatattttgtctgctattaaatacttccaagcctga

SEQ ID NO: 368206 - DNA, 4908 bp, Homo sapiens
accattcttgctggtagccatcttgagtgagggcggaccagaggatgagagagctgtggcagggctactggaacgctgtccctcattgttttagccttctgtgcttcatctcgagctcagaagactagcgaagaacgaaaagtcttatatatttcgagactaaagaacccaggaacccaagaagactccttgaccacaacaaagatggcgaaatctgcctgttgctcgtgctagattgaggttacgtagattggcgtgctgcaaaccagctctaggcggctctgggtaagttgtcgttctgtgggctgcggaacgcagacttcggctggacttgcctgcggtgacacctgctcccctctgagagcttcaggttctccggcctgccttcactggtttgtgtccagagccggactgattctctcaatttgcgatcttcagcctgttaaacaagaaaacgaaaaaccccttccagaaaacatggatgcatttgaaaaagtgagaacaaaattagaaacacagccacaagaagaatatgaaatcatcaatgtggaagttaaacatggtggttttgtttattaccaagaaggttgttgcttggttcgttccaaagatgaagaagcagacaatgataattatgaagttttattcaatttggaggaacttaagttagaccagcccttcattgattgtatcagagttgctccagatgaaaaatatgtggctgccaagataagaactgaagattctgaagcatctacctgtgtaattataaagctcagcgatcagcccgtaatggaagcttctttcccgaatgtgtccagttttgaatgggtaaaggacgaggaagatgaagatgttttattctacaccttccagaggaaccttcgctgtcatgacgtatatcgagccacttttggtgataacaaacgtaatgaacgcttttacacagaaaaagacccaagctactttgttttcctttatcttacaaaagacagtcgtttcctcaccataaatattatgaacaagactacttctgaagtgtggttgatagatggcctgagcccttgggacccaccagtacttatccagaagcgaatacatggggtcctttactatgttgaacacagagatgatgaattatacattctcactaatgttggagaacctacagaatttaagctaatgagaacagcggctgatacccctgcaattatgaattgggatttattttttacaatgaagagaaatacaaaagtgatagacttggacatgtttaaggatcactgtgttctatttctgaagcacagcaatctcctttatgttaatgtgattggtctggctgatgattcagttcggtctctaaagctccctccttgggcctgtggattcataatggatacaaattctgacccaaagaactgcccctttcaactttgctctccaatacgtcccccaaaatattacacatacaagtttgcagaaggcaaactgtttgaggaaactgggcatgaagacccaatcacaaagactagtcgcgttttacgtctagaagccaaaagcaaggatggaaaattagtgccaatgactgttttccacaaaactgactctgaggacttgcagaagaaacctctcttggtacatgtatatggagcttatggaatggatttgaaaatgaatttcaggcctgagaggcgggtcctggtggatgatggatggatattagcatactgccatgttcgaggtggtggtgagttaggcctccagtggcacgctgatggccgcctaactaaaaaactcaatggccttgctgatttagaggcttgcattaagacgcttcatggccaaggcttttctcagccaagtctaacaaccctgactgctttcagtgctggaggggtgcttgcaggagcattgtgtaattctaatccagagctggtgagagcggtgactttggaggcacctttcttggatgttctcaacaccatgatggacactacacttcctctgacattagaagaattagaagaatgggggaatccttcatctgatgaaaaacacaagaactacataaaacgttactgtccctatcaaaatattaaacctcagcattatccttcaattcacataacggcatatgaaaacgatgaacgggtacctctgaaaggaattgtaagttatactgagaaactcaaggaagccatcgcggagcatgctaaggacacaggtgaaggctatcagacccctaatattattctagatattcagcctggaggcaatcatgtaattgaggattctcacaaaaagattacagcccaaattaaattcctgtacgaggaacttggacttgacagcaccagtgttttcgaggatcttaagaaatacctgaaattctgaaacactgcattcaactgggaattggaaacacactgaaatatttcatagtcttacttccaattgagttagcaaaaaaaaaattaataacttgagacttttaagttattaattttttaaaatgtgcttctccatctaaattttgcttagtctacatctcacttgcttatactattctctccattgatgcacatgcccattaacctaggaaagtagttttcaaatcatgctccttagaaggatgtggagtagagggaagggaaggattggtgatagcagagctccaggcctcccttccagtcagaacagttgagcagtttacaaattagtgtcctgcctctttgctagcaaatgcttttagacactgtggcagtgagtcatcctctaatttctatgactgcattttaagggaaaagataaaattcttccccttaaaattcgttaaagtttttgaataatctggggtcctaatgtgttctggtcatccctgattgatgctatctgaataaagttataagctcctataagccataatttacttttaaacattttatttttttcaaaacatttgagaacctttcttaaagcggttacattcaagctacagaaatatcgaagaattaatgattgttcaccaagcagcatgctgtacatgaagctattacaaatgcttacaatcccactgaaatgccagtgtcttcatctcttcataaaggtgcctaacacgaggtatacagtatgttcagtacactggaatagcatgctcgattggaaacaaagcatctatctctgaaagctgtttggcgatgaaggagattcttcgtgttgtgttcaaagatgagtccctctcccttgtccagaaaaatgccacttgtatcaactttactgcctttgtcggcagaattggtacttaaccttattcttattttagcgggaaggcccgaaatcatattatgtagatttaacagtgttgattctccaaaattcagaaccacgataaagattctgtcgatgccatccagctctcttgtgtacacaacatagtggctgtcattcctcaaatggcaaaaccagcccctgttgaggagtagctcattggcatgaagtagacttaaatcttgatataacttcaaagccgatctgggctgagtcttttggacctatttttttaaaaaagtatttacgtaagtgtttgattctaagaattgtttgtaagtatttttaatatattgtaaggagttatttacccaaaacacttgctccaattttgccccttataattgccaaattgtaagcatcaataagtaggtaagaacaatttatataaaaactgatagaaatgacaaattcggggtttcggcttgtccgggagtcaataagtacgcacagtgctctgctacattgtagagtttctgtagagatcaaatttgactccactttaggagtcccaaagcaaatgtccatgtctaagatgaatatttaacttgcatagtcattctgtgctatattgtaactgccagatggccagaaagaaggcaacagtggactcagacttctgaggaatttgggtttgttcccctttgtagactaatgtgtaggttgctgttgtgcgaagatcgtgtaactttagcagacatgtatttcttgcacagctaatagaagacaaagttgaaaaaaaggatgcaaaataaaaagctgcctaaggtgaaagttagaaattgtagacttttttttaccataatagtatgtgttcattgaagatgatttgggtttattttacagctatataaaacataatttgatgatgtacttctaacctttcaagcattttctgttattgactatataatatagcctccataaatgtttttaatgacaatattctgttgaacggttgtaccatactcagccatgccctttcattttgacgatagtgtttctaatattttgtatttttattcccctccccccatttttgtattacttaagatagattatcagaaagacagttactttgtcaaagagtatgggcacttgatacataatgccaaattattcttcataagagctgttgccaaatcagtgataatgttcatttaattgtattcttgccagccatgtttactggggtgatagttgttattgtggttgttattgttctttaggggtaggttcccaatatgtggtctttaaataattatctaatggtgtttaaaaagatgtttattctgtttgtcaggtacaaagatatttatgatacatgtatgacttgtctaagttattaacattttctctagccttaggtaatgcatgaaagcacatgtttcagtgccactcacataagaagtgcccgtacgttctggacaagcccctggatcaatttttcagcacactaattagcacttatgttctattttatttcattgtttgacagtcttttatacttctgagagatctaatcacttcttgaaagaatgtcaaggagctccattaaacagcaatctactgggggtattt

SEQ ID NO: 368207 - DNA, 4099 bp, Homo sapiens
accattcttgctggtagccatcttgagtgagggcggaccagaggatgagagagctgtggcagggctactggaacgctgtccctcattgttttagccttctgtgcttcatctcgagctcagaagactagcgaagaacgaaaagtcttatatatttcgagactaaagaacccaggaacccaagaagactccttgaccacaacaaagatggcgaaatctgcctgttgctcgtgctagattgaggttacgtagattggcgtgctgcaaaccagctctaggcggctctgggtaagttgtcgttctgtgggctgcggaacgcagacttcggctggacttgcctgcggtgacacctgctcccctctgagagcttcaggttctccggcctgccttcactggtttgtgtccagagccggactgattctctcaatttgcgatcttcagcctgttaaacaagaaaacgaaaaaccccttccagaaaacatggatgcatttgaaaaagtgagaacaaaattagaaacacagccacaagaagaatatgaaatcatcaatgtggaagttaaacatggtggttttgtttattaccaagaaggttgttgcttggttcgttccaaagatgaagaagcagacaatgataattatgaagttttattcaatttggaggaacttaagttagaccagcccttcattgattgtatcagagttgctccagatgaaaaatatgtggctgccaagataagaactgaagattctgaagcatctacctgtgtaattataaagctcagcgatcagcccgtaatggaagcttctttcccgaatgtgtccagttttgaatgggtaaaggacgaggaagatgaagatgttttattctacaccttccagaggaaccttcgctgtcatgacgtatatcgagccacttttggtgataacaaacgtaatgaacgcttttacacagaaaaagacccaagctactttgttttcctttatcttacaaaagacagtcgtttcctcaccataaatattatgaacaagactacttctgaagtgtggttgatagatggcctgagcccttgggacccaccagtacttatccagaagcgaatacatggggtcctttactatgttgaacacagagatgatgaattatacattctcactaatgttggagaacctacagaatttaagctaatgagaacagcggctgatacccctgcaattatgaattgggatttattttttacaatgaagagaaatacaaaagtgatagacttggacatgtttaaggatcactgtgttctatttctgaagcacagcaatctcctttatgttaatgtgattggtctggctgatgattcagttcggtctctaaagctccctccttgggcctgtggattcataatggatacaaattctgacccaaagaactgcccctttcaactttgctctccaatacgtcccccaaaatattacacatacaagtttgcagaaggcaaactgtttgaggaaactgggcatgaagacccaatcacaaagactagtcgcgttttacgtctagaagccaaaagcaaggatggaaaattagtgccaatgactgttttccacaaaactgactctgaggacttgcagaagaaacctctcttggtacatgtatatggagcttatggaatggatttgaaaatgaatttcaggcctgagaggcgggtcctggtggatgatggatggatattagcatactgccatgttcgaggtggtggtgagttaggcctccagtggcacgctgatggccgcctaactaaaaaactcaatggccttgctgatttagaggcttgcattaagacgcttcatggccaaggcttttctcagccaagtctaacaaccctgactgctttcagtgctggaggggtgcttgcaggagcattgtgtaattctaatccagagctggtgagagcggtgactttggaggcacctttcttggatgttctcaacaccatgatggacactacacttcctctgacattagaagaattagaagaatgggggaatccttcatctgatgaaaaacacaagaactacataaaacgttactgtccctatcaaaatattaaacctcagcattatccttcaattcacataacggcatatgaaaacgatgaacgggtacctctgaaaggaattgtaagttatactgagaaactcaaggaagccatcgcggagcatgctaaggacacaggtgaaggctatcagacccctaatattattctagatattcagcctggaggcaatcatgtaattgaggattctcacaaaaagattacagcccaaattaaattcctgtacgaggaacttggacttgacagcaccagtgttttcgaggatcttaagaaatacctgaaattctgaaacactgcattcaactgggaattggaaacacactgaaatatttcatagtcttacttccaattgagttagcaaaaaaaaaattaataacttgagacttttaagttattaattttttaaaatgtgcttctccatctaaattttgcttagtctacatctcacttgcttatactattctctccattgatgcacatgcccattaacctaggaaagtagttttcaaatcatgctccttagaaggatgtggagtagagggaagggaaggattggtgatagcagagctccaggcctcccttccagtcagaacagttgagcagtttacaaattagtgtcctgcctctttgctagcaaatgcttttagacactgtggcagtgagtcatcctctaatttctatgactgcattttaagggaaaagataaaattcttccccttaaaattcgttaaagtttttgaataatctggggtcctaatgtgttctggtcatccctgattgatgctatctgaataaagttataagctcctataagccataatttacttttaaacattttatttttttcaaaacatttgagaacctttcttaaagcggttacattcaagctacagaaatatcgaagaattaatgattgttcaccaagcagcatgctgtacatgaagctattacaaatgcttacaatcccactgaaatgccagtgtcttcatctcttcataaaggtgcctaacacgaggtatacagtatgttcagtacactggaatagcatgctcgattggaaacaaagcatctatctctgaaagctgtttggcgatgaaggagattcttcgtgttgtgttcaaagatgagtccctctcccttgtccagaaaaatgccacttgtatcaactttactgcctttgtcggcagaattggtacttaaccttattcttattttagcgggaaggcccgaaatcatattatgtagatttaacagtgttgattctccaaaattcagaaccacgataaagattctgtcgatgccatccagctctcttgtgtacacaacatagtggctgtcattcctcaaatggcaaaaccagcccctgttgaggagtagctcattggcatgaagtagacttaaatcttgatataacttcaaagccgatctgggctgagtcttttggacctatttttttaaaaaagtatttacgtaagtgtttgattctaagaattgtttgtaagtatttttaatatattgtaaggagttatttacccaaaacacttgctccaattttgccccttataattgccaaattgtaagcatcaataagtaggtaagaacaatttatataaaaactgatagaaatgacaaattcggggtttcggcttgtccgggagtcaataagtacgcacagtgctctgctacattgtagagtttctgtagagatcaaatttgactccactttaggagtcccaaagcaaatgtccatgtctaagatgaatatttaacttgcatagtcattctgtgctatattgtaactgccagatggccagaaagaaggcaacagtggactcagacttctgaggaatttgggtttgttcccctttgtagactaatgtgtaggttgctgttgtgcgaagatcgtgtaactttagcagacatgtatttcttgcacagctaatagaagacaaagttgaaaaaaaggatgcaaaataaaaagctgcctaaggtga

SEQ ID NO: 368208 - DNA, 1564 bp, Homo sapiens
  misc_feature (4)..(4): n is a, c, g, or t
gaanagaatagggcacaggtatattgaaatctttaagagcagtagagctgaagttagagctcattggcatgaagtagacttaaatcttgatataacttcaaagccgatctgggctgagtcttttggacctatttttttaaaaaagtatttacgtaagtgtttgattctaagaattgtttgtaagtatttttaatatattgtaaggagttatttacccaaaacacttgctccaattttgccccttataattgccaaattgtaagcatcaataagtaggtaagaacaatttatataaaaactgatagaaatgacaaattcggggtttcggcttgtccgggagtcaataagtacgcacagtgctctgctacattgtagagtttctgtagagatcaaatttgactccactttaggagtcccaaagcaaatgtccatgtctaagatgaatatttaacttgcatagtcattctgtgctatattgtaactgccagatggccagaaagaaggcaacagtggactcagacttctgaggaatttgggtttgttcccctttgtagactaatgtgtaggttgctgttgtgcgaagatcgtgtaactttagcagacatgtatttcttgcacagctaatagaagacaaagttgaaaaaaaggatgcaaaataaaaagctgcctaaggtgaaagttagaaattgtagacttttttttaccataatagtatgtgttcattgaagatgatttgggtttattttacagctatataaaacataatttgatgatgtacttctaacctttcaagcattttctgttattgactatataatatagcctccataaatgtttttaatgacaatattctgttgaacggttgtaccatactcagccatgccctttcattttgacgatagtgtttctaatattttgtatttttattcccctccccccatttttgtattacttaagatagattatcagaaagacagttactttgtcaaagagtatgggcacttgatacataatgccaaattattcttcataagagctgttgccaaatcagtgataatgttcatttaattgtattcttgccagccatgtttactggggtgatagttgttattgtggttgttattgttctttaggggtaggttcccaatatgtggtctttaaataattatctaatggtgtttaaaaagatgtttattctgtttgtcaggtacaaagatatttatgatacatgtatgacttgtctaagttattaacattttctctagccttaggtaatgcatgaaagcacatgtttcagtgccactcacataagaagtgcccggtaagtgttagctattattgtctacttgagttactactttctaaaagtatgttgaagtctttttctgtaattgcagatttgttgattttgcatttgagtattttctatattttgaagctgttagatgcatagtcatgatttttggtggaatgttttatcaatttttgaaaattgcctttgtctcatataatgcttttcatattgaactatattttgtctgctattaaatacttccaagcctga

SEQ ID NO: 368209 - DNA, 866 bp, Homo sapiens
ccttccaacatctcatggcggttgcagaaccagatgctttaagctgcttctcattgtgggatcactcaacacaaaataaaacagaccccccaaaacaaaggcttccggtctcccgcaattccaacaaaaaccttgtcatccagaactttgaaatatcctaatccaattgtcttccattttaagttttcttttcttttctttttctgtttctaatattttgtatttttattcccctccccccatttttgtattacttaagatagattatcagaaagacagttactttgtcaaagagtatgggcacttgatacataatgccaaattattcttcataagagctgttgccaaatcagtgataatgttcatttaattgtattcttgccagccatgtttactggggtgatagttgttattgtggttgttattgttctttaggggtaggttcccaatatgtggtctttaaataattatctaatggtgtttaaaaagatgtttattctgtttgtcaggtacaaagatatttatgatacatgtatgacttgtctaagttattaacattttctctagccttaggtaatgcatgaaagcacatgtttcagtgccactcacataagaagtgcccggtaagtgttagctattattgtctacttgagttactactttctaaaagtatgttgaagtctttttctgtaattgcagatttgttgattttgcatttgagtattttctatattttgaagctgttagatgcatagtcatgatttttggtggaatgttttatcaatttttgaaaattgcctttgtctcatataatgcttttcatattgaactatattttgtctgctattaaatacttccaagcctga

SEQ ID NO: 368210 - DNA, 764 bp, Homo sapiens
accattcttgctggtagccatcttgagtgagggcggaccagaggatgagagagctgtggcagggctactggaacgctgtccctcattgttttagccttctgtgcttcatctcgagctcagaagactagcgaagaacgaaaagtcttatatatttcgagactaaagaacccaggaacccaagaagactccttgaccacaacaaagatggcgaaatctgcctgttgctcgtgctagattgaggttacgtagattggcgtgctgcaaaccagctctaggcggctctgggtaagttgtcgttctgtgggctgcggaacgcagacttcggctggacttgcctgcggtgacacctgctcccctctgagagcttcaggttctccggcctgccttcactggtttgtgtccagagccggactgattctctcaatttgcgatcttcagcctgttaaacaagaaaacgaaaaaccccttccagaaaacatacgagcatcctgctcctgtggcatggggcccggtggcagtcagctggacgatgacctcggctgatgcttgagaaggggaaagcggctgtcccaggctaaagacataagaggtgcgccgcgttgagtgcaggcttcctggcctacatgaatggttcccttggccggacctgcaagccggcccgtatgccgggcttattgtgggcaccgtgcatgccggcaccggaaggcgcatctagatgggcatcgagccaggtgttctactacagtgggccttaggatgagaaa

SEQ ID NO: 368211 - DNA, 732 bp, Homo sapiens
accattcttgctggtagccatcttgagtgagggcggaccagaggatgagagagctgtggcagggctactggaacgctgtccctcattgttttagccttctgtgcttcatctcgagctcagaagactagcgaagaacgaaaagtcttatatatttcgagactaaagaacccaggaacccaagaagactccttgaccacaacaaagatggcgaaatctgcctgttgctcgtgctagattgaggttacgtagattggcgtgctgcaaaccagctctaggcggctctgggtaagttgtcgttctgtgggctgcggaacgcagacttcggctggacttgcctgcggtgacacctgctcccctctgagagcttcaggttctccggcctgccttcactggtttgtgtccagagccggactgattctctcaatttgcgtatgtatggggggtgtgctggtctctttccttctcccctttctccccccgcccagccacccacccctcagtccccaggtcctcgctttttgactaatgtcccggcactgcgtgcgtgtcacctggtccctctccctgttgcattcagatcgcctcatccctggggtggagagttgcacggggtaaacgaataggttctcctgagaacacccatttatctaccccacccccatcctagccttgcatactgtcttcttggggatgaaagatggatggataaaggctgtgggaacgtggtgatgt

SEQ ID NO: 368212 - DNA, 577 bp, Homo sapiens
tgtttcctccagtctgttctcctgtgcaattgttgttactgcatgtacggaattctgtatctatcttccatgtatcccgattttttcttatgctcttaattctttgtctttttcagtacgttctggacaagcccctggatcaatttttcagcacactaattagcacttatgttctattttatttcattgtttgacagtcttttatacttctgagagatctaatcacttcttgaaagaatgtcaaggagctccattaaacagcaatctactgggggtatttatacttatatttaagtcttatgtttgctataattttctctgctttctacagtgttctgttaggaatggtgtctcccttttatggccttggtttttctcagatgctgtgtgattcttgatctgtttgcttttgtgttttgaccttccttgtttgcctgtctttggttgcctgcctctcataatgggaagccaagttggatgtgggtctgacttgtctttgggacattgggatgtagggttcttttcctacttgaaggtgataagctttctagattcccaccttttttctcctggtgtc

SEQ ID NO: 368213 - DNA, 4987 bp, Homo sapiens
accattcttgctggtagccatcttgagtgagggcggaccagaggatgagagagctgtggcagggctactggaacgctgtccctcattgttttagccttctgtgcttcatctcgagctcagaagactagcgaagaacgaaaagtcttatatatttcgagactaaagaacccaggaacccaagaagactccttgaccacaacaaagatggcgaaatctgcctgttgctcgtgctagattgaggttacgtagattggcgtgctgcaaaccagctctaggcggctctgggtaagttgtcgttctgtgggctgcggaacgcagacttcggctggacttgcctgcggtgacacctgctcccctctgagagcttcaggttctccggcctgccttcactggtttgtgtccagagccggactgattctctcaatttgcgatcttcagcctgttaaacaagaaaacgaaaaaccccttccagaaaacatggatgcatttgaaaaagtgagaacaaaattagaaacacagccacaagaagaatatgaaatcatcaatgtggaagttaaacatggtggttttgtttattaccaagaaggttgttgcttggttcgttccaaagatgaagaagcagacaatgataattatgaagttttattcaatttggaggaacttaagttagaccagcccttcattgattgtatcagagttgctccagatgaaaaatatgtggctgccaagataagaactgaagattctgaagcatctacctgtgtaattataaagctcagcgatcagcccgtaatggaagcttctttcccgaatgtgtccagttttgaatgggtaaaggacgaggaagatgaagatgttttattctacaccttccagaggaaccttcgctgtcatgacgtatatcgagccacttttggtgataacaaacgtaatgaacgcttttacacagaaaaagacccaagctactttgttttcctttatcttacaaaagacagtcgtttcctcaccataaatattatgaacaagactacttctgaagtgtggttgatagatggcctgagcccttgggacccaccagtacttatccagaagcgaatacatggggtcctttactatgttgaacacagagatgatgaattatacattctcactaatgttggagaacctacagaatttaagctaatgagaacagcggctgatacccctgcaattatgaattgggatttattttttacaatgaagagaaatacaaaagtgatagacttggacatgtttaaggatcactgtgttctatttctgaagcacagcaatctcctttatgttaatgtgattggtctggctgatgattcagttcggtctctaaagctccctccttgggcctgtggattcataatggatacaaattctgacccaaagaactgcccctttcaactttgctctccaatacgtcccccaaaatattacacatacaagtttgcagaaggcaaactgtttgaggaaactgggcatgaagacccaatcacaaagactagtcgcgttttacgtctagaagccaaaagcaaggatggaaaattagtgccaatgactgttttccacaaaactgactctgaggacttgcagaagaaacctctcttggtacatgtatatggagcttatggaatggatttgaaaatgaatttcaggcctgagaggcgggtcctggtggatgatggatggatattagcatactgccatgttcgaggtggtggtgagttaggcctccagtggcacgctgatggccgcctaactaaaaaactcaatggccttgctgatttagaggcttgcattaagacgcttcatggccaaggcttttctcagccaagtctaacaaccctgactgctttcagtgctggaggggtgcttgcaggagcattgtgtaattctaatccagagctggtgagagcggtgactttggaggcacctttcttggatgttctcaacaccatgatggacactacacttcctctgacattagaagaattagaagaatgggggaatccttcatctgatgaaaaacacaagaactacataaaacgttactgtccctatcaaaatattaaacctcagcattatccttcaattcacataacggcatatgaaaacgatgaacgggtacctctgaaaggaattgtaagttatactgagaaactcaaggaagccatcgcggagcatgctaaggacacaggtgaaggctatcagacccctaatattattctagatattcagcctggaggcaatcatgtaattgaggattctcacaaaaagattacagcccaaattaaattcctgtacgaggaacttggacttgacagcaccagtgttttcgaggatcttaagaaatacctgaaattctgaaacactgcattcaactgggaattggaaacacactgaaatatttcatagtcttacttccaattgagttagcaaaaaaaaaattaataacttgagacttttaagttattaattttttaaaatgtgcttctccatctaaattttgcttagtctacatctcacttgcttatactattctctccattgatgcacatgcccattaacctaggaaagtagttttcaaatcatgctccttagaaggatgtggagtagagggaagggaaggattggtgatagcagagctccaggcctcccttccagtcagaacagttgagcagtttacaaattagtgtcctgcctctttgctagcaaatgcttttagacactgtggcagtgagtcatcctctaatttctatgactgcattttaagggaaaagataaaattcttccccttaaaattcgttaaagtttttgaataatctggggtcctaatgtgttctggtcatccctgattgatgctatctgaataaagttataagctcctataagccataatttacttttaaacattttatttttttcaaaacatttgagaacctttcttaaagcggttacattcaagctacagaaatatcgaagaattaatgattgttcaccaagcagcatgctgtacatgaagctattacaaatgcttacaatcccactgaaatgccagtgtcttcatctcttcataaaggtgcctaacacgaggtatacagtatgttcagtacactggaatagcatgctcgattggaaacaaagcatctatctctgaaagctgtttggcgatgaaggagattcttcgtgttgtgttcaaagatgagtccctctcccttgtccagaaaaatgccacttgtatcaactttactgcctttgtcggcagaattggtacttaaccttattcttattttagcgggaaggcccgaaatcatattatgtagatttaacagtgttgattctccaaaattcagaaccacgataaagattctgtcgatgccatccagctctcttgtgtacacaacatagtggctgtcattcctcaaatggcaaaaccagcccctgttgaggagtagctcattggcatgaagtagacttaaatcttgatataacttcaaagccgatctgggctgagtcttttggacctatttttttaaaaaagtatttacgtaagtgtttgattctaagaattgtttgtaagtatttttaatatattgtaaggagttatttacccaaaacacttgctccaattttgccccttataattgccaaattgtaagcatcaataagtaggtaagaacaatttatataaaaactgatagaaatgacaaattcggggtttcggcttgtccgggagtcaataagtacgcacagtgctctgctacattgtagagtttctgtagagatcaaatttgactccactttaggagtcccaaagcaaatgtccatgtctaagatgaatatttaacttgcatagtcattctgtgctatattgtaactgccagatggccagaaagaaggcaacagtggactcagacttctgaggaatttgggtttgttcccctttgtagactaatgtgtaggttgctgttgtgcgaagatcgtgtaactttagcagacatgtatttcttgcacagctaatagaagacaaagttgaaaaaaaggatgcaaaataaaaagctgcctaaggtgaaagttagaaattgtagacttttttttaccataatagtatgtgttcattgaagatgatttgggtttattttacagctatataaaacataatttgatgatgtacttctaacctttcaagcattttctgttattgactatataatatagcctccataaatgtttttaatgacaatattctgttgaacggttgtaccatactcagccatgccctttcattttgacgatagtgtttctaatattttgtatttttattcccctccccccatttttgtattacttaagatagattatcagaaagacagttactttgtcaaagagtatgggcacttgatacataatgccaaattattcttcataagagctgttgccaaatcagtgataatgttcatttaattgtattcttgccagccatgtttactggggtgatagttgttattgtggttgttattgttctttaggggtaggttcccaatatgtggtctttaaataattatctaatggtgtttaaaaagatgtttattctgtttgtcaggtacaaagatatttatgatacatgtatgacttgtctaagttattaacattttctctagccttaggtaatgcatgaaagcacatgtttcagtgccactcacataagaagtgcccggtaagtgttagctattattgtctacttgagttactactttctaaaagtatgttgaagtctttttctgtaattgcagatttgttgattttgcatttgagtattttctatattttgaagctgttagatgcatagtcatgatttttggtggaatgttttatcaatttttgaaaattgcctttgtctcatataatgcttttcatattgaactatattttgtctgctattaaatacttccaagcctga

SEQ ID NO: 368214 - DNA, 4843 bp, Homo sapiens
accattcttgctggtagccatcttgagtgagggcggaccagaggatgagagagctgtggcagggctactggaacgctgtccctcattgttttagccttctgtgcttcatctcgagctcagaagactagcgaagaacgaaaagtcttatatatttcgagactaaagaacccaggaacccaagaagactccttgaccacaacaaagatggcgaaatctgcctgttgctcgtgctagattgaggttacgtagattggcgtgctgcaaaccagctctaggcggctctgggatcttcagcctgttaaacaagaaaacgaaaaaccccttccagaaaacatggatgcatttgaaaaagtgagaacaaaattagaaacacagccacaagaagaatatgaaatcatcaatgtggaagttaaacatggtggttttgtttattaccaagaaggttgttgcttggttcgttccaaagatgaagaagcagacaatgataattatgaagttttattcaatttggaggaacttaagttagaccagcccttcattgattgtatcagagttgctccagatgaaaaatatgtggctgccaagataagaactgaagattctgaagcatctacctgtgtaattataaagctcagcgatcagcccgtaatggaagcttctttcccgaatgtgtccagttttgaatgggtaaaggacgaggaagatgaagatgttttattctacaccttccagaggaaccttcgctgtcatgacgtatatcgagccacttttggtgataacaaacgtaatgaacgcttttacacagaaaaagacccaagctactttgttttcctttatcttacaaaagacagtcgtttcctcaccataaatattatgaacaagactacttctgaagtgtggttgatagatggcctgagcccttgggacccaccagtacttatccagaagcgaatacatggggtcctttactatgttgaacacagagatgatgaattatacattctcactaatgttggagaacctacagaatttaagctaatgagaacagcggctgatacccctgcaattatgaattgggatttattttttacaatgaagagaaatacaaaagtgatagacttggacatgtttaaggatcactgtgttctatttctgaagcacagcaatctcctttatgttaatgtgattggtctggctgatgattcagttcggtctctaaagctccctccttgggcctgtggattcataatggatacaaattctgacccaaagaactgcccctttcaactttgctctccaatacgtcccccaaaatattacacatacaagtttgcagaaggcaaactgtttgaggaaactgggcatgaagacccaatcacaaagactagtcgcgttttacgtctagaagccaaaagcaaggatggaaaattagtgccaatgactgttttccacaaaactgactctgaggacttgcagaagaaacctctcttggtacatgtatatggagcttatggaatggatttgaaaatgaatttcaggcctgagaggcgggtcctggtggatgatggatggatattagcatactgccatgttcgaggtggtggtgagttaggcctccagtggcacgctgatggccgcctaactaaaaaactcaatggccttgctgatttagaggcttgcattaagacgcttcatggccaaggcttttctcagccaagtctaacaaccctgactgctttcagtgctggaggggtgcttgcaggagcattgtgtaattctaatccagagctggtgagagcggtgactttggaggcacctttcttggatgttctcaacaccatgatggacactacacttcctctgacattagaagaattagaagaatgggggaatccttcatctgatgaaaaacacaagaactacataaaacgttactgtccctatcaaaatattaaacctcagcattatccttcaattcacataacggcatatgaaaacgatgaacgggtacctctgaaaggaattgtaagttatactgagaaactcaaggaagccatcgcggagcatgctaaggacacaggtgaaggctatcagacccctaatattattctagatattcagcctggaggcaatcatgtaattgaggattctcacaaaaagattacagcccaaattaaattcctgtacgaggaacttggacttgacagcaccagtgttttcgaggatcttaagaaatacctgaaattctgaaacactgcattcaactgggaattggaaacacactgaaatatttcatagtcttacttccaattgagttagcaaaaaaaaaattaataacttgagacttttaagttattaattttttaaaatgtgcttctccatctaaattttgcttagtctacatctcacttgcttatactattctctccattgatgcacatgcccattaacctaggaaagtagttttcaaatcatgctccttagaaggatgtggagtagagggaagggaaggattggtgatagcagagctccaggcctcccttccagtcagaacagttgagcagtttacaaattagtgtcctgcctctttgctagcaaatgcttttagacactgtggcagtgagtcatcctctaatttctatgactgcattttaagggaaaagataaaattcttccccttaaaattcgttaaagtttttgaataatctggggtcctaatgtgttctggtcatccctgattgatgctatctgaataaagttataagctcctataagccataatttacttttaaacattttatttttttcaaaacatttgagaacctttcttaaagcggttacattcaagctacagaaatatcgaagaattaatgattgttcaccaagcagcatgctgtacatgaagctattacaaatgcttacaatcccactgaaatgccagtgtcttcatctcttcataaaggtgcctaacacgaggtatacagtatgttcagtacactggaatagcatgctcgattggaaacaaagcatctatctctgaaagctgtttggcgatgaaggagattcttcgtgttgtgttcaaagatgagtccctctcccttgtccagaaaaatgccacttgtatcaactttactgcctttgtcggcagaattggtacttaaccttattcttattttagcgggaaggcccgaaatcatattatgtagatttaacagtgttgattctccaaaattcagaaccacgataaagattctgtcgatgccatccagctctcttgtgtacacaacatagtggctgtcattcctcaaatggcaaaaccagcccctgttgaggagtagctcattggcatgaagtagacttaaatcttgatataacttcaaagccgatctgggctgagtcttttggacctatttttttaaaaaagtatttacgtaagtgtttgattctaagaattgtttgtaagtatttttaatatattgtaaggagttatttacccaaaacacttgctccaattttgccccttataattgccaaattgtaagcatcaataagtaggtaagaacaatttatataaaaactgatagaaatgacaaattcggggtttcggcttgtccgggagtcaataagtacgcacagtgctctgctacattgtagagtttctgtagagatcaaatttgactccactttaggagtcccaaagcaaatgtccatgtctaagatgaatatttaacttgcatagtcattctgtgctatattgtaactgccagatggccagaaagaaggcaacagtggactcagacttctgaggaatttgggtttgttcccctttgtagactaatgtgtaggttgctgttgtgcgaagatcgtgtaactttagcagacatgtatttcttgcacagctaatagaagacaaagttgaaaaaaaggatgcaaaataaaaagctgcctaaggtgaaagttagaaattgtagacttttttttaccataatagtatgtgttcattgaagatgatttgggtttattttacagctatataaaacataatttgatgatgtacttctaacctttcaagcattttctgttattgactatataatatagcctccataaatgtttttaatgacaatattctgttgaacggttgtaccatactcagccatgccctttcattttgacgatagtgtttctaatattttgtatttttattcccctccccccatttttgtattacttaagatagattatcagaaagacagttactttgtcaaagagtatgggcacttgatacataatgccaaattattcttcataagagctgttgccaaatcagtgataatgttcatttaattgtattcttgccagccatgtttactggggtgatagttgttattgtggttgttattgttctttaggggtaggttcccaatatgtggtctttaaataattatctaatggtgtttaaaaagatgtttattctgtttgtcaggtacaaagatatttatgatacatgtatgacttgtctaagttattaacattttctctagccttaggtaatgcatgaaagcacatgtttcagtgccactcacataagaagtgcccggtaagtgttagctattattgtctacttgagttactactttctaaaagtatgttgaagtctttttctgtaattgcagatttgttgattttgcatttgagtattttctatattttgaagctgttagatgcatagtcatgatttttggtggaatgttttatcaatttttgaaaattgcctttgtctcatataatgcttttcatattgaactatattttgtctgctattaaatacttccaagcctga

SEQ ID NO: 368215 - DNA, 4934 bp, Homo sapiens
accattcttgctggtagccatcttgagtgagggcggaccagaggatgagagagctgtggcagggctactggaacgctgtccctcattgttttagccttctgtgcttcatctcgagctcagaagactagcgaagaacgaaaagtcttatatatttcgagactaaagaacccaggaacccaagaagactccttgaccacaacaaagatggcgaaatctgcctgttgctcgtgctagattgaggttacgtagattggcgtgctgcaaaccagctctaggcggctctgggtaagttgtcgttctgtgggctgcggaacgcagacttcggctggacttgcctgcggtgacacctgctcccctctgagagcttcaggttctccggcctgccttcactggtttgtgtccagagccggactgattctctcaatttgcgatcttcagcctgttaaacaagaaaacgaaaaaccccttccagaaaacatggatgcatttgaaaaagtgagaacaaaattagaaacacagccacaagaagaatatgaaatcatcaatgtggaagttaaacatggtggttttgtttattaccaagaaggttgttgcttggttcgttccaaagatgaagaagcagacaatgataattatgaagttttattcaatttggaggaacttaagttagaccagcccttcattgattgtatcagagttgctccagatgaaaaatatgtggctgccaagataagaactgaagattctgaagcatctacctgtgtaattataaagctcagcgatcagcccgtaatggaagcttctttcccgaatgtgtccagttttgaatgggtaaaggacgaggaagatgaagatgttttattctacaccttccagaggaaccttcgctgtcatgacgtatatcgagccacttttggtgataacaaacgtaatgaacgcttttacacagaaaaagacccaagctactttgttttcctttatcttactgtggttgatagatggcctgagcccttgggacccaccagtacttatccagaagcgaatacatggggtcctttactatgttgaacacagagatgatgaattatacattctcactaatgttggagaacctacagaatttaagctaatgagaacagcggctgatacccctgcaattatgaattgggatttattttttacaatgaagagaaatacaaaagtgatagacttggacatgtttaaggatcactgtgttctatttctgaagcacagcaatctcctttatgttaatgtgattggtctggctgatgattcagttcggtctctaaagctccctccttgggcctgtggattcataatggatacaaattctgacccaaagaactgcccctttcaactttgctctccaatacgtcccccaaaatattacacatacaagtttgcagaaggcaaactgtttgaggaaactgggcatgaagacccaatcacaaagactagtcgcgttttacgtctagaagccaaaagcaaggatggaaaattagtgccaatgactgttttccacaaaactgactctgaggacttgcagaagaaacctctcttggtacatgtatatggagcttatggaatggatttgaaaatgaatttcaggcctgagaggcgggtcctggtggatgatggatggatattagcatactgccatgttcgaggtggtggtgagttaggcctccagtggcacgctgatggccgcctaactaaaaaactcaatggccttgctgatttagaggcttgcattaagacgcttcatggccaaggcttttctcagccaagtctaacaaccctgactgctttcagtgctggaggggtgcttgcaggagcattgtgtaattctaatccagagctggtgagagcggtgactttggaggcacctttcttggatgttctcaacaccatgatggacactacacttcctctgacattagaagaattagaagaatgggggaatccttcatctgatgaaaaacacaagaactacataaaacgttactgtccctatcaaaatattaaacctcagcattatccttcaattcacataacggcatatgaaaacgatgaacgggtacctctgaaaggaattgtaagttatactgagaaactcaaggaagccatcgcggagcatgctaaggacacaggtgaaggctatcagacccctaatattattctagatattcagcctggaggcaatcatgtaattgaggattctcacaaaaagattacagcccaaattaaattcctgtacgaggaacttggacttgacagcaccagtgttttcgaggatcttaagaaatacctgaaattctgaaacactgcattcaactgggaattggaaacacactgaaatatttcatagtcttacttccaattgagttagcaaaaaaaaaattaataacttgagacttttaagttattaattttttaaaatgtgcttctccatctaaattttgcttagtctacatctcacttgcttatactattctctccattgatgcacatgcccattaacctaggaaagtagttttcaaatcatgctccttagaaggatgtggagtagagggaagggaaggattggtgatagcagagctccaggcctcccttccagtcagaacagttgagcagtttacaaattagtgtcctgcctctttgctagcaaatgcttttagacactgtggcagtgagtcatcctctaatttctatgactgcattttaagggaaaagataaaattcttccccttaaaattcgttaaagtttttgaataatctggggtcctaatgtgttctggtcatccctgattgatgctatctgaataaagttataagctcctataagccataatttacttttaaacattttatttttttcaaaacatttgagaacctttcttaaagcggttacattcaagctacagaaatatcgaagaattaatgattgttcaccaagcagcatgctgtacatgaagctattacaaatgcttacaatcccactgaaatgccagtgtcttcatctcttcataaaggtgcctaacacgaggtatacagtatgttcagtacactggaatagcatgctcgattggaaacaaagcatctatctctgaaagctgtttggcgatgaaggagattcttcgtgttgtgttcaaagatgagtccctctcccttgtccagaaaaatgccacttgtatcaactttactgcctttgtcggcagaattggtacttaaccttattcttattttagcgggaaggcccgaaatcatattatgtagatttaacagtgttgattctccaaaattcagaaccacgataaagattctgtcgatgccatccagctctcttgtgtacacaacatagtggctgtcattcctcaaatggcaaaaccagcccctgttgaggagtagctcattggcatgaagtagacttaaatcttgatataacttcaaagccgatctgggctgagtcttttggacctatttttttaaaaaagtatttacgtaagtgtttgattctaagaattgtttgtaagtatttttaatatattgtaaggagttatttacccaaaacacttgctccaattttgccccttataattgccaaattgtaagcatcaataagtaggtaagaacaatttatataaaaactgatagaaatgacaaattcggggtttcggcttgtccgggagtcaataagtacgcacagtgctctgctacattgtagagtttctgtagagatcaaatttgactccactttaggagtcccaaagcaaatgtccatgtctaagatgaatatttaacttgcatagtcattctgtgctatattgtaactgccagatggccagaaagaaggcaacagtggactcagacttctgaggaatttgggtttgttcccctttgtagactaatgtgtaggttgctgttgtgcgaagatcgtgtaactttagcagacatgtatttcttgcacagctaatagaagacaaagttgaaaaaaaggatgcaaaataaaaagctgcctaaggtgaaagttagaaattgtagacttttttttaccataatagtatgtgttcattgaagatgatttgggtttattttacagctatataaaacataatttgatgatgtacttctaacctttcaagcattttctgttattgactatataatatagcctccataaatgtttttaatgacaatattctgttgaacggttgtaccatactcagccatgccctttcattttgacgatagtgtttctaatattttgtatttttattcccctccccccatttttgtattacttaagatagattatcagaaagacagttactttgtcaaagagtatgggcacttgatacataatgccaaattattcttcataagagctgttgccaaatcagtgataatgttcatttaattgtattcttgccagccatgtttactggggtgatagttgttattgtggttgttattgttctttaggggtaggttcccaatatgtggtctttaaataattatctaatggtgtttaaaaagatgtttattctgtttgtcaggtacaaagatatttatgatacatgtatgacttgtctaagttattaacattttctctagccttaggtaatgcatgaaagcacatgtttcagtgccactcacataagaagtgcccggtaagtgttagctattattgtctacttgagttactactttctaaaagtatgttgaagtctttttctgtaattgcagatttgttgattttgcatttgagtattttctatattttgaagctgttagatgcatagtcatgatttttggtggaatgttttatcaatttttgaaaattgcctttgtctcatataatgcttttcatattgaactatattttgtctgctattaaatacttccaagcctga

SEQ ID NO: 368216 - DNA, 5299 bp, Homo sapiens
accattcttgctggtagccatcttgagtgagggcggaccagaggatgagagagctgtggcagggctactggaacgctgtccctcattgttttagccttctgtgcttcatctcgagctcagaagactagcgaagaacgaaaagtcttatatatttcgagactaaagaacccaggaacccaagaagactccttgaccacaacaaagatggcgaaatctgcctgttgctcgtgctagattgaggttacgtagattggcgtgctgcaaaccagctctaggcggctctgggtaagttgtcgttctgtgggctgcggaacgcagacttcggctggacttgcctgcggtgacacctgctcccctctgagagcttcaggttctccggcctgccttcactggtttgtgtccagagccggactgattctctcaatttgcatgaagaaactgaggcccggagacacagttaagtgtaggagctaagacctcaacccagccccaaaaggagcataaaccagggactttgatatcatgcagcagaagaccaaattatttctccaagctttgaagtatagtattcctcaccttggaaaatgcatgcagaaacagcatttgaatcactataacttcgctgatcattgttacaatagaataaaattgaaaaaatatcacctaaccaagtgtcttcagaataaacccaagatatcagagttagcaagaaacatcccaagtcggagcttctcatgtaaggatcttcagcctgttaaacaagaaaacgaaaaaccccttccagaaaacatggatgcatttgaaaaagtgagaacaaaattagaaacacagccacaagaagaatatgaaatcatcaatgtggaagttaaacatggtggttttgtttattaccaagaaggttgttgcttggttcgttccaaagatgaagaagcagacaatgataattatgaagttttattcaatttggaggaacttaagttagaccagcccttcattgattgtatcagagttgctccagatgaaaaatatgtggctgccaagataagaactgaagattctgaagcatctacctgtgtaattataaagctcagcgatcagcccgtaatggaagcttctttcccgaatgtgtccagttttgaatgggtaaaggacgaggaagatgaagatgttttattctacaccttccagaggaaccttcgctgtcatgacgtatatcgagccacttttggtgataacaaacgtaatgaacgcttttacacagaaaaagacccaagctactttgttttcctttatcttacaaaagacagtcgtttcctcaccataaatattatgaacaagactacttctgaagtgtggttgatagatggcctgagcccttgggacccaccagtacttatccagaagcgaatacatggggtcctttactatgttgaacacagagatgatgaattatacattctcactaatgttggagaacctacagaatttaagctaatgagaacagcggctgatacccctgcaattatgaattgggatttattttttacaatgaagagaaatacaaaagtgatagacttggacatgtttaaggatcactgtgttctatttctgaagcacagcaatctcctttatgttaatgtgattggtctggctgatgattcagttcggtctctaaagctccctccttgggcctgtggattcataatggatacaaattctgacccaaagaactgcccctttcaactttgctctccaatacgtcccccaaaatattacacatacaagtttgcagaaggcaaactgtttgaggaaactgggcatgaagacccaatcacaaagactagtcgcgttttacgtctagaagccaaaagcaaggatggaaaattagtgccaatgactgttttccacaaaactgactctgaggacttgcagaagaaacctctcttggtacatgtatatggagcttatggaatggatttgaaaatgaatttcaggcctgagaggcgggtcctggtggatgatggatggatattagcatactgccatgttcgaggtggtggtgagttaggcctccagtggcacgctgatggccgcctaactaaaaaactcaatggccttgctgatttagaggcttgcattaagacgcttcatggccaaggcttttctcagccaagtctaacaaccctgactgctttcagtgctggaggggtgcttgcaggagcattgtgtaattctaatccagagctggtgagagcggtgactttggaggcacctttcttggatgttctcaacaccatgatggacactacacttcctctgacattagaagaattagaagaatgggggaatccttcatctgatgaaaaacacaagaactacataaaacgttactgtccctatcaaaatattaaacctcagcattatccttcaattcacataacggcatatgaaaacgatgaacgggtacctctgaaaggaattgtaagttatactgagaaactcaaggaagccatcgcggagcatgctaaggacacaggtgaaggctatcagacccctaatattattctagatattcagcctggaggcaatcatgtaattgaggattctcacaaaaagattacagcccaaattaaattcctgtacgaggaacttggacttgacagcaccagtgttttcgaggatcttaagaaatacctgaaattctgaaacactgcattcaactgggaattggaaacacactgaaatatttcatagtcttacttccaattgagttagcaaaaaaaaaattaataacttgagacttttaagttattaattttttaaaatgtgcttctccatctaaattttgcttagtctacatctcacttgcttatactattctctccattgatgcacatgcccattaacctaggaaagtagttttcaaatcatgctccttagaaggatgtggagtagagggaagggaaggattggtgatagcagagctccaggcctcccttccagtcagaacagttgagcagtttacaaattagtgtcctgcctctttgctagcaaatgcttttagacactgtggcagtgagtcatcctctaatttctatgactgcattttaagggaaaagataaaattcttccccttaaaattcgttaaagtttttgaataatctggggtcctaatgtgttctggtcatccctgattgatgctatctgaataaagttataagctcctataagccataatttacttttaaacattttatttttttcaaaacatttgagaacctttcttaaagcggttacattcaagctacagaaatatcgaagaattaatgattgttcaccaagcagcatgctgtacatgaagctattacaaatgcttacaatcccactgaaatgccagtgtcttcatctcttcataaaggtgcctaacacgaggtatacagtatgttcagtacactggaatagcatgctcgattggaaacaaagcatctatctctgaaagctgtttggcgatgaaggagattcttcgtgttgtgttcaaagatgagtccctctcccttgtccagaaaaatgccacttgtatcaactttactgcctttgtcggcagaattggtacttaaccttattcttattttagcgggaaggcccgaaatcatattatgtagatttaacagtgttgattctccaaaattcagaaccacgataaagattctgtcgatgccatccagctctcttgtgtacacaacatagtggctgtcattcctcaaatggcaaaaccagcccctgttgaggagtagctcattggcatgaagtagacttaaatcttgatataacttcaaagccgatctgggctgagtcttttggacctatttttttaaaaaagtatttacgtaagtgtttgattctaagaattgtttgtaagtatttttaatatattgtaaggagttatttacccaaaacacttgctccaattttgccccttataattgccaaattgtaagcatcaataagtaggtaagaacaatttatataaaaactgatagaaatgacaaattcggggtttcggcttgtccgggagtcaataagtacgcacagtgctctgctacattgtagagtttctgtagagatcaaatttgactccactttaggagtcccaaagcaaatgtccatgtctaagatgaatatttaacttgcatagtcattctgtgctatattgtaactgccagatggccagaaagaaggcaacagtggactcagacttctgaggaatttgggtttgttcccctttgtagactaatgtgtaggttgctgttgtgcgaagatcgtgtaactttagcagacatgtatttcttgcacagctaatagaagacaaagttgaaaaaaaggatgcaaaataaaaagctgcctaaggtgaaagttagaaattgtagacttttttttaccataatagtatgtgttcattgaagatgatttgggtttattttacagctatataaaacataatttgatgatgtacttctaacctttcaagcattttctgttattgactatataatatagcctccataaatgtttttaatgacaatattctgttgaacggttgtaccatactcagccatgccctttcattttgacgatagtgtttctaatattttgtatttttattcccctccccccatttttgtattacttaagatagattatcagaaagacagttactttgtcaaagagtatgggcacttgatacataatgccaaattattcttcataagagctgttgccaaatcagtgataatgttcatttaattgtattcttgccagccatgtttactggggtgatagttgttattgtggttgttattgttctttaggggtaggttcccaatatgtggtctttaaataattatctaatggtgtttaaaaagatgtttattctgtttgtcaggtacaaagatatttatgatacatgtatgacttgtctaagttattaacattttctctagccttaggtaatgcatgaaagcacatgtttcagtgccactcacataagaagtgcccggtaagtgttagctattattgtctacttgagttactactttctaaaagtatgttgaagtctttttctgtaattgcagatttgttgattttgcatttgagtattttctatattttgaagctgttagatgcatagtcatgatttttggtggaatgttttatcaatttttgaaaattgcctttgtctcatataatgcttttcatattgaactatattttgtctgctattaaatacttccaagcctga

SEQ ID NO: 368217 - DNA, 4933 bp, Homo sapiens
accattcttgctggtagccatcttgagtgagggcggaccagaggatgagagagctgtggcagggctactggaacgctgtccctcattgttttagccttctgtgcttcatctcgagctcagaagactagcgaagaacgaaaagtcttatatatttcgagactaaagaacccaggaacccaagaagactccttgaccacaacaaagatggcgaaatctgcctgttgctcgtgctagattgaggttacgtagattggcgtgctgcaaaccagctctaggcggctctgggtaagttgtcgttctgtgggctgcggaacgcagacttcggctggacttgcctgcggtgacacctgctcccctctgagagcttcaggttctccggcctgccttcactggtttgtgtccagagccggactgattctctcaatttgcgatcttcagcctgttaaacaagaaaacgaaaaaccccttccagaaaacatggatgcatttgaaaaagtgagaacaaaattagaaacacagccacaagaagaatatgaaatcatcaatgtggaagttaaacatggtggttttgtttattaccaagaaggttgttgcttggttcgttccaaagatgaagaagcagacaatgataattatgaagttttattcaatttggaggaacttaagttagaccagcccttcattgattgtatcagagttgctccagatgaaaaatatgtggctgccaagataagaactgaagattctgaagcatctacctgtgtaattataaagctcagcgatcagcccgtaatggaagcttctttcccgaatgtgtccagttttgaatgggtaaaggacgaggaagatgaagatgttttattctacaccttccagaggaaccttcgctgtcatgacgtatatcgagccacttttggtgataacaaacgtaatgaacgcttttacacagaaaaagacccaagctactttgttttcctttatcttacaaaagacagtcgtttcctcaccataaatattatgaacaagactacttctgaagtgtggttgatagatggcctgagcccttgggacccaccagtacttatccagaagcgaatacatggggtcctttactatgttgaacacagagatgatgaattatacattctcactaatgttggagaacctacagaatttaagctaatgagaacagcggctgatacccctgcaattatgaattgggatttattttttacaatgaagagaaatacaaaagtgatagacttggacatgtttaaggatcactgtgttctatttctgaagcacagcaatctcctttatgttaatgtgattggtctggctgatgattcagttcggtctctaaagctccctccttgggcctgtggattcataatggatacaaattctgacccaaagaactgcccctttcaactttgctctccaatacgtcccccaaaatattacacatacaagtttgcagaaggcaaactgtttgaggaaactgggcatgaagacccaatcacaaagactagtcgcgttttacgtctagaagccaaaagcaaggatggaaaattagtgccaatgactgttttccacaaaactgactctgaggacttgcagaagaaacctctcttggtacatgtatatggagcttatggaatggatttgaaaatgaatttcaggcctgagaggcgggtcctggtggatgatggatggatattagcatactgccatgttcgaggtggtggtgagttaggcctccagtggcacgctgatggccgcctaactaaaaaactcaatggccttgctgatttagaggcttgcattaagacgcttcatggccaaggcttttctcagccaagtctaacaaccctgactgctttcagtgctggaggggtgcttgcaggagcattgtgtaattctaatccagagctggtgagagcggtgactttggaggcacctttcttggatgttctcaacaccatgatggacactacacttcctctgacattagaagaattagaagaatgggggaatccttcatctgatgaaaaacacaagaactacataaaacgttactgtccctatcaaaatattaaacctcagcattatccttcaattcacataacggcatatgaaaacgatgaacgggtacctctgaaaggaattgtaagttatactgagaaactcaaggaagccatcgcggagcatgctaaggacacaggtgaaggctatcagacccctaatattattctagatattcagcctggaggcaatcatgtaattgaggattctcacaaaaagattacagcccaaattaaattcctgtacgaggaacttggacttgacagcaccagtgttttcgaggatcttaagaaatacctgaaattctgaaacactgcattcaactgggaattggaaacacactgaaatatttcatagtcttacttccaattgagttagcaaaaaaaaaattaataacttgagacttttaagttattaattttttaaaatgtgcttctccatctaaattttgcttagtctacatctcacttgcttatactattctctccattgatgcacatgcccattaacctaggaaagtagttttcaaatcatgctccttagaaggatgtggagtagagggaagggaaggattggtgatagcagagctccaggcctcccttccagtcagaacagttgagcagtttacaaattagtgtcctgcctctttgctagcaaatgcttttagacactgtggcagtgagtcatcctctaatttctatgactgcattttaagggaaaagataaaattcttccccttaaaattcgttaaagtttttgaataatctggggtcctaatgtgttctggtcatccctgattgatgctatctgaataaagttataagctcctataagccataatttacttttaaacattttatttttttcaaaacatttgagaacctttcttaaagcggttacattcaagctacagaaatatcgaagaattaatgattgttcaccaagcagcatgctgtacatgaagctattacaaatgcttacaatcccactgaaatgccagtgtcttcatctcttcataaaggtgcctaacacgaggtatacagtatgttcagtacactggaatagcatgctcgattggaaacaaagcatctatctctgaaagctgtttggcgatgaaggagattcttcgtgttgtgttcaaagatgagtccctctcccttgtccagaaaaatgccacttgtatcaactttactgcctttgtcggcagaattggtacttaaccttattcttattttagcgggaaggcccgaaatcatattatgtagatttaacagtgttgattctccaaaattcagaaccacgataaagattctgtcgatgccatccagctctcttgtgtacacaacatagtggctgtcattcctcaaatggcaaaaccagcccctgttgaggagtagctcattggcatgaagtagacttaaatcttgatataacttcaaagccgatctgggctgagtcttttggacctatttttttaaaaaagtatttacgtaagtgtttgattctaagaattgtttgtaagtatttttaatatattgtaaggagttatttacccaaaacacttgctccaattttgccccttataattgccaaattgtaagcatcaataagtaggtaagaacaatttatataaaaactgatagaaatgacaaattcggggtttcggcttgtccgggagtcaataagtacgcacagtgctctgctacattgtagagtttctgtagagatcaaatttgactccactttaggagtcccaaagcaaatgtccatgtctaagatgaatatttaacttgcatagtcattctgtgctatattgtaactgccagatggccagaaagaaggcaacagtggactcagacttctgaggaatttgggtttgttcccctttgtagactaatgtgtaggttgctgttgtgcgaagatcgtgtaactttagcagacatgtatttcttgcacagctaatagaagacaaagttgaaaaaaaggatgcaaaataaaaagctgcctaaggtgaaagttagaaattgtagacttttttttaccataatagtatgtgttcattgaagatgatttgggtttattttacagctatattatataatatagcctccataaatgtttttaatgacaatattctgttgaacggttgtaccatactcagccatgccctttcattttgacgatagtgtttctaatattttgtatttttattcccctccccccatttttgtattacttaagatagattatcagaaagacagttactttgtcaaagagtatgggcacttgatacataatgccaaattattcttcataagagctgttgccaaatcagtgataatgttcatttaattgtattcttgccagccatgtttactggggtgatagttgttattgtggttgttattgttctttaggggtaggttcccaatatgtggtctttaaataattatctaatggtgtttaaaaagatgtttattctgtttgtcaggtacaaagatatttatgatacatgtatgacttgtctaagttattaacattttctctagccttaggtaatgcatgaaagcacatgtttcagtgccactcacataagaagtgcccggtaagtgttagctattattgtctacttgagttactactttctaaaagtatgttgaagtctttttctgtaattgcagatttgttgattttgcatttgagtattttctatattttgaagctgttagatgcatagtcatgatttttggtggaatgttttatcaatttttgaaaattgcctttgtctcatataatgcttttcatattgaactatattttgtctgctattaaatacttccaagcctga

SEQ ID NO: 368218 - DNA, 3281 bp, Homo sapiens
ttccactaaaacttttttgcccttcaatttcagaggtggtggtgagttaggcctccagtggcacgctgatggccgcctaactaaaaaactcaatggccttgctgatttagaggcttgcattaagacgcttcatggccaaggcttttctcagccaagtctaacaaccctgactgctttcagtgctggaggggtgcttgcaggagcattgtgtaattctaatccagagctggtgagagcggtgactttggaggcacctttcttggatgttctcaacaccatgatggacactacacttcctctgacattagaagaattagaagaatgggggaatccttcatctgatgaaaaacacaagaactacataaaacgttactgtccctatcaaaatattaaacctcagcattatccttcaattcacataacggcatatgaaaacgatgaacgggtacctctgaaaggaattgtaagttatactgagaaactcaaggaagccatcgcggagcatgctaaggacacaggtgaaggctatcagacccctaatattattctagatattcagcctggaggcaatcatgtaattgaggattctcacaaaaagattacagcccaaattaaattcctgtacgaggaacttggacttgacagcaccagtgttttcgaggatcttaagaaatacctgaaattctgaaacactgcattcaactgggaattggaaacacactgaaatatttcatagtcttacttccaattgagttagcaaaaaaaaaattaataacttgagacttttaagttattaattttttaaaatgtgcttctccatctaaattttgcttagtctacatctcacttgcttatactattctctccattgatgcacatgcccattaacctaggaaagtagttttcaaatcatgctccttagaaggatgtggagtagagggaagggaaggattggtgatagcagagctccaggcctcccttccagtcagaacagttgagcagtttacaaattagtgtcctgcctctttgctagcaaatgcttttagacactgtggcagtgagtcatcctctaatttctatgactgcattttaagggaaaagataaaattcttccccttaaaattcgttaaagtttttgaataatctggggtcctaatgtgttctggtcatccctgattgatgctatctgaataaagttataagctcctataagccataatttacttttaaacattttatttttttcaaaacatttgagaacctttcttaaagcggttacattcaagctacagaaatatcgaagaattaatgattgttcaccaagcagcatgctgtacatgaagctattacaaatgcttacaatcccactgaaatgccagtgtcttcatctcttcataaaggtgcctaacacgaggtatacagtatgttcagtacactggaatagcatgctcgattggaaacaaagcatctatctctgaaagctgtttggcgatgaaggagattcttcgtgttgtgttcaaagatgagtccctctcccttgtccagaaaaatgccacttgtatcaactttactgcctttgtcggcagaattggtacttaaccttattcttattttagcgggaaggcccgaaatcatattatgtagatttaacagtgttgattctccaaaattcagaaccacgataaagattctgtcgatgccatccagctctcttgtgtacacaacatagtggctgtcattcctcaaatggcaaaaccagcccctgttgaggagtagctcattggcatgaagtagacttaaatcttgatataacttcaaagccgatctgggctgagtcttttggacctatttttttaaaaaagtatttacgtaagtgtttgattctaagaattgtttgtaagtatttttaatatattgtaaggagttatttacccaaaacacttgctccaattttgccccttataattgccaaattgtaagcatcaataagtaggtaagaacaatttatataaaaactgatagaaatgacaaattcggggtttcggcttgtccgggagtcaataagtacgcacagtgctctgctacattgtagagtttctgtagagatcaaatttgactccactttaggagtcccaaagcaaatgtccatgtctaagatgaatatttaacttgcatagtcattctgtgctatattgtaactgccagatggccagaaagaaggcaacagtggactcagacttctgaggaatttgggtttgttcccctttgtagactaatgtgtaggttgctgttgtgcgaagatcgtgtaactttagcagacatgtatttcttgcacagctaatagaagacaaagttgaaaaaaaggatgcaaaataaaaagctgcctaaggtgaaagttagaaattgtagacttttttttaccataatagtatgtgttcattgaagatgatttgggtttattttacagctatataaaacataatttgatgatgtacttctaacctttcaagcattttctgttattgactatataatatagcctccataaatgtttttaatgacaatattctgttgaacggttgtaccatactcagccatgccctttcattttgacgatagtgtttctaatattttgtatttttattcccctccccccatttttgtattacttaagatagattatcagaaagacagttactttgtcaaagagtatgggcacttgatacataatgccaaattattcttcataagagctgttgccaaatcagtgataatgttcatttaattgtattcttgccagccatgtttactggggtgatagttgttattgtggttgttattgttctttaggggtaggttcccaatatgtggtctttaaataattatctaatggtgtttaaaaagatgtttattctgtttgtcaggtacaaagatatttatgatacatgtatgacttgtctaagttattaacattttctctagccttaggtaatgcatgaaagcacatgtttcagtgccactcacataagaagtgcccggtaagtgttagctattattgtctacttgagttactactttctaaaagtatgttgaagtctttttctgtaattgcagatttgttgattttgcatttgagtattttctatattttgaagctgttagatgcatagtcatgatttttggtggaatgttttatcaatttttgaaaattgcctttgtctcatataatgcttttcatattgaactatattttgtctgctattaaatacttccaagcctga

SEQ ID NO: 368219 - DNA, 2096 bp, Homo sapiens
accattcttgctggtagccatcttgagtgagggcggaccagaggatgagagagctgtggcagggctactggaacgctgtccctcattgttttagccttctgtgcttcatctcgagctcagaagactagcgaagaacgaaaagtcttatatatttcgagactaaagaacccaggaacccaagaagactccttgaccacaacaaagatggcgaaatctgcctgttgctcgtgctagattgaggttacgtagattggcgtgctgcaaaccagctctaggcggctctgggtaagttgtcgttctgtgggctgcggaacgcagacttcggctggacttgcctgcggtgacacctgctcccctctgagagcttcaggttctccggcctgccttcactggtttgtgtccagagccggactgattctctcaatttgcgatcttcagcctgttaaacaagaaaacgaaaaaccccttccagaaaacatggatgcatttgaaaaagtgagaacaaaattagaaacacagccacaagaagaatatgaaatcatcaatgtggaagttaaacatggtggttttgtttattaccaagaaggttgttgcttggttcgttccaaagatgaagaagcagacaatgataattatgaagttttattcaatttggaggaacttaagttagaccagcccttcattgattgtatcagagttgctccagatgaaaaatatgtggctgccaagataagaactgaagattctgaagcatctacctgtgtaattataaagctcagcgatcagcccgtaatggaagcttctttcccgaatgtgtccagttttgaatgggtaaaggacgaggaagatgaagatgttttattctacaccttccagaggaaccttcgctgtcatgacgtatatcgagccacttttggtgataacaaacgtaatgaacgcttttacacagaaaaagacccaagctactttgttttcctttatcttacaaaagacagtcgtttcctcaccataaatattatgaacaagactacttctgaagtgtggttgatagatggcctgagcccttgggacccaccagtacttatccagaagcgaatacatggggtcctttactatgttgaacacagagatgatgaattatacattctcactaatgttggagaacctacagaatttaagctaatgagaacagcggctgatacccctgcaattatgaattgggatttattttttacaatgaagagaaatacaaaagtgatagacttggacatgtttaaggatcactgtgttctatttctgaagcacagcaatctcctttatgttaatgtgattggtctggctgatgattcagttcggtctctaaagctccctccttgggcctgtggattcataatggatacaaattctgacccaaagaactgcccctttcaactttgctctccaatacgtcccccaaaatattacacatacaagtttgcagaaggcaaactgtttgaggaaactgggcatgaagacccaatcacaaagactagtcgcgttttacgtctagaagccaaaagcaaggatggaaaattagtgccaatgactgttttccacaaaactgactctgaggacttgcagaagaaacctctcttggtacatgtatatggagcttatggaatggatttgaaaatgaatttcaggcctgagaggcgggtcctggtggatgatggatggatattagcatactgccatgttcgaggtggtggtgagttaggcctccagtggcacgctgatggccgcctaactaaaaaactcaatggccttgctgatttagaggcttgcattaagacgcttcatggccaaggcttttctcagccaagtctaacaaccctgactgctttcagtgctggaggggtgcttgcaggagcattgtgtaattctaatccagagctggtgagagcggtgactttggaggccccctttttggatgttttcaaccccatgatgggccctacccttcctttgaccttaaaaaaattaaaagaatggggggatccttcctttgatgaaaaacccaaaaactatccaactcctgagcccaccactttatatga

SEQ ID NO: 368220 - DNA, 420 bp, Homo sapiens
agaggtggtggtgagttaggcctccagtggcacgctgatggccgcctaactaaaaaactcaatggccttgctgatttagaggcttgcattaagacgcttcatggccaaggcttttctcagccaagtctaacaaccctgactgctttcagtgctggaggggtgcttgcaggagcattgtgtaattctaatccagagctggtgagagcggtgactttggaggtgagtacgctctgtctctactgtttatagaatgggggaggtgtgaagccataggctactctaagaaaaatgtttttgggctggcacagcggctcatgcctgtaatcccagcacttcgggaaactgaggtgggcagattgcttaccaggagctcgagaccagcctgggcaacatggcgagaccctgtctctgcaagaaatt

SEQ ID NO: 368221 - DNA, 1846 bp, Homo sapiens
gaaaaaaagaaacagttttccagtgaggcttgtcagggggaagactgatcgccggcaggccggctcggaccatgagcacagttccaagaatgcagggatgaggaggagccgggctgggctgttgagtccaggctgagcccacacatcatgttcctctctcagagcatcttgacaggagggaaccatctctgtgggacccgcctctgccatgaaattgcccatgcctggtttggcctagccatcggggcccgagactggacggaggagtggctgagtgaaggcttcgccactcacttggaggatgtgttttgggccacagcacagcagctggccccctatgaggcccgggagcagcaggagctgagggcttgtctgcgctggcgtcgcctccaggacgagatgcaatgctcccccgaggagatgcaggtgttaaggtttccacatgttggcggatgcagtggaagcttctcttgagatctttgccacactgttcaacatgtttgaccactctgtcctaaaaacgctttcttcttaaagcactttctcctcctggcttctgtgtgtcttactctccttgagttccctctgcctctgtggccagtccttcctcacctctcttgctggcaggttaacagtctccacttcaatagcccaaggctcagaaagactgagtaatgcgtctaacctcctctagctgataaagaaccaaggctcagaaagactgaataacgtgtctaacctcctctagctgataaagaagagaacagggatttaaacccagggacggaaactcttctcggttccctataccatattcctgtcttcagggaactgagagcatttagttgcattaaaacaaataaaaaaacaaacaaacaaaaaacctgcaggtatcttgggctctggaaggacatacaggtcagggtgaaaagtatgcttggtccaagcatcttttttcttttaacacatgaagtatgtgtcttattattttaaaagacattgagaaaaaggaacattcaacattctcttggttatagatactggagtattaacaaagtgaaaagagaaaaactaaaatttgttggctctgacttactagttttagtaatttataagaacagctttccatttgtgcctttcatacatccactgagtcatgaggtttcatcaaatgtttctttttttcttttctttctttctttcttttttttttttttttaagacagagtctttgctctgtcgcccaggctggagtgcaggggatgatctctgctcactggaacctctgcctcctggattcaagtgattctcccacctcagtctcccaagtagctggaactgtaggcatgtgccatatgcccggctaatttttgtatttttagtagagacagggtttcaccatgttggccaggctggtctcaaactcctaacctcaagtgatctgcctgcttcggcctcccaaagtgctgggattataggcgtgaaccactgcgcccagcccagatgtttcttagattgactttgctgtgtttcctttgtatccgatgtgtctgagattgacttccttgtaagtcattcgttaacaggtttcttgtattttcctagccttctcagccttcattggctggagagcctgtaatgtggctacaggcttctgaggcaagacgatttgctcagtttcaaaatgttaggggtcacatgccatttttcatttgttaattattgaagatgtctttcccacagataagaccccaaggactctcccagactcttcatctcctctctggccctgggcagaactcttccccaggcaaagtctgatttcagtgttcctttctgtcctgcc

SEQ ID NO: 368222 - DNA, 1396 bp, Homo sapiens
cgcggccgcgcctgaggtgatgcggaccccgggcgggcgcagggcgcgggctccggcgccgccgctgcgtcctccccggccgcgggcgagccgctgcagagggagcgtcgcgccggggcggagtgcgggcttgcgcggcaagtgcgcgccgaggtcacgaaatggattggagtgaaccggagaccccgaaaacggaagcgcagggagaaggaagaggtgtttgaaaagttttgatttgaagttcctttaaaggctgttggagcttttgcaaatacccagctaatgaaaggcacttaagattgggcccatctgcatcatcacattgaagttttctgtctaaaggaaggttccagctacctgttacccttttgctaaacacagttgcagtgttgcagtgtatttcatgacaaaagtgcactctagttttctgtgaaatgattattttctctgaaatgattcttggtcatgttgagcttctaaatgttaaagagaacatagtgcttttgacctgtggaaatctcatcttggtaccatggtgctgcacagaccatcaggaagaactgaaaagttcaggcaacttgagaaaataaagtcaccaccagcaagaagctgtctaaaataaccggaagattataacccaagcacgtggaggagtgtgctagtgagtagaatgttatgaaagctactagaggtcctccatagatgcatgtgctagtcctaaggagaaggaagaggagaaggattgccacggaggaacacctgaagtttcagttgagcactttgtttggaaagttgtccaaggctggagttgtgagagctgggaaagacctcacaagcttctctaattcaagtccttgtttcacatatgagaatgcagaggccctgagaagttgattcccaggcctgcatgctggcctggaactagagcctgggtctcctcttgctttttccagctgtctgcccaggtagctccccaaggcaggcatggaggcagagctgctttgggttccaggtaaggagagatgtgtccaggtggcctttgttgtattgtggggcacagacactgagggagacagggaaaggtctgggagacacaagatggtaccccagaaggccatcctttgtagactagacacacatccaaagggagggctgtttcctggcttattgaggacttttccatttgggctagaagtaaactgagtcagattttgagagatcagtaattccaaagagcagataaggattctatagtaacacagctgggttcactgcacgggttgatgtcaaattgtgcttttcatgttacattagtggattttacaaggcacagattatttgacatttttgtgatgcttgttatagaccaactgtgacatgacagtattattaaaaa

SEQ ID NO: 368223 - DNA, 1931 bp, Homo sapiens
aagaatgctagtgttgtggagaggttctctctgcctcttggctgcagcacacaggcgctgggtggtcagacctgcttccgaggctggctccacagtgactgtgcaaccgcatgtcatcctgtgaaagggcagatacgtgcctcgtcagagccttgtgggagttagtgaggggacttctctaaggcagctagtactcactcaatacttaatgcatcttaaggcacctcttcacagaaggcggtggaaggctgcttacgtgatggcatgtggatagcgatgccatccgtttgtttttttctcctccatgacagagaagcaggaaaacattcctaaatttatttatagacgttaaaaaaaaatcaggcttggttttttcctgtaactgttcttcagccggcagcaagtatagcagcaagtatacagcagcaagtatacagcagcaagtatacagcagcaagtacagcagcagcaagtacagcagcagtactttatgagttgttgtgtttattccctgccttttggctttactcaagaaaaccagttgtgtttctcagagcaactgtattgttttatttgccactctcttcactttgtccattatagtacaatagattgtccttgtcccatctccaaattggaagctccctaggtggtggtcaggctgttgatgagatttgtattctatcaaagctccattttagataatctatcatcattttttatacgcagtaagtcgctgattttgtttctttttttcaaacagttttgatttgaagttcctttaaaggctgttggagcttttgcaaatacccagctaatgaaaggcacttaagattgggcccatctgcatcatcacattgaagttttctgtctaaaggaaggttccagctacctgttacccttttgctaaacacagttgcagtgttgcagtgtatttcatgacaaaagtgcactctagttttctgtgaaatgattattttctctgaaatgattcttggtcatgttgagcttctaaatgttaaagagaacatagtgcttttgacctgtggaaatctcatcttggtaccatggtgctgcacagaccatcaggaagaactgaaaagttcaggcaacttgagaaaataaagtcaccaccagcaagaagctgtctaaaataaccggaagattataacccaagcacgtggaggagtgtgctagtgagtagaatgttatgaaagctactagaggtcctccatagatgcatgtgctagtcctaaggagaaggaagaggagaaggattgccacggaggaacacctgaagtttcagttgagcactttgtttggaaagttgtccaaggctggagttgtgagagctgggaaagacctcacaagcttctctaattcaagtccttgtttcacatatgagaatgcagaggccctgagaagttgattcccaggcctgcatgctggcctggaactagagcctgggtctcctcttgctttttccagctgtctgcccaggtagctccccaaggcaggcatggaggcagagctgctttgggttccaggtaaggagagatgtgtccaggtggcctttgttgtattgtggggcacagacactgagggagacagggaaaggtctgggagacacaagatggtaccccagaaggccatcctttgtagactagacacacatccaaagggagggctgtttcctggcttattgaggacttttccatttgggctagaagtaaactgagtcagattttgagagatcagtaattccaaagagcagataaggattctatagtaacacagctgggttcactgcacgggttgatgtcaaattgtgcttttcatgttacattagtggattttacaaggcacagattatttgacatttttgtgatgcttgttatagaccaactgtgacatgacagtattattaaaaa

SEQ ID NO: 368224 - DNA, 2149 bp, Homo sapiens
aagaatgctagtgttgtggagaggttctctctgcctcttggctgcagcacacaggcgctgggtggtcagacctgcttccgaggctggctccacagtgactgtgcaaccgcatgtcatcctgtgaaagggcagatacgtgcctcgtcagagccttgtgggagttagtgaggggacttctctaaggcagctagtactcactcaatacttaatgcatcttaaggcacctcttcacagaaggcggtggaaggctgcttacgtgatggcatgtggatagcgatgccatccgtttgtttttttctcctccatgacagagaagcaggaaaacattcctaaatttatttatagacgttaaaaaaaaatcaggcttggttttttcctgtaactgttcttcagccggcagcaagtatagcagcaagtatacagcagcaagtatacagcagcaagtatacagcagcaagtacagcagcagcaagtacagcagcagtactttatgagttgttgtgtttattccctgccttttggctttactcaagaaaaccagttgtgtttctcagagcaactgtattgttttatttgccactctcttcactttgtccattatagtacaatagattgtccttgtcccatctccaaattggaagctccctaggtggtggtcaggctgttgatgagatttgtattctatcaaagctccattttagataatctatcatcattttttatacgcagtaagtcgctgattttgtttctttttttcaaacagttttgatttgaagttcctttaaaggctgttggagcttttgcaaatacccagctaatgaaaggcacttaagattgggcccatctgcatcatcacattgaagttttctgtctaaaggaaggttccagctacctgttacccttttgctaaacacagttgcagtgttgcagtgtatttcatgacaaaagtgcactctagttttctgtgaaatgattattttctctgaaatgattcttggtcatgttgagcttctaaatgttaaagagaacatagtgcttttgacctgtggaaatctcatcttggtaccatggtgctgcacagaccatcaggaagaactgaaaagttcaggcaacttgagaaaataaagtcaccaccagcaagaagctgtctaaaataaccggaagattataacccaagcacgtggaggagtgtgctagtgagtagaatgttatgaaagctactagaggtcctccatagatgcatgtgctagtcctaaggagaaggaagaggagaaggattgccacggaggaacacctgaagtttcagttgagcactttgtttggaaagttgtccaaggctggagttgtgagagctgggaaagacctcacaagcttctctaattcaagtccttgtttcacatatgagaatgcagaggccctgagaagttgattcccaggcctgcatgctggcctggaactagagcctgggtctcctcttgctttttccagctgtctgcccaggtagctccccaaggcaggcatggaggcagagctgctttgggttccagggggcaggtttgggctggggcctgctgtgtgaccacagtctcccatcttggattgaagctacatcgctgtgtgcatctaactcttgattcacggtctgaccgacgccttggtttctggagaactgccctcgtttatggaagagtcactgtcatcaggagccatcccagggagaggctcagtgggaagtgtaaaggtggagcaagtaaaccggctccagaagagaaggcgaagaaggactatttctgtttagatttgcttaaccgcattttcactttcttgggaacccctgatggagttcaaggtcatagaagagaagaaatcagacactgctacaggactcttgctcttggttcagattattcaatgggaggggagaagagagtagtcgcaagtgattgttgtagattttgtctcagctttttgtttttctttgtatcaaacctgttttgagatcatacactgttacagagaaagagaggaggcatattataaacgtgtggacttcagtgttattccttctcttcaaaatgatgttccaggtgtctagagggtgaggtatgtcatttacatgaaggttaagaataaaacagaaagtgcctct

SEQ ID NO: 368225 - DNA, 2057 bp, Homo sapiens
gggcatctcagtaaatgtgagttttggtgaactgtgtttccaacttgtaagcaagttagactgcaccctgggaagtcagttcacacatgaggagggcctcatctctggcttccctggagcctgagtcaaccaagcttctgatggccaagatcttttcctttgtgtgtggagttgggagaacaatctagtatttttagacctttgtactagacagttttttatggcatttgcttttctttgtcttcgtattcagaaattttgtttgcctaaatttaggctaaccatgaattgactgcatttgaaaggcttattgcacatcaataaggaaaatattgttatcagatgtacttacaatgaggaggaaatgtttccgaacctgccctgaattatatagtctaggtttcgtttactcccatcccctagaattctcccttaaatggacacagagaacctggaagttattgaaagtaaaaggaagaaccagacttgtaaaaatttgttctcagattttgttttcaatgagaccttgggaaagaagtcccttaaaaacaatcagatgctatcttgttctttctttcaagatgccccatggtcttgaaatgatgggccataacaacgtaaaaatctcgctttatgtcttgataggtttccacatgttggcggatgcagtggaagcttctcttgagatctttgccacactgttcaacatgtttgaccactctgtcctaaaaacgctttcttcttaaagcactttctcctcctggcttctgtgtgtcttactctccttgagttccctctgcctctgtggccagtccttcctcacctctcttgctggcaggttaacagtctccacttcaatagcccaaggctcagaaagactgagtaatgcgtctaacctcctctagctgataaagaaccaaggctcagaaagactgaataacgtgtctaacctcctctagctgataaagaagagaacagggatttaaacccagggacggaaactcttctcggttccctataccatattcctgtcttcagggaactgagagcatttagttgcattaaaacaaataaaaaaacaaacaaacaaaaaacctgcaggtatcttgggctctggaaggacatacaggtcagggtgaaaagtatgcttggtccaagcatcttttttcttttaacacatgaagtatgtgtcttattattttaaaagacattgagaaaaaggaacattcaacattctcttggttatagatactggagtattaacaaagtgaaaagagaaaaactaaaatttgttggctctgacttactagttttagtaatttataagaacagctttccatttgtgcctttcatacatccactgagtcatgaggtttcatcaaatgtttctttttttcttttctttctttctttcttttttttttttttttaagacagagtctttgctctgtcgcccaggctggagtgcaggggatgatctctgctcactggaacctctgcctcctggattcaagtgattctcccacctcagtctcccaagtagctggaactgtaggcatgtgccatatgcccggctaatttttgtatttttagtagagacagggtttcaccatgttggccaggctggtctcaaactcctaacctcaagtgatctgcctgcttcggcctcccaaagtgctgggattataggcgtgaaccactgcgcccagcccagatgtttcttagattgactttgctgtgtttcctttgtatccgatgtgtctgagattgacttccttgtaagtcattcgttaacaggtttcttgtattttcctagccttctcagccttcattggctggagagcctgtaatgtggctacaggcttctgaggcaagacgatttgctcagtttcaaaatgttaggggtcacatgccatttttcatttgttaattattgaagatgtctttcccacagataagaccccaaggactctcccagactcttcatctcctctctggccctgggcagaactcttccccaggcaaagtctgatttcagtgttcctttctgtcctgcc

SEQ ID NO: 368226 - DNA, 162 bp, Homo sapiens
tttttttttttgggggtgaggtaaaatggctggatgcggatatttctataattccagaaagtcacacagctcctctgtatgagaccagtgggcgccatttaaaagaacaggatgagaatctaagatatattattaataaatgtaatggattttttttttgta

SEQ ID NO: 368227 - DNA, 5323 bp, Homo sapiens
tgctgcggtcatctagaggatcccgacgagttgtccgagttatgaatatggaatgaagggataaattcctgatgtctccattaagctcctctgtgtaaaatactccatggcaaagttgctgctatttaaagtagtgagtttgatcttggctttgatctaaatcttttgatcttgaaagaaggatggagtagcaataaagagagggcaagacagattttctttaaagaaatgtgataaagttaaagggatggtcaagacccagcaagtaactcggacaacccgactctccgccccggcccgccctcaccggcaggcgggttccagcaactgctgatgcggatgagaaggcctttggcgggtggaggaaaatcttggggtatcgcacatttttataaaccgctgcagagggagcgtcgcgccggggcggagtgcgggcttgcgcggcaagtgcgcgccgaggtcacgaaatggattggagtgaaccggagaccccgaaaacggaagcgcagggagaaggaagaggtgtttgaaaagcttcttccagaccagctggtcttgcttctggagcatctcttggagcagaagactctgagcccccgaactctgcaaagcctccagaggacataccacctccaggatcaggatgcagaggttcgccatcggtggtgtgaactcattgttaagcacaagttcacgaaagcctacaaaagtgtggagaggttccttcaggaggatcaggccatgggtgtgtacctctacggggagctgatggtgagtgaggacgccagacagcagcagctcgcccgtaggtgcttcgagcggaccaaggagcagatggataggtcctcagcccaggtggtggccgaaatgttattttaacgaggtgattctctccctttcctttctgtcatttagttctaaccagatactccttttaggagccaactaaatcagtaagccgaatagttagccaagactacccgcagcatcaatagtcggctccctggcccagggcctggagagtaactggccaagtgggtgctgggctggtatgggagccccgggtccctggagcaccttgcctggctgtggcagtcaccgggaagcagaggctgtccacctggaggcacagcggcactccttggcactattttggccacttcaggttttataatctgttgaaacaaaaattgtgggggaacatcttgagtaggtttagagatggaatgggaagcctggcagaagcgctggtccagtcttcagggtcacggctgatacaggagtttaagcggccgtgtgactccaaagcctagcttctgcaagcagatgttttcttctagccatgtgtgaattggaggttccttgggctgtccacgcctggtcatcagctggcaggaggctctccaggcacacgcagcacacacagcacatgcaccacacgtagcacacacactgcatgcagcacacacacaccagaggacgcaccacacagagcacgcacagcacacaccacacagcgcacgcaccacacagagcacacgcggcacacacagcacacacagcgcacgcaccacgcagagcacacacggcacatgcagcatacacaccaaacagcgcacgcaccacacagagcacacgcggcacacgcagcacacacaccacacagagcacctggagcacccacagcacacacaccacgcagagtacacgcggcacacacaccacacacagcgcatgcacaacacagagcacacacagcacatgcaccacacgtagcgcgcacactgcatgcagcacacacaccacacacagcgcgtgcaccacacagagcacctgcggcacacacagcacacaccgcacgcaccacacagagcacatgtggcacacacagtgcacgcaccacacagcacccgcggcgcacacagcacacgtggcatatggcctccatgaccctgtgtcttgagggcaggtcctactttttgctttgttgtgttggagcggaatttctcccctggcttctattggagtcctagattatttaaatcacttcctctgttaattgtgcctggaattaacctgttagatttacttcctagcagttagttgctcagtatgggtttctacactattaaagcaacctagcggtagtacacaaggttttgttaggatagctgtgagattttttttctctaacaatcatcattatttctgtgtctgctccgtttttcttcagtgttttatatgatattaataggggatgtctaattttgtatctttaaaaaaactttatcaaatctgaagcatttttcgtgttatagcttctctataatttttcatggatattgaatatttggtgttgatattcttcactcagttttgaacattgagttttcttctaatgttttgtgcttatgaaaaccatttctgtgtaacgtgtttaagtagcttatttatctgaaagaactctaataatgaaaagaaataaaaagtttttcagaagcatgatcatattcttccagaagagtcaggaaccatgtgtgccaggaaagggaaacgggactgagcgtctcgtagcgaaacgcctgctgcagacttgacgcggctcccctccaggacgggctggcggcacacagactgtgcacttacctcactgccggcctcataatagtaatcagtgtaaatggtgtttctctttcgttttgttatttcgtggcgtacgtgttaaagtgtgtgaaactacaaggccagctagtcctttcatcattccctttggtgcaggttttggagcagcaccacagggcacacccctcgccactctttatggggaatttttgcccaggcaggcagaggagtcatcttggtcacaagtctcccttttccccctccccagcatcttcgatcctgtccccacccctccagatgcatccaggggttgcaagcctgccccccaaccagtccccgtgaggaacagtggccgggattgtcccagggccccttccagcagggggacctcctgacttgagagtccccaaagccttcccagggcagctagaatctgcctggagagaagggatcttgtccccaagggttagaggcagtaaactaatagcaaggacagctgcctttagcaattgtgtgtgtcgcatggccggtccctgcatttttcttcagttccaaagctgcactggcatttttatggtcatctctggagtccctttgattcaagaaattatacctctaggatgccaactaaacgaacaacaaacagaaactccacctgtttgctagcataacaggcgtgaaggcggcagtgtcgccggcgtccttccgcggaagcccagtgtgtgcagacagcacggggtggcgctgctctcaggtgctctggctgcttgggttcctggcatgctgatttgtgacttaagattaaaatcacattgccagggattaccacgcaaccacgaccttggctgctcctccagaaaccgtggtcgcgctcactgcagattggagaacaggtgcatctcgtagctcttctttggaaacaaaagaagccaccagctgaggaagatgctcaccggtcaccgtccctttatttatgcccagcgatgacctctctaacaaggtgcagagcttagctgattggtgaacagtgattggtttccgctttgttcacagtggctaagttctgcacctgaagagaaggtgagatggggacagttaagttggagccgctggggcagaggccgttgctgacgggccggccgctgctgcacagtcagcttgggtgcggagcgcgatcctggaggatgagagaccacttgaccccaaggatgcactgtctcctgctgggaatgctagccatgtactgagtccttaagtctgtccacagaaacatccactaatcggacatctgtctgaaaggtcaaatgtattgaaagttgcaaaaattcttcttacaaaaaactaaaaccaaatgcatcacctaagtcgtgtgaaatcatgtggtagctcatggctgtgagcggggcggggcggggctttcggaggagctcctgttgttctgggcgcggtgaactctctcttgtatttgcagtccaggccttcgcgtctcctgcgccagcagacggtgcccacggagctcccagctgaggcgctgcttctccgggctgtcgattggacccgccctccggtgcctactgagctgatatcagttctcattttacacactggctcagttcagcaggaacaggagtcgagcccttgagcaaaaagccttcgtgtctgtaagtgcccgaggctcaggagagctggggctcccactcgcggcagacaggcccgcgtccaccctgcgtccaccccggcccggcggcagcacggtgccagtcatctgcatgtgctcctgcggcgtgggggtttgtagacttggaaaaccctgttggcagaaagttaagagctcccaggcctgaaggcaggacacagtgccagcagggggccgtttgcccccatgtgtaagggaggcagggcccagctctcccacggcgaggtgagctgagactttctgagaatagttagagtgggtgcgtgtctgaaatgggtactcctagcagctattgtgtacgcaaagcctgagtacagcctgctggtgtcatggccacgtgtgagcaggccagcgtcacacggctcgctgtgacccgtcccggagactgaaatgggcctgggtcttctccttgtcctgtgattaaagtcctctcttgaaagtggagagcaaaggcacacagaggtgcgcgctcacaagaattcctcccggtgactgggtaatcaatgttactgctgtttcctttgcaggaaagaccacagcaagattctttcattcgtctcctcctagcctgggggaccaggctcgaactgaccctggacatcaaaggagggattatgtggctgctaaagccatcggcccacagccctgttcacgtcttggtgcttctctttcccagaggctggtcccagccaggcacacacaaaaggcagattctcgtaaacgcagcctccctccctggaggctgcctcctgccctggatctggagtggagctgctctgagattttgagttcttctgcagagatgattaaatatatccaagagacattggaaaacctgctgaacattttacattggtctgctcagcacatggctggatgcggatatttctataattccagaaagtcacacagctcctctgtatgagaccagtgggcgccatttaaaagaacaggatgagaatctaagatatattattaataaatgtaatggattttttttttgta

SEQ ID NO: 368228 - DNA, 6761 bp, Homo sapiens
tgctttccttttttgccaggagactgaaaggaaccataatttgtgacatcagttgttttctttgataagcagctatttatgattctggaagattaaggcagataggaaaccccatctgagattttaataaatccctcaaacaataaaccacatcatggacatacagctggaccctgccagagatgacctgcctctcatggccaacaccagccacatacttgtgaagcactatgtactggatttggatgtggattttgaaagtcaagtcattgaggggaccatagtgcttttcctcgaggatggaaacagattcaagaaacagaatagctctattgaggaagcctgccaatcagaatcaaacaaagcctgcaaatttgggatgcctgaaccctgccatattcccgtgacaaatgcaaggaccttctcatctgaaatggaatataatgattttgcaatctgtagtaaaggtgaaaaagatacttctgataaagatggtaaccatgacaaccaggaacatgcttctgggatttctagctcaaagtactgctgtgacacagggaatcatgggagtgaggattttttgctagtgttggactgctgtgatttatctgtgttaaaagtcgaggaggtggatgttgctgctgtgccaggtctggaaaaatttacaaggtctcctgagctcacggttgtttctgaggagttcaggaatcagattgtacgtgaacttgtgactttgcctgcaaatcgttggagggagcagttagactattacgctcgctgcagccaggctcctggctgtggggaactcctctttgacactgacacttggagcttgcagataaggaagacaggggctcagacagctactgactttcctcatgctatcaggatatggtacaaaactaaacctgaagggcgatcggttacatggacctcagaccagagtggcaggccatgtgtttatactgtgggatctcccataaacaacagggccctttttccatgccaggagccacccgttgccatgtcaacatggcaggctacagttcgagcagctgcatcttttgttgttttaatgagtggggaaaattctgccaaaccaacgcagctttgggaagagtgctcaagctggtattactatgtaactatgccaatgccagcctccaccttcacaattgcagtgggatgctggacagaaatgaagatggagacatggtcatcaaatgatttggcaacagagagacccttctcaccttctgaggccaacttcaggcatgttggtgtttgcagtcacatggaatacccctgccgcttccagaatgcttctgccaccacccaggagatcattcctcatcgggtctttgcccctgtgtgcctcacgggtgcctgccaagagacccttctgcggctgatccctccttgcctctcagcagcacattctgttctgggagcacacccgttctctcggctggatgttctcatcgtccctgccaactttccaagtctggggatggccagacccagtaaagacaaaactggccacacaagtgactcgggagcatctgttatcaagcatggacttaatccggagaagatcttcatgcaggtgcattatttaaagggctacttccttcttcggtttcttgccaaaagacttggagatgaaacctatttttcatttttaagaaaatttgtgcacacatttcatggacagctgattctttcccaggatttccttcaaatgctactggagaacattccagaagaaaaaaggcttgagctgtctgttgaaaacatctaccaagactggcttgagagttccggaataccaaagccgctgcagagggagcgtcgcgccggggcggagtgcgggcttgcgcggcaagtgcgcgccgaggtcacgaaatggattggagtgaaccggagaccccgaaaacggaagcgcagggagaaggaagaggtgtttgaaaagcttcttccagaccagctggtcttgcttctggagcatctcttggagcagaagactctgagcccccgaactctgcaaagcctccagaggacataccacctccaggatcaggatgcagaggttcgccatcggtggtgtgaactcattgttaagcacaagttcacgaaagcctacaaaagtgtggagaggttccttcaggaggatcaggccatgggtgtgtacctctacggggagctgatggtgagtgaggacgccagacagcagcagctcgcccgtaggtgcttcgagcggaccaaggagcagatggataggtcctcagcccaggtggtggccgaaatgttattttaacgaggtgattctctccctttcctttctgtcatttagttctaaccagatactccttttaggagccaactaaatcagtaagccgaatagttagccaagactacccgcagcatcaatagtcggctccctggcccagggcctggagagtaactggccaagtgggtgctgggctggtatgggagccccgggtccctggagcaccttgcctggctgtggcagtcaccgggaagcagaggctgtccacctggaggcacagcggcactccttggcactattttggccacttcaggttttataatctgttgaaacaaaaattgtgggggaacatcttgagtaggtttagagatggaatgggaagcctggcagaagcgctggtccagtcttcagggtcacggctgatacaggagtttaagcggccgtgtgactccaaagcctagcttctgcaagcagatgttttcttctagccatgtgtgaattggaggttccttgggctgtccacgcctggtcatcagctggcaggaggctctccaggcacacgcagcacacacagcacatgcaccacacgtagcacacacactgcatgcagcacacacacaccagaggacgcaccacacagagcacgcacagcacacaccacacagcgcacgcaccacacagagcacacgcggcacacacagcacacacagcgcacgcaccacgcagagcacacacggcacatgcagcatacacaccaaacagcgcacgcaccacacagagcacacgcggcacacgcagcacacacaccacacagagcacctggagcacccacagcacacacaccacgcagagtacacgcggcacacacaccacacacagcgcatgcacaacacagagcacacacagcacatgcaccacacgtagcgcgcacactgcatgcagcacacacaccacacacagcgcgtgcaccacacagagcacctgcggcacacacagcacacaccgcacgcaccacacagagcacatgtggcacacacagtgcacgcaccacacagcacccgcggcgcacacagcacacgtggcatatggcctccatgaccctgtgtcttgagggcaggtcctactttttgctttgttgtgttggagcggaatttctcccctggcttctattggagtcctagattatttaaatcacttcctctgttaattgtgcctggaattaacctgttagatttacttcctagcagttagttgctcagtatgggtttctacactattaaagcaacctagcggtagtacacaaggttttgttaggatagctgtgagattttttttctctaacaatcatcattatttctgtgtctgctccgtttttcttcagtgttttatatgatattaataggggatgtctaattttgtatctttaaaaaaactttatcaaatctgaagcatttttcgtgttatagcttctctataatttttcatggatattgaatatttggtgttgatattcttcactcagttttgaacattgagttttcttctaatgttttgtgcttatgaaaaccatttctgtgtaacgtgtttaagtagcttatttatctgaaagaactctaataatgaaaagaaataaaaagtttttcagaagcatgatcatattcttccagaagagtcaggaaccatgtgtgccaggaaagggaaacgggactgagcgtctcgtagcgaaacgcctgctgcagacttgacgcggctcccctccaggacgggctggcggcacacagactgtgcacttacctcactgccggcctcataatagtaatcagtgtaaatggtgtttctctttcgttttgttatttcgtggcgtacgtgttaaagtgtgtgaaactacaaggccagctagtcctttcatcattccctttggtgcaggttttggagcagcaccacagggcacacccctcgccactctttatggggaatttttgcccaggcaggcagaggagtcatcttggtcacaagtctcccttttccccctccccagcatcttcgatcctgtccccacccctccagatgcatccaggggttgcaagcctgccccccaaccagtccccgtgaggaacagtggccgggattgtcccagggccccttccagcagggggacctcctgacttgagagtccccaaagccttcccagggcagctagaatctgcctggagagaagggatcttgtccccaagggttagaggcagtaaactaatagcaaggacagctgcctttagcaattgtgtgtgtcgcatggccggtccctgcatttttcttcagttccaaagctgcactggcatttttatggtcatctctggagtccctttgattcaagaaattatacctctaggatgccaactaaacgaacaacaaacagaaactccacctgtttgctagcataacaggcgtgaaggcggcagtgtcgccggcgtccttccgcggaagcccagtgtgtgcagacagcacggggtggcgctgctctcaggtgctctggctgcttgggttcctggcatgctgatttgtgacttaagattaaaatcacattgccagggattaccacgcaaccacgaccttggctgctcctccagaaaccgtggtcgcgctcactgcagattggagaacaggtgcatctcgtagctcttctttggaaacaaaagaagccaccagctgaggaagatgctcaccggtcaccgtccctttatttatgcccagcgatgacctctctaacaaggtgcagagcttagctgattggtgaacagtgattggtttccgctttgttcacagtggctaagttctgcacctgaagagaaggtgagatggggacagttaagttggagccgctggggcagaggccgttgctgacgggccggccgctgctgcacagtcagcttgggtgcggagcgcgatcctggaggatgagagaccacttgaccccaaggatgcactgtctcctgctgggaatgctagccatgtactgagtccttaagtctgtccacagaaacatccactaatcggacatctgtctgaaaggtcaaatgtattgaaagttgcaaaaattcttcttacaaaaaactaaaaccaaatgcatcacctaagtcgtgtgaaatcatgtggtagctcatggctgtgagcggggcggggcggggctttcggaggagctcctgttgttctgggcgcggtgaactctctcttgtatttgcagtccaggccttcgcgtctcctgcgccagcagacggtgcccacggagctcccagctgaggcgctgcttctccgggctgtcgattggacccgccctccggtgcctactgagctgatatcagttctcattttacacactggctcagttcagcaggaacaggagtcgagcccttgagcaaaaagccttcgtgtctgtaagtgcccgaggctcaggagagctggggctcccactcgcggcagacaggcccgcgtccaccctgcgtccaccccggcccggcggcagcacggtgccagtcatctgcatgtgctcctgcggcgtgggggtttgtagacttggaaaaccctgttggcagaaagttaagagctcccaggcctgaaggcaggacacagtgccagcagggggccgtttgcccccatgtgtaagggaggcagggcccagctctcccacggcgaggtgagctgagactttctgagaatagttagagtgggtgcgtgtctgaaatgggtactcctagcagctattgtgtacgcaaagcctgagtacagcctgctggtgtcatggccacgtgtgagcaggccagcgtcacacggctcgctgtgacccgtcccggagactgaaatgggcctgggtcttctccttgtcctgtgattaaagtcctctcttgaaagtggagagcaaaggcacacagaggtgcgcgctcacaagaattcctcccggtgactgggtaatcaatgttactgctgtttcctttgcaggaaagaccacagcaagattctttcattcgtctcctcctagcctgggggaccaggctcgaactgaccctggacatcaaaggagggattatgtggctgctaaagccatcggcccacagccctgttcacgtcttggtgcttctctttcccagaggctggtcccagccaggcacacacaaaaggcagattctcgtaaacgcagcctccctccctggaggctgcctcctgccctggatctggagtggagctgctctgagattttgagttcttctgcagagatgattaaatatatccaagagacattggaaaacctgctgaacattttacattggtctgctcagcacatggctggatgcggatatttctataattccagaaagtcacacagctcctctgtatgagaccagtgggcgccatttaaaagaacaggatgagaatctaagatatattattaataaatgtaatggattttttttttgta

SEQ ID NO: 368229 - DNA, 5077 bp, Homo sapiens
gattcaagggcataggcgtcggaattgtgatttcgtgcgtgttttatttaccaggccttcaaatcaaaaaggccaggcaaacacacgttctggggctatcaagaaagttcacacgaaggacaaatccagcagggagaaagtgacataccttgcgggctcaggcttgggatttctgcagccacgcgcgcgttcacccgacgggacctcgcctgcactgccgccgggagaagcctgctctagactccggctccaggggagagggctgggctccacagagaggagcagcctcttcttccagaccagctggtcttgcttctggagcatctcttggagcagaagactctgagcccccgaactctgcaaagcctccagaggacataccacctccaggatcaggatgcagaggttcgccatcggtggtgtgaactcattgttaagcacaagttcacgaaagcctacaaaagtgtggagaggttccttcaggaggatcaggccatgggtgtgtacctctacggggagctgatggtgagtgaggacgccagacagcagcagctcgcccgtaggtgcttcgagcggaccaaggagcagatggataggtcctcagcccaggtggtggccgaaatgttattttaacgaggtgattctctccctttcctttctgtcatttagttctaaccagatactccttttaggagccaactaaatcagtaagccgaatagttagccaagactacccgcagcatcaatagtcggctccctggcccagggcctggagagtaactggccaagtgggtgctgggctggtatgggagccccgggtccctggagcaccttgcctggctgtggcagtcaccgggaagcagaggctgtccacctggaggcacagcggcactccttggcactattttggccacttcaggttttataatctgttgaaacaaaaattgtgggggaacatcttgagtaggtttagagatggaatgggaagcctggcagaagcgctggtccagtcttcagggtcacggctgatacaggagtttaagcggccgtgtgactccaaagcctagcttctgcaagcagatgttttcttctagccatgtgtgaattggaggttccttgggctgtccacgcctggtcatcagctggcaggaggctctccaggcacacgcagcacacacagcacatgcaccacacgtagcacacacactgcatgcagcacacacacaccagaggacgcaccacacagagcacgcacagcacacaccacacagcgcacgcaccacacagagcacacgcggcacacacagcacacacagcgcacgcaccacgcagagcacacacggcacatgcagcatacacaccaaacagcgcacgcaccacacagagcacacgcggcacacgcagcacacacaccacacagagcacctggagcacccacagcacacacaccacgcagagtacacgcggcacacacaccacacacagcgcatgcacaacacagagcacacacagcacatgcaccacacgtagcgcgcacactgcatgcagcacacacaccacacacagcgcgtgcaccacacagagcacctgcggcacacacagcacacaccgcacgcaccacacagagcacatgtggcacacacagtgcacgcaccacacagcacccgcggcgcacacagcacacgtggcatatggcctccatgaccctgtgtcttgagggcaggtcctactttttgctttgttgtgttggagcggaatttctcccctggcttctattggagtcctagattatttaaatcacttcctctgttaattgtgcctggaattaacctgttagatttacttcctagcagttagttgctcagtatgggtttctacactattaaagcaacctagcggtagtacacaaggttttgttaggatagctgtgagattttttttctctaacaatcatcattatttctgtgtctgctccgtttttcttcagtgttttatatgatattaataggggatgtctaattttgtatctttaaaaaaactttatcaaatctgaagcatttttcgtgttatagcttctctataatttttcatggatattgaatatttggtgttgatattcttcactcagttttgaacattgagttttcttctaatgttttgtgcttatgaaaaccatttctgtgtaacgtgtttaagtagcttatttatctgaaagaactctaataatgaaaagaaataaaaagtttttcagaagcatgatcatattcttccagaagagtcaggaaccatgtgtgccaggaaagggaaacgggactgagcgtctcgtagcgaaacgcctgctgcagacttgacgcggctcccctccaggacgggctggcggcacacagactgtgcacttacctcactgccggcctcataatagtaatcagtgtaaatggtgtttctctttcgttttgttatttcgtggcgtacgtgttaaagtgtgtgaaactacaaggccagctagtcctttcatcattccctttggtgcaggttttggagcagcaccacagggcacacccctcgccactctttatggggaatttttgcccaggcaggcagaggagtcatcttggtcacaagtctcccttttccccctccccagcatcttcgatcctgtccccacccctccagatgcatccaggggttgcaagcctgccccccaaccagtccccgtgaggaacagtggccgggattgtcccagggccccttccagcagggggacctcctgacttgagagtccccaaagccttcccagggcagctagaatctgcctggagagaagggatcttgtccccaagggttagaggcagtaaactaatagcaaggacagctgcctttagcaattgtgtgtgtcgcatggccggtccctgcatttttcttcagttccaaagctgcactggcatttttatggtcatctctggagtccctttgattcaagaaattatacctctaggatgccaactaaacgaacaacaaacagaaactccacctgtttgctagcataacaggcgtgaaggcggcagtgtcgccggcgtccttccgcggaagcccagtgtgtgcagacagcacggggtggcgctgctctcaggtgctctggctgcttgggttcctggcatgctgatttgtgacttaagattaaaatcacattgccagggattaccacgcaaccacgaccttggctgctcctccagaaaccgtggtcgcgctcactgcagattggagaacaggtgcatctcgtagctcttctttggaaacaaaagaagccaccagctgaggaagatgctcaccggtcaccgtccctttatttatgcccagcgatgacctctctaacaaggtgcagagcttagctgattggtgaacagtgattggtttccgctttgttcacagtggctaagttctgcacctgaagagaaggtgagatggggacagttaagttggagccgctggggcagaggccgttgctgacgggccggccgctgctgcacagtcagcttgggtgcggagcgcgatcctggaggatgagagaccacttgaccccaaggatgcactgtctcctgctgggaatgctagccatgtactgagtccttaagtctgtccacagaaacatccactaatcggacatctgtctgaaaggtcaaatgtattgaaagttgcaaaaattcttcttacaaaaaactaaaaccaaatgcatcacctaagtcgtgtgaaatcatgtggtagctcatggctgtgagcggggcggggcggggctttcggaggagctcctgttgttctgggcgcggtgaactctctcttgtatttgcagtccaggccttcgcgtctcctgcgccagcagacggtgcccacggagctcccagctgaggcgctgcttctccgggctgtcgattggacccgccctccggtgcctactgagctgatatcagttctcattttacacactggctcagttcagcaggaacaggagtcgagcccttgagcaaaaagccttcgtgtctgtaagtgcccgaggctcaggagagctggggctcccactcgcggcagacaggcccgcgtccaccctgcgtccaccccggcccggcggcagcacggtgccagtcatctgcatgtgctcctgcggcgtgggggtttgtagacttggaaaaccctgttggcagaaagttaagagctcccaggcctgaaggcaggacacagtgccagcagggggccgtttgcccccatgtgtaagggaggcagggcccagctctcccacggcgaggtgagctgagactttctgagaatagttagagtgggtgcgtgtctgaaatgggtactcctagcagctattgtgtacgcaaagcctgagtacagcctgctggtgtcatggccacgtgtgagcaggccagcgtcacacggctcgctgtgacccgtcccggagactgaaatgggcctgggtcttctccttgtcctgtgattaaagtcctctcttgaaagtggagagcaaaggcacacagaggtgcgcgctcacaagaattcctcccggtgactgggtaatcaatgttactgctgtttcctttgcaggaaagaccacagcaagattctttcattcgtctcctcctagcctgggggaccaggctcgaactgaccctggacatcaaaggagggattatgtggctgctaaagccatcggcccacagccctgttcacgtcttggtgcttctctttcccagaggctggtcccagccaggcacacacaaaaggcagattctcgtaaacgcagcctccctccctggaggctgcctcctgccctggatctggagtggagctgctctgagattttgagttcttctgcagagatgattaaatatatccaagagacattggaaaacctgctgaacattttacattggtctgctcagcacatggctggatgcggatatttctataattccagaaagtcacacagctcctctgtatgagaccagtgggcgccatttaaaagaacaggatgagaatctaagatatattattaataaatgtaatggattttttttttgta

SEQ ID NO: 368230 - DNA, 1361 bp, Homo sapiens
tgctgcggtcatctagaggatcccgacgagttgtccgagttatgaatatggaatgaagggataaattcctgatgtctccattaagctcctctgtgtaaaatactccatggcaaagttgctgctatttaaagtagtgagtttgatcttggctttgatctaaatcttttgatcttgaaagaaggatggagtagcaataaagagagggcaagacagattttctttaaagaaatgtgataaagttaaagggatggtcaagacccagcaagtaactcggacaacccgactctccgccccggcccgccctcaccggcaggcgggttccagcaactgctgatgcggatgagaaggcctttggcgggtggaggaaaatcttggggtatcgcacatttttataaaccgctgcagagggagcgtcgcgccggggcggagtgcgggcttgcgcggcaagtgcgcgccgaggtcacgaaatggattggagtgaaccggagaccccgaaaacggaagcgcagggagaaggaagaggtgtttgaaaagcttcttccagaccagctggtcttgcttctggagcatctcttggagcagaagactctgagcccccgaactctgcaaagcctccagaggacataccacctccaggatcaggatgcagaggttcgccatcggtggtgtgaactcattgttaagcacaagttcacgaaagcctacaaaagtgtggagaggttccttcaggaggatcaggccatgggtgtgtacctctacggggagctgatggtgagtgaggacgccagacagcagcagctcgcccgtaggtgcttcgagcggaccaaggagcagatggataggtcctcagcccaggtggtggccgaaatgttattttaacgaggaaagaccacagcaagattctttcattcgtctcctcctagcctgggggaccaggctcgaactgaccctggacatcaaaggagggattatgtggctgctaaagccatcggcccacagccctgttcacgtcttggtgcttctctttcccagaggctggtcccagccaggcacacacaaaaggcagattctcgtaaacgcagcctccctccctggaggctgcctcctgccctggatctggagtggagctgctctgagattttgagttcttctgcagagatgattaaatatatccaagagacattggaaaacctgctgaacattttacattggtctgctcagcacatggctggatgcggatatttctataattccagaaagtcacacagctcctctgtatgagaccagtgggcgccatttaaaagaacaggatgagaatctaagatatattattaataaatgtaatggattttttttttgta

SEQ ID NO: 368231 - DNA, 830 bp, Homo sapiens
cctcgtgcgtacttcggcacgagagcagggcccagctctcccacggcgaggtgagctgagactttctgagaatagttagagtgggtgcgtgtctgaaatgggtactcctagcagctattgtgtacgcaaagcctgagtacagcctgctggtgtcatggccacgtgtgagcaggccagcgtcacacggctcgctgtgacccgtcccggagactgaaatgggcctgggtcttctccttgtcctgtgattaaagtcctctcttgaaagtggagagcaaaggcacacagaggtgcgcgctcacaagaattcctcccggtgactgggtaatcaatgttactgctgtttcctttgcaggaaagaccacagcaagattctttcattcgtctcctcctagcctgggggaccaggctcgaactgaccctggacatcaaaggagggattatgtggctgctaaagccatcggcccacagccctgttcacgtcttggtgcttctctttcccagaggctggtcccagccaggcacacacaaaaggcagattctcgtaaacgcagcctccctccctggaggctgcctcctgccctggatctggagtggagctgctctgagattttgagttcttctgcagagatgattaaatatatccaagagacattggaaaacctgctgaacattttacattggtctgctcagcacatggctggatgcggatatttctataattccagaaagtcacacagctcctctgtatgagaccagtgggcgccatttaaaagaacaggatgagaatctaagatatattattaataaatgtaatggattttttttttgta

SEQ ID NO: 368232 - DNA, 1216 bp, Homo sapiens
tgctgcggtcatctagaggatcccgacgagttgtccgagttatgaatatggaatgaagggataaattcctgatgtctccattaagctcctctgtgtaaaatactccatggcaaagttgctgctatttaaagtagtgagtttgatcttggctttgatctaaatcttttgatcttgaaagaaggatggagtagcaataaagagagggcaagacagattttctttaaagaaatgtgataaagttaaagggatggtcaagacccagcaagtaactcggacaacccgactctccgccccggcccgccctcaccggcaggcgggttccagcaactgctgatgcggatgagaaggcctttggcgggtggaggaaaatcttggggtatcgcacatttttataaaccgctgcagagggagcgtcgcgccggggcggagtgcgggcttgcgcggcaagtgcgcgccgaggtcacgaaatggattggagtgaaccggagaccccgaaaacggaagcgcagggagaaggaagaggtgtttgaaaagcttcttccagaccagctggtcttgcttctggagcatctcttggagcagaagactctgagcccccgaactctgcaaagcctccagaggacataccacctccaggatcaggatgcagaggttcgccatcggtggtgtgaactcattgttaagcacaagttcacgaaagcctacaaaagtgtggagaggttccttcaggaggatcaggaaagaccacagcaagattctttcattcgtctcctcctagcctgggggaccaggctcgaactgaccctggacatcaaaggagggattatgtggctgctaaagccatcggcccacagccctgttcacgtcttggtgcttctctttcccagaggctggtcccagccaggcacacacaaaaggcagattctcgtaaacgcagcctccctccctggaggctgcctcctgccctggatctggagtggagctgctctgagattttgagttcttctgcagagatgattaaatatatccaagagacattggaaaacctgctgaacattttacattggtctgctcagcacatggctggatgcggatatttctataattccagaaagtcacacagctcctctgtatgagaccagtgggcgccatttaaaagaacaggatgagaatctaagatatattattaataaatgtaatggattttttttttgta

SEQ ID NO: 368233 - DNA, 5397 bp, Homo sapiens
tgctgcggtcatctagaggatcccgacgagttgtccgagttatgaatatggaatgaagggataaattcctgatgtctccattaagctcctctgtgtaaaatactccatggcaaagttgctgctatttaaagtagtgagtttgatcttggctttgatctaaatcttttgatcttgaaagaaggatggagtagcaataaagagagggcaagacagattttctttaaagaaatgtgataaagttaaagggatggtcaagacccagcaagtaactcggacaacccgactctccgccccggcccgccctcaccggcaggcgggttccagcaactgctgatgcggatgagaaggcctttggcgggtggaggaaaatcttggggtatcgcacatttttataaaccgctgcagagggagcgtcgcgccggggcggagtgcgggcttgcgcggcaagtgcgcgccgaggtcacgaaatggattggagtgaaccggagaccccgaaaacggaagcgcagggagaaggaagaggtgtttgaaaagcttcttccagaccagctggtcttgcttctggagcatctcttggagcagaagactctgagcccccgaactctgcaaagcctccagaggacataccacctccaggatcaggatgcagaggttcgccatcggtggtgtgaactcattgttaagcacaagttcacgaaagcctacaaaagtgtggagaggttccttcaggaggatcaggccatgggtgtgtacctctacggggagctgatggtgagtgaggacgccagacagcagcagctcgcccgtaggtgcttcgagcggaccaaggagcagatggataggtcctcagcccaggtggtggccgaaatgttattttaacgaggtgattctctccctttcctttctgtcatttagttctaaccagatactccttttaggagccaactaaatcagtaagccgaatagttagccaagactacccgcagcatcaatagtcggctccctggcccagggcctggagagtaactggccaagtgggtgctgggctggtatgggagccccgggtccctggagcaccttgcctggctgtggcagtcaccgggaagcagaggctgtccacctggaggcacagcggcactccttggcactattttggccacttcaggttttataatctgttgaaacaaaaattgtgggggaacatcttgagtaggtttagagatggaatgggaagcctggcagaagcgctggtccagtcttcagggtcacggctgatacaggagtttaagcggccgtgtgactccaaagcctagcttctgcaagcagatgttttcttctagccatgtgtgaattggaggttccttgggctgtccacgcctggtcatcagctggcaggaggctctccaggcacacgcagcacacacagcacatgcaccacacgtagcacacacactgcatgcagcacacacacaccagaggacgcaccacacagagcacgcacagcacacaccacacagcgcacgcaccacacagagcacacgcggcacacacagcacacacagcgcacgcaccacgcagagcacacacggcacatgcagcatacacaccaaacagcgcacgcaccacacagagcacacgcggcacacgcagcacacacaccacacagagcacctggagcacccacagcacacacaccacgcagagtacacgcggcacacacaccacacacagcgcatgcacaacacagagcacacacagcacatgcaccacacgtagcgcgcacactgcatgcagcacacacaccacacacagcgcgtgcaccacacagagcacctgcggcacacacagcacacaccgcacgcaccacacagagcacatgtggcacacacagtgcacgcaccacacagcacccgcggcgcacacagcacacgtggcatatggcctccatgaccctgtgtcttgagggcaggtcctactttttgctttgttgtgttggagcggaatttctcccctggcttctattggagtcctagattatttaaatcacttcctctgttaattgtgcctggaattaacctgttagatttacttcctagcagttagttgctcagtatgggtttctacactattaaagcaacctagcggtagtacacaaggttttgttaggatagctgtgagattttttttctctaacaatcatcattatttctgtgtctgctccgtttttcttcagtgttttatatgatattaataggggatgtctaattttgtatctttaaaaaaactttatcaaatctgaagcatttttcgtgttatagcttctctataatttttcatggatattgaatatttggtgttgatattcttcactcagttttgaacattgagttttcttctaatgttttgtgcttatgaaaaccatttctgtgtaacgtgtttaagtagcttatttatctgaaagaactctaataatgaaaagaaataaaaagtttttcagaagcatgatcatattcttccagaagagtcaggaaccatgtgtgccaggaaagggaaacgggactgagcgtctcgtagcgaaacgcctgctgcagacttgacgcggctcccctccaggacgggctggcggcacacagactgtgcacttacctcactgccggcctcataatagtaatcagtgtaaatggtgtttctctttcgttttgttatttcgtggcgtacgtgttaaagtgtgtgaaactacaaggccagctagtcctttcatcattccctttggtgcaggttttggagcagcaccacagggcacacccctcgccactctttatggggaatttttgcccaggcaggcagaggagtcatcttggtcacaagtctcccttttccccctccccagcatcttcgatcctgtccccacccctccagatgcatccaggggttgcaagcctgccccccaaccagtccccgtgaggaacagtggccgggattgtcccagggccccttccagcagggggacctcctgacttgagagtccccaaagccttcccagggcagctagaatctgcctggagagaagggatcttgtccccaagggttagaggcagtaaactaatagcaaggacagctgcctttagcaattgtgtgtgtcgcatggccggtccctgcatttttcttcagttccaaagctgcactggcatttttatggtcatctctggagtccctttgattcaagaaattatacctctaggatgccaactaaacgaacaacaaacagaaactccacctgtttgctagcataacaggcgtgaaggcggcagtgtcgccggcgtccttccgcggaagcccagtgtgtgcagacagcacggggtggcgctgctctcaggtgctctggctgcttgggttcctggcatgctgatttgtgacttaagattaaaatcacattgccagggattaccacgcaaccacgaccttggctgctcctccagaaaccgtggtcgcgctcactgcagattggagaacaggtgcatctcgtagctcttctttggaaacaaaagaagccaccagctgaggaagatgctcaccggtcaccgtccctttatttatgcccagcgatgacctctctaacaaggtgcagagcttagctgattggtgaacagtgattggtttccgctttgttcacagtggctaagttctgcacctgaagagaaggtgagatggggacagttaagttggagccgctggggcagaggccgttgctgacgggccggccgctgctgcacagtcagcttgggtgcggagcgcgatcctggaggatgagagaccacttgaccccaaggatgcactgtctcctgctgggaatgctagccatgtactgagtccttaagtctgtccacagaaacatccactaatcggacatctgtctgaaaggtcaaatgtattgaaagttgcaaaaattcttcttacaaaaaactaaaaccaaatgcatcacctaagtcgtgtgaaatcatgtggtagctcatggctgtgagcggggcggggcggggctttcggaggagctcctgttgttctgggcgcggtgaactctctcttgtatttgcagtccaggccttcgcgtctcctgcgccagcagacggtgcccacggagctcccagctgaggcgctgcttctccgggctgtcgattggacccgccctccggtgcctactgagctgatatcagttctcattttacacactggctcagttcagcaggaacaggagtcgagcccttgagcaaaaagccttcgtgtctgtaagtgcccgaggctcaggagagctggggctcccactcgcggcagacaggcccgcgtccaccctgcgtccaccccggcccggcggcagcacggtgccagtcatctgcatgtgctcctgcggcgtgggggtttgtagacttggaaaaccctgttggcagaaagttaagagctcccaggcctgaaggcaggacacagtgccagcagggggccgtttgcccccatgtgtaagggaggcagggcccagctctcccacggcgaggtgagctgagactttctgagaatagttagagtgggtgcgtgtctgaaatgggtactcctagcagctattgtgtacgcaaagcctgagtacagcctgctggtgtcatggccacgtgtgagcaggccagcgtcacacggctcgctgtgacccgtcccggagactgaaatgggcctgggtcttctccttgtcctgtgattaaagtcctctcttgaaagtggagagcaaaggcacacagaggtgcgcgctcacaagaattcctcccggtgactgggtaatcaatgttactgctgtttcctttgcaggaaagaccacagcaagattctttcattcgtctcctcctagcctgggggaccaggctcgaactgaccctggacatcaaaggagggattatgtggctgctaaagccatcggcccacagccctgttcacgtcttggtgcttctctttcccagaggctggtcccagccaggcacacacaaaaggcagattctcgtaaacgcagcctccctccctggaggctgcctcctgccctggatctggagtggagctgctctgagattttgagttcttctgcagagatgattaaatatatccaagagacattggaaaacctgctgaacattttacattggtctgctcagcacatggctggatgcggatatttctataattccagaaagtcacacagctcctctgtatgagaccagtgggcgccatttaaaagaacaggatgagaatctaagatatattattaataaatgtaatggattttttttttgtatttttttttttttttttttttttttttttttttttttccacccctccccaaaaacactttttcattcaccagct

SEQ ID NO: 368234 - DNA, 1026 bp, Homo sapiens
cggggcagggaggccggggccgctcccgcggtaaacttgactgtgtcctcttcccccgcagccgctgcagagggagcgtcgcgccggggcggagtgcgggcttgcgcggcaagtgcgcgccgaggtcacgaaatggattggagtgaaccggagaccccgaaaacggaagcgcagggagaaggaagaggtgtttgaaaagcttcttccagaccagctggtcttgcttctggagcatctcttggagcagaagactctgagcccccgaactctgcaaagcctccagaggacataccacctccaggatcaggatgcagaggttcgccatcggtggtgtgaactcattgttaagcacaagttcacgaaagcctacaaaagtgtggagaggttccttcaggaggatcaggccatgggtgtgtacctctacggggagctgatggtgagtgaggacgccagacagcagcagctcgcccgtaggtgcttcgagcggaccaaggagcagatggataggtcctcagcccaggtggtggccgaaatgttattttaacgaggaaagaccacagcaagattctttcattcgtctcctcctagcctgggggaccaggctcgaactgaccctggacatcaaaggagggattatgtggctgctaaagccatcggcccacagccctgttcacgtcttggtgcttctctttcccagaggctggtcccagccaggcacacacaaaaggcagattctcgtaaacgcagcctccctccctggaggctgcctcctgccctggatctggagtggagctgctctgagattttgagttcttctgcagagatgattaaatatatccaagagacattggaaaacctgctgaacattttacattggtctgctcagcacatggctggatgcggatatttctataattccagaaagtcacacagctcctctgtatgagaccagtgggcgccatttaaaagaacaggatgagaatctaagatatattattaataaatgtaatggattttttttttgta

SEQ ID NO: 368235 - DNA, 2654 bp, Homo sapiens
tgctttccttttttgccaggagactgaaaggaaccataatttgtgacatcagttgttttctttgataagcagctatttatgattctggaagattaaggcagataggaaaccccatctgagattttaataaatccctcaaacaataaaccacatcatggacatacagctggaccctgccagagatgacctgcctctcatggccaacaccagccacatacttgtgaagcactatgtactggatttggatgtggattttgaaagtcaagtcattgaggggaccatagtgcttttcctcgaggatggaaacagattcaagaaacagaatagctctattgaggaagcctgccaatcagaatcaaacaaagcctgcaaatttgggatgcctgaaccctgccatattcccgtgacaaatgcaaggaccttctcatctgaaatggaatataatgattttgcaatctgtagtaaaggtgaaaaagatacttctgataaagatggtaaccatgacaaccaggaacatgcttctgggatttctagctcaaagtactgctgtgacacagggaatcatgggagtgaggattttttgctagtgttggactgctgtgatttatctgtgttaaaagtcgaggaggtggatgttgctgctgtgccaggtctggaaaaatttacaaggtctcctgagctcacggttgtttctgaggagttcaggaatcagattgtacgtgaacttgtgactttgcctgcaaatcgttggagggagcagttagactattacgctcgctgcagccaggctcctggctgtggggaactcctctttgacactgacacttggagcttgcagataaggaagacaggggctcagacagctactgactttcctcatgctatcaggatatggtacaaaactaaacctgaagggcgatcggttacatggacctcagaccagagtggcaggccatgtgtttatactgtgggatctcccataaacaacagggccctttttccatgccaggagccacccgttgccatgtcaacatggcaggctacagttcgagcagctgcatcttttgttgttttaatgagtggggaaaattctgccaaaccaacgcagctttgggaagagtgctcaagctggtattactatgtaactatgccaatgccagcctccaccttcacaattgcagtgggatgctggacagaaatgaagatggagacatggtcatcaaatgatttggcaacagagagacccttctcaccttctgaggccaacttcaggcatgttggtgtttgcagtcacatggaatacccctgccgcttccagaatgcttctgccaccacccaggagatcattcctcatcgggtctttgcccctgtgtgcctcacgggtgcctgccaagagacccttctgcggctgatccctccttgcctctcagcagcacattctgttctgggagcacacccgttctctcggctggatgttctcatcgtccctgccaactttccaagtctggggatggccagacccagtaaagacaaaactggccacacaagtgactcgggagcatctgttatcaagcatggacttaatccggagaagatcttcatgcaggtgcattatttaaagggctacttccttcttcggtttcttgccaaaagacttggagatgaaacctatttttcatttttaagaaaatttgtgcacacatttcatggacagctgattctttcccaggatttccttcaaatgctactggagaacattccagaagaaaaaaggcttgagctgtctgttgaaaacatctaccaagactggcttgagagttccggaataccaaagccgctgcagagggagcgtcgcgccggggcggagtgcgggcttgcgcggcaagtgcgcgccgaggtcacgaaatggattggagtgaaccggagaccccgaaaacggaagcgcagggagaaggaagaggtgtttgaaaagcttcttccagaccagctggtcttgcttctggagcatctcttggagcagaagactctgagcccccgaactctgcaaagcctccagaggacataccacctccaggatcaggatgcagaggttcgccatcggtggtgtgaactcattgttaagcacaagttcacgaaagcctacaaaagtgtggagaggttccttcaggaggatcaggaaagaccacagcaagattctttcattcgtctcctcctagcctgggggaccaggctcgaactgaccctggacatcaaaggagggattatgtggctgctaaagccatcggcccacagccctgttcacgtcttggtgcttctctttcccagaggctggtcccagccaggcacacacaaaaggcagattctcgtaaacgcagcctccctccctggaggctgcctcctgccctggatctggagtggagctgctctgagattttgagttcttctgcagagatgattaaatatatccaagagacattggaaaacctgctgaacattttacattggtctgctcagcacatggctggatgcggatatttctataattccagaaagtcacacagctcctctgtatgagaccagtgggcgccatttaaaagaacaggatgagaatctaagatatattattaataaatgtaatggattttttttttgta

SEQ ID NO: 368236 - DNA, 5201 bp, Homo sapiens
tgctgcggtcatctagaggatcccgacgagttgtccgagttatgaatatggaatgaagggataaattcctgatgtctccattaagctcctctgtgtaaaatactccatggcaaagttgctgctatttaaagtagtgagtttgatcttggctttgatctaaatcttttgatcttgaaagaaggatggagtagcaataaagagagggcaagacagattttctttaaagaaatgtgataaagttaaagggatggtcaagacccagcaagtaactcggacaacccgactctccgccccggcccgccctcaccggcaggcgggttccagcaactgctgatgcggatgagaaggcctttggcgggtggaggaaaatcttggggtatcgcacatttttataaaccgctgcagagggagcgtcgcgccggggcggagtgcgggcttgcgcggcaagtgcgcgccgaggtcacgaaatggattggagtgaaccggagaccccgaaaacggaagcgcagggagaaggaagaggtgtttgaaaagcttcttccagaccagctggtcttgcttctggagcatctcttggagcagaagactctgagcccccgaactctgcaaagcctccagaggacataccacctccaggatcaggatgcagaggttcgccatcggtggtgtgaactcattgttaagcacaagttcacgaaagcctacaaaagtgtggagaggttccttcaggaggatcaggccatgggtgtgtacctctacggggagctgatggtgagtgaggacgccagacagcagcagctcgcccgtaggtgcttcgagcggaccaaggagcagatggataggtcctcagcccaggtggtggccgaaatgttattttaacgaggtgattctctccctttcctttctgtcatttagttctaaccagatactccttttaggagccaactaaatcagtaagccgaatagttagccaagactacccgcagcatcaatagtcggctccctggcccagggcctggagagtaactggccaagtgggtgctgggctggtatgggagccccgggtccctggagcaccttgcctggctgtggcagtcaccgggaagcagaggctgtccacctggaggcacagcggcactccttggcactattttggccacttcaggttttataatctgttgaaacaaaaattgtgggggaacatcttgagtaggtttagagatggaatgggaagcctggcagaagcgctggtccagtcttcagggtcacggctgatacaggagtttaagcggccgtgtgactccaaagcctagcttctgcaagcagatgttttcttctagccatgtgtgaattggaggttccttgggctgtccacgcctggtcatcagctggcaggaggctctccaggcacacgcagcacacacagcacatgcaccacacgtagcacacacactgcatgcagcacacacacaccagaggacgcaccacacagagcacgcacagcacacaccacacagcgcacgcaccacacagagcacacgcggcacacacagcacacacagcgcacgcaccacgcagagcacacacggcacatgcagcatacacaccaaacagcgcacgcaccacacagagcacacgcggcacacgcagcacacacaccacacagagcacctggagcacccacagcacacacaccacgcagagtacacgcggcacacacaccacacacagcgcatgcacaacacagagcacacacagcacatgcaccacacgtagcgcgcacactgcatgcagcacacacaccacacacagcgcgtgcaccacacagagcacctgcggcacacacagcacacaccgcacgcaccacacagagcacatgtggcacacacagtgcacgcaccacacagcacccgcggcgcacacagcacacgtggcatatggcctccatgaccctgtgtcttgagggcaggtcctactttttgctttgttgtgttggagcggaatttctcccctggcttctattggagtcctagattatttaaatcacttcctctgttaattgtgcctggaattaacctgttagatttacttcctagcagttagttgctcagtatgggtttctacactattaaagcaacctagcggtagtacacaaggttttgttaggatagctgtgagattttttttctctaacaatcatcattatttctgtgtctgctccgtttttcttcagtgttttatatgatattaataggggatgtctaattttgtatctttaaaaaaactttatcaaatctgaagcatttttcgtgttatagcttctctataatttttcatggatattgaatatttggtgttgatattcttcactcagttttgaacattgagttttcttctaatgttttgtgcttatgaaaaccatttctgtgtaacgtgtttaagtagcttatttatctgaaagaactctaataatgaaaagaaataaaaagtttttcagaagcatgatcatattcttccagaagagtcaggaaccatgtgtgccaggaaagggaaacgggactgagcgtctcgtagcgaaacgcctgctgcagacttgacgcggctcccctccaggacgggctggcggcacacagactgtgcacttacctcactgccggcctcataatagtaatcagtgtaaatggtgtttctctttcgttttgttatttcgtggcgtacgtgttaaagtgtgtgaaactacaaggccagctagtcctttcatcattccctttggtgcaggttttggagcagcaccacagggcacacccctcgccactctttatggggaatttttgcccaggcaggcagaggagtcatcttggtcacaagtctcccttttccccctccccagcatcttcgatcctgtccccacccctccagatgcatccaggggttgcaagcctgccccccaaccagtccccgtgaggaacagtggccgggattgtcccagggccccttccagcagggggacctcctgacttgagagtccccaaagccttcccagggcagctagaatctgcctggagagaagggatcttgtccccaagggttagaggcagtaaactaatagcaaggacagctgcctttagcaattgtgtgtgtcgcatggccggtccctgcatttttcttcagttccaaagctgcactggcatttttatggtcatctctggagtccctttgattcaagaaattatacctctaggatgccaactaaacgaacaacaaacagaaactccacctgtttgctagcataacaggcgtgaaggcggcagtgtcgccggcgtccttccgcggaagcccagtgtgtgcagacagcacggggtggcgctgctctcaggtgctctggctgcttgggttcctggcatgctgatttgtgacttaagattaaaatcacattgccagggattaccacgcaaccacgaccttggctgctcctccagaaaccgtggtcgcgctcactgcagattggagaacaggtgcatctcgtagctcttctttggaaacaaaagaagccaccagctgaggaagatgctcaccggtcaccgtccctttatttatgcccagcgatgacctctctaacaaggtgcagagcttagctgattggtgaacagtgattggtttccgctttgttcacagtggctaagttctgcacctgaagagaaggtgagatggggacagttaagttggagccgctggggcagaggccgttgctgacgggccggccgctgctgcacagtcagcttgggtgcggagcgcgatcctggaggatgagagaccacttgaccccaaggatgcactgtctcctgctgggaatgctagccatgtactgagtccttaagtctgtccacagaaacatccactaatcggacatctgtctgaaaggtcaaatgtattgaaagttgcaaaaattcttcttacaaaaaactaaaaccaaatgcatcacctaagtcgtgtgaaatcatgtggtagctcatggctgtgagcggggcggggcggggctttcggaggagctcctgttgttctgggcgcggtgaactctctcttgtatttgcagtccaggccttcgcgtctcctgcgccagcagacggtgcccacggagctcccagctgaggcgctgcttctccgggctgtcgattggacccgccctccggtgcctactgagctgatatcagttctcattttacacactggctcagttcagcaggaacaggagtcgagcccttgagcaaaaagccttcgtgtctgtaagtgcccgaggctcaggagagctggggctcccactcgcggcagacaggcccgcgtccaccctgcgtccaccccggcccggcggcagcacggtgccagtcatctgcatgtgctcctgcggcgtgggggtttgtagacttggaaaaccctgttggcagaaagttaagagctcccaggcctgaaggcaggacacagtgccagcagggggccgtttgcccccatgtgtaagggaggcagggcccagctctcccacggcgaggtgagctgagactttctgagaatagttagagtgggtgcgtgtctgaaatgggtactcctagcagctattgtgtacgcaaagcctgagtacagcctgctggtgtcatggccacgtgtgagcaggccagcgtcacacggctcgctgtgacccgtcccggagactgaaatgggcctgggtcttctccttgtcctgtgattaaagtcctctcttgaaagtggagagcaaaggcacacagaggtgcgcgctcacaagaattcctcccggtgactgggtaatcaatgttactgctgtttcctttgcaggaaagaccacagcaagattctttcattcgtctcctcctagccaggcacacacaaaaggcagattctcgtaaacgcagcctccctccctggaggctgcctcctgccctggatctggagtggagctgctctgagattttgagttcttctgcagagatgattaaatatatccaagagacattggaaaacctgctgaacattttacattggtctgctcagcacatggctggatgcggatatttctataattccagaaagtcacacagctcctctgtatgagaccagtgggcgccatttaaaagaacaggatgagaatctaagatatattattaataaatgtaatggattttttttttgta

SEQ ID NO: 368237 - DNA, 970 bp, Homo sapiens
gattcaagggcataggcgtcggaattgtgatttcgtgcgtgttttatttaccaggccttcaaatcaaaaaggccaggcaaacacacgttctggggctatcaagaaagttcacacgaaggacaaatccagcagggagaaagtgacataccttgcgggctcaggcttgggatttctgcagccacgcgcgcgttcacccgacgggacctcgcctgcactgccgccgggagaagcctgctctagactccggctccaggggagagggctgggctccacagagaggagcagcctcttcttccagaccagctggtcttgcttctggagcatctcttggagcagaagactctgagcccccgaactctgcaaagcctccagaggacataccacctccaggatcaggatgcagaggttcgccatcggtggtgtgaactcattgttaagcacaagttcacgaaagcctacaaaagtgtggagaggttccttcaggaggatcaggaaagaccacagcaagattctttcattcgtctcctcctagcctgggggaccaggctcgaactgaccctggacatcaaaggagggattatgtggctgctaaagccatcggcccacagccctgttcacgtcttggtgcttctctttcccagaggctggtcccagccaggcacacacaaaaggcagattctcgtaaacgcagcctccctccctggaggctgcctcctgccctggatctggagtggagctgctctgagattttgagttcttctgcagagatgattaaatatatccaagagacattggaaaacctgctgaacattttacattggtctgctcagcacatggctggatgcggatatttctataattccagaaagtcacacagctcctctgtatgagaccagtgggcgccatttaaaagaacaggatgagaatctaagatatattattaataaatgtaatggattttttttttgta

SEQ ID NO: 368238 - DNA, 1702 bp, Homo sapiens
tgctgcggtcatctagaggatcccgacgagttgtccgagttatgaatatggaatgaagggataaattcctgatgtctccattaagctcctctgtgtaaaatactccatggcaaagttgctgctatttaaagtagtgagtttgatcttggctttgatctaaatcttttgatcttgaaagaaggatggagtagcaataaagagagggcaagacagattttctttaaagaaatgtgataaagttaaagggatggtcaagacccagcaagtaactcggacaacccgactctccgccccggcccgccctcaccggcaggcgggttccagcaactgctgatgcggatgagaaggcctttggcgggtggaggaaaatcttggggtatcgcacatttttataaaccgctgcagagggagcgtcgcgccggggcggagtgcgggcttgcgcggcaagtgcgcgccgaggtcacgaaatggattggagtgaaccggagaccccgaaaacggaagcgcagggagaaggaagaggtgtttgaaaagttttgatttgaagttcctttaaaggctgttggagcttttgcaaatacccagctaatgaaaggcacttaagattgggcccatctgcatcatcacattgaagttttctgtctaaaggaaggttccagctacctgttacccttttgctaaacacagttgcagtgttgcagtgtatttcatgacaaaagtgcactctagttttctgtgaaatgattattttctctgaaatgattcttggtcatgttgagcttctaaatgttaaagagaacatagtgcttttgacctgtggaaatctcatcttggtaccatggtgctgcacagaccatcaggaagaactgaaaagttcaggcaacttgagaaaataaagtcaccaccagcaagaagctgtctaaaataaccggaagattataacccaagcacgtggaggagtgtgctagtgagtagaatgttatgaaagctactagaggtcctccatagatgcatgtgctagtcctaaggagaaggaagaggagaaggattgccacggaggaacacctgaagtttcagttgagcactttgtttggaaagttgtccaaggctggagttgtgagagctgggaaagacctcacaagcttctctaattcaagtccttgtttcacatatgagaatgcagaggccctgagaagttgattcccaggcctgcatgctggcctggaactagagcctgggtctcctcttgctttttccagctgtctgcccaggtagctccccaaggcaggcatggaggcagagctgctttgggttccaggtaaggagagatgtgtccaggtggcctttgttgtattgtggggcacagacactgagggagacagggaaaggtctgggagacacaagatggtaccccagaaggccatcctttgtagactagacacacatccaaagggagggctgtttcctggcttattgaggacttttccatttgggctagaagtaaactgagtcagattttgagagatcagtaattccaaagagcagataaggattctatagtaacacagctgggttcactgcacgggttgatgtcaaattgtgcttttcatgttacattagtggattttacaaggcacagattatttgacatttttgtgatgcttgttatagaccaactgtgacatgacagtattattaaaaa

SEQ ID NO: 368239 - DNA, 2017 bp, Homo sapiens
tgctgcggtcatctagaggatcccgacgagttgtccgagttatgaatatggaatgaagggataaattcctgatgtctccattaagctcctctgtgtaaaatactccatggcaaagttgctgctatttaaagtagtgagtttgatcttggctttgatctaaatcttttgatcttgaaagaaggatggagtagcaataaagagagggcaagacagattttctttaaagaaatgtgataaagttaaagggatggtcaagacccagcaagtaactcggacaacccgactctccgccccggcccgccctcaccggcaggcgggttccagcaactgctgatgcggatgagaaggcctttggcgggtggaggaaaatcttggggtatcgcacatttttataaaccgctgcagagggagcgtcgcgccggggcggagtgcgggcttgcgcggcaagtgcgcgccgaggtcacgaaatggattggagtgaaccggagaccccgaaaacggaagcgcagggagaaggaagaggtgtttgaaaagttttgatttgaagttcctttaaaggctgttggagcttttgcaaatacccagctaatgaaaggcacttaagattgggcccatctgcatcatcacattgaagttttctgtctaaaggaaggttccagctacctgttacccttttgctaaacacagttgcagtgttgcagtgtatttcatgacaaaagtgcactctagttttctgtgaaatgattattttctctgaaatgattcttggtcatgttgagcttctaaatgttaaagagaacatagtgcttttgacctgtggaaatctcatcttggtaccatggtgctgcacagaccatcaggaagaactgaaaagttcaggcaacttgagaaaataaagtcaccaccagcaagaagctgtctaaaataaccggaagattataacccaagcacgtggaggagtgtgctagtgagtagaatgttatgaaagctactagaggtcctccatagatgcatgtgctagtcctaaggagaaggaagaggagaaggattgccacggaggaacacctgaagtttcagttgagcactttgtttggaaagttgtccaaggctggagttgtgagagctgggaaagacctcacaagcttctctaattcaagtccttgtttcacatatgagaatgcagaggccctgagaagttgattcccaggcctgcatgctggcctggaactagagcctgggtctcctcttgctttttccagctgtctgcccaggtagctccccaaggcaggcatggaggcagagctgctttgggttccagggggcaggtttgggctggggcctgctgtgtgaccacagtctcccatcttggattgaagctacatcgctgtgtgcatctaactcttgattcacggtctgaccgacgccttggtttctggagaactgccctcgtttatggaagagtcactgtcatcaggagccatcccagggagaggctcagtgggaagtgtaaaggtggagcaagtaaaccggctccagaagagaaggcgaagaaggactatttctgtttagatttgcttaaccgcattttcactttcttgggaacccctgatggagttcaaggtcatagaagagaagaaatcagacactgctacaggactcttgctcttggttcagattattcaatgggaggggagaagagagtagtcgcaagtgattgttgtagattttgtctcagctttttgtttttctttgtatcaaacctgttttgagatcatacactgttacagagaaagagaggaggcatattataaacgtgtggacttcagtgttattccttctcttcaaaatgatgttccaggtgtctagagggtgaggtatgtcatttacatgaaggttaagaataaaacagaaagtgcctctatggtattcttagtggggtttttttcctctgaaaaactgttgccagcatatttgggaatacatccttatattattatttttgagatggggtctctgt

SEQ ID NO: 368240 - DNA, 1612 bp, Homo sapiens
tgctgcggtcatctagaggatcccgacgagttgtccgagttatgaatatggaatgaagggataaattcctgatgtctccattaagctcctctgtgtaaaatactccatggcaaagttgctgctatttaaagtagtgagtttgatcttggctttgatctaaatcttttgatcttgaaagaaggatggagtagcaataaagagagggcaagacagattttctttaaagaaatgtgataaagttaaagggatggtcaagacccagcaagtaactcggacaacccgactctccgccccggcccgccctcaccggcaggcgggttccagcaactgctgatgcggatgagaaggcctttggcgggtggaggaaaatcttggggtatcgcacatttttataaaccgctgcagagggagcgtcgcgccggggcggagtgcgggcttgcgcggcaagtgcgcgccgaggtcacgaaatggattggagtgaaccggagaccccgaaaacggaagcgcagggagaaggaagaggtgtttgaaaagttttgatttgaagttcctttaaaggctgttggagcttttgcaaatacccagctaatgaaaggcacttaagattgggcccatctgcatcatcacattgaagttttctgtctaaaggaaggttccagctacctgttacccttttgctaaacacagttgcagtgttgcagtgtatttcatgacaaaagtgcactctagttttctgtgaaatgattattttctctgaaatgattcttggtcatgttgagcttctaaatgttaaagagaacatagtgcttttgacctgtggaaatctcatcttggtaccatggtgctgcacagaccatcaggaagaactgaaaagttcaggcaacttgagaaaataaagtcaccaccagcaagaagctgtctaaaataaccggaagattataacccaagcacgtggaggagtgtgctagtgagtagaatgttatgaaagctactagaggtcctccatagatgcatgtgctagtcctaaggagaaggaagaggagaaggattgccacggaggaacacctgaagtttcagttgagcactttgtttggaaagttgtccaaggctggagttgtgagagctgggaaagacctcacaagcttctctaattcaagtccttgtttcacatatgagaatgcagaggccctgagaagttgattcccaggcctgcatgctggcctggaactagagcctgggtctcctcttgctttttccagctgtctgcccaggtagctccccaagggagacagggaaaggtctgggagacacaagatggtaccccagaaggccatcctttgtagactagacacacatccaaagggagggctgtttcctggcttattgaggacttttccatttgggctagaagtaaactgagtcagattttgagagatcagtaattccaaagagcagataaggattctatagtaacacagctgggttcactgcacgggttgatgtcaaattgtgcttttcatgttacattagtggattttacaaggcacagattatttgacatttttgtgatgcttgttatagaccaactgtgacatgacagtattattaaaaa

SEQ ID NO: 368241 - DNA, 708 bp, Homo sapiens
cctcgtgcgtacttcggcacgagagcagggcccagctctcccacggcgaggtgagctgagactttctgagaatagttagagtgggtgcgtgtctgaaatgggtactcctagcagctattgtgtacgcaaagcctgagtacagcctgctggtgtcatggccacgtgtgagcaggccagcgtcacacggctcgctgtgacccgtcccggagactgaaatgggcctgggtcttctccttgtcctgtgattaaagtcctctcttgaaagtggagagcaaaggcacacagaggtgcgcgctcacaagaattcctcccggtgactgggtaatcaatgttactgctgtttcctttgcaggaaagaccacagcaagattctttcattcgtctcctcctagccaggcacacacaaaaggcagattctcgtaaacgcagcctccctccctggaggctgcctcctgccctggatctggagtggagctgctctgagattttgagttcttctgcagagatgattaaatatatccaagagacattggaaaacctgctgaacattttacattggtctgctcagcacatggctggatgcggatatttctataattccagaaagtcacacagctcctctgtatgagaccagtgggcgccatttaaaagaacaggatgagaatctaagatatattattaataaatgtaatggattttttttttgta

SEQ ID NO: 368242 - DNA, 1051 bp, Homo sapiens
tgctgcggtcatctagaggatcccgacgagttgtccgagttatgaatatggaatgaagggataaattcctgatgtctccattaagctcctctgtgtaaaatactccatggcaaagttgctgctatttaaagtagtgagtttgatcttggctttgatctaaatcttttgatcttgaaagaaggatggagtagcaataaagagagggcaagacagattttctttaaagaaatgtgataaagttaaagggatggtcaagacccagcaagtaactcggacaacccgactctccgccccggcccgccctcaccggcaggcgggttccagcaactgctgatgcggatgagaaggcctttggcgggtggaggaaaatcttggggtatcgcacatttttataaaccgctgcagagggagcgtcgcgccggggcggagtgcgggcttgcgcggcaagtgcgcgccgaggtcacgaaatggattggagtgaaccggagaccccgaaaacggaagcgcagggagaaggaagaggtgtttgaaaagcttcttccagaccagctggtcttgcttctggagcatctcttggagcagaagactctgagcccccgaactctgcaaagcctccagaggacataccacctccaggatcaggatgcagaggttcgccatcggtggtgtgaactcattgttaagcacaagttcacgaaagcctacaaaagtgtggagaggttccttcaggaggatcaggccatgggtgtgtacctctacggggagctgatggtgagtgaggacacgaatgttcaacagggcccttgtcgccccttctctttcccttatttaggagccctgaactcccccagagtctatccattcatgcctcttgtatgttgatgccacttcttggaagaagatgagggcaatgagttagggctccttttccccttccctcccaccagattgctctcccacctttcatttcttcctccaggctttactcccctttttatgccccaccgatacacttgaccaccccttaccccgacacgatgttacaggtagc

SEQ ID NO: 368243 - DNA, 2199 bp, Homo sapiens
tgctttccttttttgccaggagactgaaaggaaccataatttgtgacatcagttgttttctttgataagcagctatttatgattctggaagattaaggcagataggaaaccccatctgagattttaataaatccctcaaacaataaaccacatcatggacatacagctggaccctgccagagatgacctgcctctcatggccaacaccagccacatacttgtgaagcactatgtactggatttggatgtggattttgaaagtcaagtcattgaggggaccatagtgcttttcctcgaggatggaaacagattcaagaaacagaatagctctattgaggaagcctgccaatcagaatcaaacaaagcctgcaaatttgggatgcctgaaccctgccatattcccgtgacaaatgcaaggaccttctcatctgaaatggaatataatgattttgcaatctgtagtaaaggtgaaaaagatacttctgataaagatggtaaccatgacaaccaggaacatgcttctgggatttctagctcaaagtactgctgtgacacagggaatcatgggagtgaggattttttgctagtgttggactgctgtgatttatctgtgttaaaagtcgaggaggtggatgttgctgctgtgccaggtctggaaaaatttacaaggtctcctgagctcacggttgtttctgaggagttcaggaatcagattgtacgtgaacttgtgactttgcctgcaaatcgttggagggagcagttagactattacgctcgctgcagccaggctcctggctgtggggaactcctctttgacactgacacttggagcttgcagataaggaagacaggggctcagacagctactgactttcctcatgctatcaggatatggtacaaaactaaacctgaagggcgatcggttacatggacctcagaccagagtggcaggccatgtgtttatactgtgggatctcccataaacaacagggccctttttccatgccaggagccacccgttgccatgtcaacatggcaggctacagttcgagcagctgcatcttttgttgttttaatgagtggggaaaattctgccaaaccaacgcagctttgggaagagtgctcaagctggtattactatgtaactatgccaatgccagcctccaccttcacaattgcagtgggatgctggacagaaatgaagatggagacatggtcatcaaatgatttggcaacagagagacccttctcaccttctgaggccaacttcaggcatgttggtgtttgcagtcacatggaatacccctgccgcttccagaatgcttctgccaccacccaggagatcattcctcatcgggtctttgcccctgtgtgcctcacgggtgcctgccaagagacccttctgcggctgatccctccttgcctctcagcagcacattctgttctgggagcacacccgttctctcggctggatgttctcatcgtccctgccaactttccaagtctggggatggccagacccagtaaagacaaaactggccacacaagtgactcgggagcatctgttatcaagcatggacttaatccggagaagatcttcatgcaggtgcattatttaaagggctacttccttcttcggtttcttgccaaaagacttggagatgaaacctatttttcatttttaagaaaatttgtgcacacatttcatggacagctgattctttcccaggatttccttcaaatgctactggagaacattccagaagaaaaaaggcttgagctgtctgttgaaaacatctaccaagactggcttgagagttccggaataccaaagccgctgcagagggagcgtcgcgccggggcggagtgcgggcttgcgcggcaagtgcgcgccgaggtcacgaaatggattggagtgaaccggagaccccgaaaacggaagcgcagggagaaggaagaggtgtttgaaaagcttcttccagaccagctggtcttgcttctggagcatctcttggagcagaagactctgagcccccgaactctgcaaagcctccagaggacataccacctccaggatcaggatgcagaggtaaccaggaacactctcggagtttaaccagcaggtccccactgttgttgaagaatggtgatcccattgcagtcccaaactattgaaaccaccatttctattagcaaaaa

SEQ ID NO: 368244 - DNA, 744 bp, Homo sapiens
cgccctccagatagtcgtaggcacagctgtcgtggcgctcaatctcaaaggactggaatgtgaggcccacgtggaaaccctcagacacctggatccgccagatgcagactttgctgggccggtaatcgtctgggtagttgggcgattgaatgtggccatagtcctttttcacatcacccccgcagatggcttcgtagactgcaaagaagccctttccaacccaattgctgctgctgcggaattcaacccagaggcggctccagaagagaaggcgaagaaggactatttctgtttagatttgcttaaccgcattttcactttcttgggaacccctgatggagttcaaggtcatagaagagaagaaatcagacactgctacaggactcttgctcttggttcagattattcaatgggaggggagaagagagtagtcgcaagtgattgttgtagattttgtctcagctttttgtttttctttgtatcaaacctgttttgagatcatacactgttacagagaaagagaggaggcatattataaacgtgtggacttcagtgttattccttctcttcaaaatgatgttccaggtgtctagagggtgaggtatgtcatttacatgaaggttaagaataaaacagaaagtgcctctatggtattcttagtggggtttttttcctctgaaaaactgttgccagcatatttgggaatacatccttatattattatttttgagatggggtctctgt

SEQ ID NO: 368245 - DNA, 503 bp, Homo sapiens
attgcaccaggaccacaacagtgactgtgttttgtgcatgtgtgtctgtgtgtctgtggctgagcagctggccccctatgaggcccgggagcagcaggagctgagggcttgtctgcgctggcgtcgcctccaggacgagatgcaatgctcccccgaggagatgcaggtgttaaggtaaagctgcatggtgatccacagccctctcattcccctccttctttccttcaagacacctccctgccaactgatgacatctgctgtgtttcctttttaaattaagttggggtgggcttcttgtcccccagatgtgatggttatgttctaagtctttcagggcatgcgtttcgatttgccttccgtcattttcctggtgactgtttaggaaaaaactagcatgaggccatttccgggggtcagatccttcgtttgaagttctaacagtcactttacgtggtggctgcggatgtggcgagggttggggtttggcagcctggcagacagta

SEQ ID NO: 368246 - DNA, 595 bp, Homo sapiens
tcagcccacggcctctgtcttctctggggtctttgcaatttctagaccagcaagtgtgtgtggaacaagcacagactgagctcatgtgtgcgtgtgtgtgggtacccacaccttcgcctgatgccctttggcctctgtgccctgcaggccatgggtgtgtacctctacggggagctgatggtgagtgaggacgccagacagcagcagctcgcccgtaggtgcttcgagcggaccaaggagcagatggataggtcctcagcccaggtggtggccgaaatgttattttaacgaggtgattctctccctttcctttctgtcatttagttctaaccagatactccttttaggagccaactaaatcagtaagccgaatagttagccaagactacccgcagcatcaatagtcggctccctggcccagggcctggagagtaactggccaagtgggtgctgggctggtatgggagccccgggtccctggagcaccttgcctggctgtggcagtcaccgggaagcagaggctgtccacctggaggcacagcggcactccttggcactattttggccacttcaggttttataatctgttgaaaca

SEQ ID NO: 368247 - DNA, 481 bp, Homo sapiens
ctggacatcaaaggagggattatgtggctgctaaagccatcggcccacagccctgttcacgtcttggtgcttctctttcccagaggctggtcccagccaggcacacacaaaaggcagattctcgtaaacgcagcctccctccctggaggctgcctcctgccctggatctggagtggagctgctctgagattttgagttcttctgcagagatgattaaatatatccaagagacattggaaaacctgctgaacattttacattggtctgctcagcacatggctggatgcggatatttctataattccagaaagtcacacagctcctctgtatgagaccagtgggcgccatttaaaagaacaggatgagaatctaagatatattattaataaatgtaatggattttttttttgtaatacgtgtttgcttctaaatttcatactgtttaaaaataataaaggccaggtgcggtggctcatgccta

SEQ ID NO: 368248 - DNA, 1202 bp, Homo sapiens
tgctttccttttttgccaggagactgaaaggaaccataatttgtgacatcagttgttttctttgataagcagctatttatgattctggaagattaaggcagataggaaaccccatctgagattttaataaatccctcaaacaataaaccacatcatggacatacagctggaccctgccagagatgacctgcctctcatggccaacaccagccacatacttgtgaagcactatgtactggatttggatgtggattttgaaagtcaagtcattgaggggaccatagtgcttttcctcgaggatggaaacagattcaagaaacagaatagctctattgaggaagcctgccaatcagaatcaaacaaagcctgcaaatttgggatgcctgaaccctgccatattcccgtgacaaatgcaaggaccttctcatctgaaatggaatataatgattttgcaatctgtagtaaaggtgaaaaagatacttctgataaagatggtaaccatgacaaccaggaacatgcttctgggatttctagctcaaagtactgctgtgacacagggaatcatgggagtgaggattttttgctagtgttggactgctgtgatttatctgtgttaaaagtcgaggaggtggatgttgctgctgtgccaggtctggaaaaatttacaaggtctcctgagctcacggttgtttctgaggagttcaggaatcagattgtacgtgaacttgtgactttgcctgcaaatcgttggagggagcagttagactattacgctcgctgcagccaggctcctggctgtggggaactcctctttgacactgacacttggagcttgcagataaggaagacaggggctcagacagctactgactttcctcatgctatcaggatatggtacaaaactaaacctgaagggcgatcggttacatggacctcagaccagagtggcaggccatgtgtttatactgtgggatctcccataaacaacagggccctttttccatgccaggagccacccgttgccatgtcaacatggcaggctacagttcgagcagctgcatcttttgttgttttaatgagtggggaaaattctgccaaaccaacgcagctttgggaaggtactgtacatgtgttctttgcttatttatgtattgcacacatgtggacccaggaacccaataaacagtatttttctaaacttt

SEQ ID NO: 368249 - DNA, 2291 bp, Homo sapiens
tgctttccttttttgccaggagactgaaaggaaccataatttgtgacatcagttgttttctttgataagcagctatttatgattctggaagattaaggcagataggaaaccccatctgagattttaataaatccctcaaacaataaaccacatcatggacatacagctggaccctgccagagatgacctgcctctcatggccaacaccagccacatacttgtgaagcactatgtactggatttggatgtggattttgaaagtcaagtcattgaggggaccatagtgcttttcctcgaggatggaaacagattcaagaaacagaatagctctattgaggaagcctgccaatcagaatcaaacaaagcctgcaaatttgggatgcctgaaccctgccatattcccgtgacaaatgcaaggaccttctcatctgaaatggaatataatgattttgcaatctgtagtaaaggtgaaaaagatacttctgataaagatggtaaccatgacaaccaggaacatgcttctgggatttctagctcaaagtactgctgtgacacagggaatcatgggagtgaggattttttgctagtgttggactgctgtgatttatctgtgttaaaagtcgaggaggtggatgttgctgctgtgccaggtctggaaaaatttacaaggtctcctgagctcacggttgtttctgaggagttcaggaatcagattgtacgtgaacttgtgactttgcctgcaaatcgttggagggagcagttagactattacgctcgctgcagccaggctcctggctgtggggaactcctctttgacactgacacttggagcttgcagataaggaagacaggggctcagacagctactgactttcctcatgctatcaggatatggtacaaaactaaacctgaagggcgatcggttacatggacctcagaccagagtggcaggccatgtgtttatactgtgggatctcccataaacaacagggccctttttccatgccaggagccacccgttgccatgtcaacatggcaggctacagttcgagcagctgcatcttttgttgttttaatgagtggggaaaattctgccaaaccaacgcagctttgggaagagtgctcaagctggtattactatgtaactatgccaatgccagcctccaccttcacaattgcagtgggatgctggacagaaatgaagatggagacatggtcatcaaatgatttggcaacagagagacccttctcaccttctgaggccaacttcaggcatgttggtgtttgcagtcacatggaatacccctgccgcttccagaatgcttctgccaccacccaggagatcattcctcatcgggtctttgcccctgtgtgcctcacgggtgcctgccaagagacccttctgcggctgatccctccttgcctctcagcagcacattctgttctgggagcacacccgttctctcggctggatgttctcatcgtccctgccaactttccaagtctggggatggccagacccagtaaagacaaaactggccacacaagtgactcgggagcatctgttatcaagcatggacttaatccggagaagatcttcatgcaggtgcattatttaaagggctacttccttcttcggtttcttgccaaaagacttggagatgaaacctatttttcatttttaagaaaatttgtgcacacatttcatggacagctgattctttcccaggatttccttcaaatgctactggagaacattccagaagaaaaaaggcttgagctgtctgttgaaaacatctaccaagactggcttgagagttccggaataccaaagccgctgcagagggagcgtcgcgccggggcggagtgcgggcttgcgcggcaagtgcgcgccgaggtcacgaaatggattggagtgaaccggagaccccgaaaacggaagcgcagggagaaggaagaggtgtttgaaaagcttcttccagaccagctggtcttgcttctggagcatctcttggagcagaagactctgagcccccgaactctgcaaagcctccagaggacataccacctccaggatcaggatgcagaggttcgccatcggtggtgtgaactcattgttaagcacaagttcacgaaagcctacaaaagtgtggagaggttccttcaggaggatcagggtaggtgtcatctttcagcagatggggattctgtaaaggctgtccctgcacttcacacaggaatccacgttctcggtatctctttcataacaaataattaaatctgttacagag

SEQ ID NO: 368250 - DNA, 5570 bp, Homo sapiens
gaaaaaaagaaacagttttccagtgaggcttgtcagggggaagactgatcgccggcaggccggctcggaccatgagcacagttccaagaatgcagggatgaggaggagccgggctgggctgttgagtccaggctgagcccacacatcatgttcctctctcagagcatcttgacaggagggaaccatctctgtgggacccgcctctgccatgaaattgcccatgcctggtttggcctagccatcggggcccgagactggacggaggagtggctgagtgaaggcttcgccactcacttggaggatgtgttttgggccacagcacagcagacccagtaaagacaaaactggccacacaagtgactcgggagcatctgttatcaagcatggacttaatccggagaagatcttcatgcaggtgcattatttaaagggctacttccttcttcggtttcttgccaaaagacttggagatgaaacctatttttcatttttaagaaaatttgtgcacacatttcatggacagctgattctttcccaggatttccttcaaatgctactggagaacattccagaagaaaaaaggcttgagctgtctgttgaaaacatctaccaagactggcttgagagttccggaataccaaagccgctgcagagggagcgtcgcgccggggcggagtgcgggcttgcgcggcaagtgcgcgccgaggtcacgaaatggattggagtgaaccggagaccccgaaaacggaagcgcagggagaaggaagaggtgtttgaaaagcttcttccagaccagctggtcttgcttctggagcatctcttggagcagaagactctgagcccccgaactctgcaaagcctccagaggacataccacctccaggatcaggatgcagaggttcgccatcggtggtgtgaactcattgttaagcacaagttcacgaaagcctacaaaagtgtggagaggttccttcaggaggatcaggccatgggtgtgtacctctacggggagctgatggtgagtgaggacgccagacagcagcagctcgcccgtaggtgcttcgagcggaccaaggagcagatggataggtcctcagcccaggtggtggccgaaatgttattttaacgaggtgattctctccctttcctttctgtcatttagttctaaccagatactccttttaggagccaactaaatcagtaagccgaatagttagccaagactacccgcagcatcaatagtcggctccctggcccagggcctggagagtaactggccaagtgggtgctgggctggtatgggagccccgggtccctggagcaccttgcctggctgtggcagtcaccgggaagcagaggctgtccacctggaggcacagcggcactccttggcactattttggccacttcaggttttataatctgttgaaacaaaaattgtgggggaacatcttgagtaggtttagagatggaatgggaagcctggcagaagcgctggtccagtcttcagggtcacggctgatacaggagtttaagcggccgtgtgactccaaagcctagcttctgcaagcagatgttttcttctagccatgtgtgaattggaggttccttgggctgtccacgcctggtcatcagctggcaggaggctctccaggcacacgcagcacacacagcacatgcaccacacgtagcacacacactgcatgcagcacacacacaccagaggacgcaccacacagagcacgcacagcacacaccacacagcgcacgcaccacacagagcacacgcggcacacacagcacacacagcgcacgcaccacgcagagcacacacggcacatgcagcatacacaccaaacagcgcacgcaccacacagagcacacgcggcacacgcagcacacacaccacacagagcacctggagcacccacagcacacacaccacgcagagtacacgcggcacacacaccacacacagcgcatgcacaacacagagcacacacagcacatgcaccacacgtagcgcgcacactgcatgcagcacacacaccacacacagcgcgtgcaccacacagagcacctgcggcacacacagcacacaccgcacgcaccacacagagcacatgtggcacacacagtgcacgcaccacacagcacccgcggcgcacacagcacacgtggcatatggcctccatgaccctgtgtcttgagggcaggtcctactttttgctttgttgtgttggagcggaatttctcccctggcttctattggagtcctagattatttaaatcacttcctctgttaattgtgcctggaattaacctgttagatttacttcctagcagttagttgctcagtatgggtttctacactattaaagcaacctagcggtagtacacaaggttttgttaggatagctgtgagattttttttctctaacaatcatcattatttctgtgtctgctccgtttttcttcagtgttttatatgatattaataggggatgtctaattttgtatctttaaaaaaactttatcaaatctgaagcatttttcgtgttatagcttctctataatttttcatggatattgaatatttggtgttgatattcttcactcagttttgaacattgagttttcttctaatgttttgtgcttatgaaaaccatttctgtgtaacgtgtttaagtagcttatttatctgaaagaactctaataatgaaaagaaataaaaagtttttcagaagcatgatcatattcttccagaagagtcaggaaccatgtgtgccaggaaagggaaacgggactgagcgtctcgtagcgaaacgcctgctgcagacttgacgcggctcccctccaggacgggctggcggcacacagactgtgcacttacctcactgccggcctcataatagtaatcagtgtaaatggtgtttctctttcgttttgttatttcgtggcgtacgtgttaaagtgtgtgaaactacaaggccagctagtcctttcatcattccctttggtgcaggttttggagcagcaccacagggcacacccctcgccactctttatggggaatttttgcccaggcaggcagaggagtcatcttggtcacaagtctcccttttccccctccccagcatcttcgatcctgtccccacccctccagatgcatccaggggttgcaagcctgccccccaaccagtccccgtgaggaacagtggccgggattgtcccagggccccttccagcagggggacctcctgacttgagagtccccaaagccttcccagggcagctagaatctgcctggagagaagggatcttgtccccaagggttagaggcagtaaactaatagcaaggacagctgcctttagcaattgtgtgtgtcgcatggccggtccctgcatttttcttcagttccaaagctgcactggcatttttatggtcatctctggagtccctttgattcaagaaattatacctctaggatgccaactaaacgaacaacaaacagaaactccacctgtttgctagcataacaggcgtgaaggcggcagtgtcgccggcgtccttccgcggaagcccagtgtgtgcagacagcacggggtggcgctgctctcaggtgctctggctgcttgggttcctggcatgctgatttgtgacttaagattaaaatcacattgccagggattaccacgcaaccacgaccttggctgctcctccagaaaccgtggtcgcgctcactgcagattggagaacaggtgcatctcgtagctcttctttggaaacaaaagaagccaccagctgaggaagatgctcaccggtcaccgtccctttatttatgcccagcgatgacctctctaacaaggtgcagagcttagctgattggtgaacagtgattggtttccgctttgttcacagtggctaagttctgcacctgaagagaaggtgagatggggacagttaagttggagccgctggggcagaggccgttgctgacgggccggccgctgctgcacagtcagcttgggtgcggagcgcgatcctggaggatgagagaccacttgaccccaaggatgcactgtctcctgctgggaatgctagccatgtactgagtccttaagtctgtccacagaaacatccactaatcggacatctgtctgaaaggtcaaatgtattgaaagttgcaaaaattcttcttacaaaaaactaaaaccaaatgcatcacctaagtcgtgtgaaatcatgtggtagctcatggctgtgagcggggcggggcggggctttcggaggagctcctgttgttctgggcgcggtgaactctctcttgtatttgcagtccaggccttcgcgtctcctgcgccagcagacggtgcccacggagctcccagctgaggcgctgcttctccgggctgtcgattggacccgccctccggtgcctactgagctgatatcagttctcattttacacactggctcagttcagcaggaacaggagtcgagcccttgagcaaaaagccttcgtgtctgtaagtgcccgaggctcaggagagctggggctcccactcgcggcagacaggcccgcgtccaccctgcgtccaccccggcccggcggcagcacggtgccagtcatctgcatgtgctcctgcggcgtgggggtttgtagacttggaaaaccctgttggcagaaagttaagagctcccaggcctgaaggcaggacacagtgccagcagggggccgtttgcccccatgtgtaagggaggcagggcccagctctcccacggcgaggtgagctgagactttctgagaatagttagagtgggtgcgtgtctgaaatgggtactcctagcagctattgtgtacgcaaagcctgagtacagcctgctggtgtcatggccacgtgtgagcaggccagcgtcacacggctcgctgtgacccgtcccggagactgaaatgggcctgggtcttctccttgtcctgtgattaaagtcctctcttgaaagtggagagcaaaggcacacagaggtgcgcgctcacaagaattcctcccggtgactgggtaatcaatgttactgctgtttcctttgcaggaaagaccacagcaagattctttcattcgtctcctcctagcctgggggaccaggctcgaactgaccctggacatcaaaggagggattatgtggctgctaaagccatcggcccacagccctgttcacgtcttggtgcttctctttcccagaggctggtcccagccaggcacacacaaaaggcagattctcgtaaacgcagcctccctccctggaggctgcctcctgccctggatctggagtggagctgctctgagattttgagttcttctgcagagatgattaaatatatccaagagacattggaaaacctgctgaacattttacattggtctgctcagcacatggctggatgcggatatttctataattccagaaagtcacacagctcctctgtatgagaccagtgggcgccatttaaaagaacaggatgagaatctaagatatattattaataaatgtaatggattttttttttgta

SEQ ID NO: 368251 - DNA, 4959 bp, Homo sapiens
cccggatgagctcagaccagctactcctagggacacactttgcggggcaggagtcccgtgtctgtaatgccacacaggctctccgcgtggtaattctgggaaccatctctgtctgttcagagcgttcctgacacggccatcatggtgggaatgcctgctcatcgttctgtcaccagtgaaatcgtcagagtctgtgtagagaattgggagctgaggattccttggggttttgagtacaaggaggagacagggattgcagactgcagcttccaaccagcaagtgtgtgtggaacaagcacagactgagctcatgtgtgcgtgtgtgtgggtacccacaccttcgcctgatgccctttggcctctgtgccctgcaggccatgggtgtgtacctctacggggagctgatggtgagtgaggacgccagacagcagcagctcgcccgtaggtgcttcgagcggaccaaggagcagatggataggtcctcagcccaggtggtggccgaaatgttattttaacgaggtgattctctccctttcctttctgtcatttagttctaaccagatactccttttaggagccaactaaatcagtaagccgaatagttagccaagactacccgcagcatcaatagtcggctccctggcccagggcctggagagtaactggccaagtgggtgctgggctggtatgggagccccgggtccctggagcaccttgcctggctgtggcagtcaccgggaagcagaggctgtccacctggaggcacagcggcactccttggcactattttggccacttcaggttttataatctgttgaaacaaaaattgtgggggaacatcttgagtaggtttagagatggaatgggaagcctggcagaagcgctggtccagtcttcagggtcacggctgatacaggagtttaagcggccgtgtgactccaaagcctagcttctgcaagcagatgttttcttctagccatgtgtgaattggaggttccttgggctgtccacgcctggtcatcagctggcaggaggctctccaggcacacgcagcacacacagcacatgcaccacacgtagcacacacactgcatgcagcacacacacaccagaggacgcaccacacagagcacgcacagcacacaccacacagcgcacgcaccacacagagcacacgcggcacacacagcacacacagcgcacgcaccacgcagagcacacacggcacatgcagcatacacaccaaacagcgcacgcaccacacagagcacacgcggcacacgcagcacacacaccacacagagcacctggagcacccacagcacacacaccacgcagagtacacgcggcacacacaccacacacagcgcatgcacaacacagagcacacacagcacatgcaccacacgtagcgcgcacactgcatgcagcacacacaccacacacagcgcgtgcaccacacagagcacctgcggcacacacagcacacaccgcacgcaccacacagagcacatgtggcacacacagtgcacgcaccacacagcacccgcggcgcacacagcacacgtggcatatggcctccatgaccctgtgtcttgagggcaggtcctactttttgctttgttgtgttggagcggaatttctcccctggcttctattggagtcctagattatttaaatcacttcctctgttaattgtgcctggaattaacctgttagatttacttcctagcagttagttgctcagtatgggtttctacactattaaagcaacctagcggtagtacacaaggttttgttaggatagctgtgagattttttttctctaacaatcatcattatttctgtgtctgctccgtttttcttcagtgttttatatgatattaataggggatgtctaattttgtatctttaaaaaaactttatcaaatctgaagcatttttcgtgttatagcttctctataatttttcatggatattgaatatttggtgttgatattcttcactcagttttgaacattgagttttcttctaatgttttgtgcttatgaaaaccatttctgtgtaacgtgtttaagtagcttatttatctgaaagaactctaataatgaaaagaaataaaaagtttttcagaagcatgatcatattcttccagaagagtcaggaaccatgtgtgccaggaaagggaaacgggactgagcgtctcgtagcgaaacgcctgctgcagacttgacgcggctcccctccaggacgggctggcggcacacagactgtgcacttacctcactgccggcctcataatagtaatcagtgtaaatggtgtttctctttcgttttgttatttcgtggcgtacgtgttaaagtgtgtgaaactacaaggccagctagtcctttcatcattccctttggtgcaggttttggagcagcaccacagggcacacccctcgccactctttatggggaatttttgcccaggcaggcagaggagtcatcttggtcacaagtctcccttttccccctccccagcatcttcgatcctgtccccacccctccagatgcatccaggggttgcaagcctgccccccaaccagtccccgtgaggaacagtggccgggattgtcccagggccccttccagcagggggacctcctgacttgagagtccccaaagccttcccagggcagctagaatctgcctggagagaagggatcttgtccccaagggttagaggcagtaaactaatagcaaggacagctgcctttagcaattgtgtgtgtcgcatggccggtccctgcatttttcttcagttccaaagctgcactggcatttttatggtcatctctggagtccctttgattcaagaaattatacctctaggatgccaactaaacgaacaacaaacagaaactccacctgtttgctagcataacaggcgtgaaggcggcagtgtcgccggcgtccttccgcggaagcccagtgtgtgcagacagcacggggtggcgctgctctcaggtgctctggctgcttgggttcctggcatgctgatttgtgacttaagattaaaatcacattgccagggattaccacgcaaccacgaccttggctgctcctccagaaaccgtggtcgcgctcactgcagattggagaacaggtgcatctcgtagctcttctttggaaacaaaagaagccaccagctgaggaagatgctcaccggtcaccgtccctttatttatgcccagcgatgacctctctaacaaggtgcagagcttagctgattggtgaacagtgattggtttccgctttgttcacagtggctaagttctgcacctgaagagaaggtgagatggggacagttaagttggagccgctggggcagaggccgttgctgacgggccggccgctgctgcacagtcagcttgggtgcggagcgcgatcctggaggatgagagaccacttgaccccaaggatgcactgtctcctgctgggaatgctagccatgtactgagtccttaagtctgtccacagaaacatccactaatcggacatctgtctgaaaggtcaaatgtattgaaagttgcaaaaattcttcttacaaaaaactaaaaccaaatgcatcacctaagtcgtgtgaaatcatgtggtagctcatggctgtgagcggggcggggcggggctttcggaggagctcctgttgttctgggcgcggtgaactctctcttgtatttgcagtccaggccttcgcgtctcctgcgccagcagacggtgcccacggagctcccagctgaggcgctgcttctccgggctgtcgattggacccgccctccggtgcctactgagctgatatcagttctcattttacacactggctcagttcagcaggaacaggagtcgagcccttgagcaaaaagccttcgtgtctgtaagtgcccgaggctcaggagagctggggctcccactcgcggcagacaggcccgcgtccaccctgcgtccaccccggcccggcggcagcacggtgccagtcatctgcatgtgctcctgcggcgtgggggtttgtagacttggaaaaccctgttggcagaaagttaagagctcccaggcctgaaggcaggacacagtgccagcagggggccgtttgcccccatgtgtaagggaggcagggcccagctctcccacggcgaggtgagctgagactttctgagaatagttagagtgggtgcgtgtctgaaatgggtactcctagcagctattgtgtacgcaaagcctgagtacagcctgctggtgtcatggccacgtgtgagcaggccagcgtcacacggctcgctgtgacccgtcccggagactgaaatgggcctgggtcttctccttgtcctgtgattaaagtcctctcttgaaagtggagagcaaaggcacacagaggtgcgcgctcacaagaattcctcccggtgactgggtaatcaatgttactgctgtttcctttgcaggaaagaccacagcaagattctttcattcgtctcctcctagcctgggggaccaggctcgaactgaccctggacatcaaaggagggattatgtggctgctaaagccatcggcccacagccctgttcacgtcttggtgcttctctttcccagaggctggtcccagccaggcacacacaaaaggcagattctcgtaaacgcagcctccctccctggaggctgcctcctgccctggatctggagtggagctgctctgagattttgagttcttctgcagagatgattaaatatatccaagagacattggaaaacctgctgaacattttacattggtctgctcagcacatggctggatgcggatatttctataattccagaaagtcacacagctcctctgtatgagaccagtgggcgccatttaaaagaacaggatgagaatctaagatatattattaataaatgtaatggattttttttttgta

SEQ ID NO: 368252 - DNA, 5017 bp, Homo sapiens
cgcggccgcgcctgaggtgatgcggaccccgggcgggcgcagggcgcgggctccggcgccgccgctgcgtcctccccggccgcgggcgagccgctgcagagggagcgtcgcgccggggcggagtgcgggcttgcgcggcaagtgcgcgccgaggtcacgaaatggattggagtgaaccggagaccccgaaaacggaagcgcagggagaaggaagaggtgtttgaaaagcttcttccagaccagctggtcttgcttctggagcatctcttggagcagaagactctgagcccccgaactctgcaaagcctccagaggacataccacctccaggatcaggatgcagaggttcgccatcggtggtgtgaactcattgttaagcacaagttcacgaaagcctacaaaagtgtggagaggttccttcaggaggatcaggccatgggtgtgtacctctacggggagctgatggtgagtgaggacgccagacagcagcagctcgcccgtaggtgcttcgagcggaccaaggagcagatggataggtcctcagcccaggtggtggccgaaatgttattttaacgaggtgattctctccctttcctttctgtcatttagttctaaccagatactccttttaggagccaactaaatcagtaagccgaatagttagccaagactacccgcagcatcaatagtcggctccctggcccagggcctggagagtaactggccaagtgggtgctgggctggtatgggagccccgggtccctggagcaccttgcctggctgtggcagtcaccgggaagcagaggctgtccacctggaggcacagcggcactccttggcactattttggccacttcaggttttataatctgttgaaacaaaaattgtgggggaacatcttgagtaggtttagagatggaatgggaagcctggcagaagcgctggtccagtcttcagggtcacggctgatacaggagtttaagcggccgtgtgactccaaagcctagcttctgcaagcagatgttttcttctagccatgtgtgaattggaggttccttgggctgtccacgcctggtcatcagctggcaggaggctctccaggcacacgcagcacacacagcacatgcaccacacgtagcacacacactgcatgcagcacacacacaccagaggacgcaccacacagagcacgcacagcacacaccacacagcgcacgcaccacacagagcacacgcggcacacacagcacacacagcgcacgcaccacgcagagcacacacggcacatgcagcatacacaccaaacagcgcacgcaccacacagagcacacgcggcacacgcagcacacacaccacacagagcacctggagcacccacagcacacacaccacgcagagtacacgcggcacacacaccacacacagcgcatgcacaacacagagcacacacagcacatgcaccacacgtagcgcgcacactgcatgcagcacacacaccacacacagcgcgtgcaccacacagagcacctgcggcacacacagcacacaccgcacgcaccacacagagcacatgtggcacacacagtgcacgcaccacacagcacccgcggcgcacacagcacacgtggcatatggcctccatgaccctgtgtcttgagggcaggtcctactttttgctttgttgtgttggagcggaatttctcccctggcttctattggagtcctagattatttaaatcacttcctctgttaattgtgcctggaattaacctgttagatttacttcctagcagttagttgctcagtatgggtttctacactattaaagcaacctagcggtagtacacaaggttttgttaggatagctgtgagattttttttctctaacaatcatcattatttctgtgtctgctccgtttttcttcagtgttttatatgatattaataggggatgtctaattttgtatctttaaaaaaactttatcaaatctgaagcatttttcgtgttatagcttctctataatttttcatggatattgaatatttggtgttgatattcttcactcagttttgaacattgagttttcttctaatgttttgtgcttatgaaaaccatttctgtgtaacgtgtttaagtagcttatttatctgaaagaactctaataatgaaaagaaataaaaagtttttcagaagcatgatcatattcttccagaagagtcaggaaccatgtgtgccaggaaagggaaacgggactgagcgtctcgtagcgaaacgcctgctgcagacttgacgcggctcccctccaggacgggctggcggcacacagactgtgcacttacctcactgccggcctcataatagtaatcagtgtaaatggtgtttctctttcgttttgttatttcgtggcgtacgtgttaaagtgtgtgaaactacaaggccagctagtcctttcatcattccctttggtgcaggttttggagcagcaccacagggcacacccctcgccactctttatggggaatttttgcccaggcaggcagaggagtcatcttggtcacaagtctcccttttccccctccccagcatcttcgatcctgtccccacccctccagatgcatccaggggttgcaagcctgccccccaaccagtccccgtgaggaacagtggccgggattgtcccagggccccttccagcagggggacctcctgacttgagagtccccaaagccttcccagggcagctagaatctgcctggagagaagggatcttgtccccaagggttagaggcagtaaactaatagcaaggacagctgcctttagcaattgtgtgtgtcgcatggccggtccctgcatttttcttcagttccaaagctgcactggcatttttatggtcatctctggagtccctttgattcaagaaattatacctctaggatgccaactaaacgaacaacaaacagaaactccacctgtttgctagcataacaggcgtgaaggcggcagtgtcgccggcgtccttccgcggaagcccagtgtgtgcagacagcacggggtggcgctgctctcaggtgctctggctgcttgggttcctggcatgctgatttgtgacttaagattaaaatcacattgccagggattaccacgcaaccacgaccttggctgctcctccagaaaccgtggtcgcgctcactgcagattggagaacaggtgcatctcgtagctcttctttggaaacaaaagaagccaccagctgaggaagatgctcaccggtcaccgtccctttatttatgcccagcgatgacctctctaacaaggtgcagagcttagctgattggtgaacagtgattggtttccgctttgttcacagtggctaagttctgcacctgaagagaaggtgagatggggacagttaagttggagccgctggggcagaggccgttgctgacgggccggccgctgctgcacagtcagcttgggtgcggagcgcgatcctggaggatgagagaccacttgaccccaaggatgcactgtctcctgctgggaatgctagccatgtactgagtccttaagtctgtccacagaaacatccactaatcggacatctgtctgaaaggtcaaatgtattgaaagttgcaaaaattcttcttacaaaaaactaaaaccaaatgcatcacctaagtcgtgtgaaatcatgtggtagctcatggctgtgagcggggcggggcggggctttcggaggagctcctgttgttctgggcgcggtgaactctctcttgtatttgcagtccaggccttcgcgtctcctgcgccagcagacggtgcccacggagctcccagctgaggcgctgcttctccgggctgtcgattggacccgccctccggtgcctactgagctgatatcagttctcattttacacactggctcagttcagcaggaacaggagtcgagcccttgagcaaaaagccttcgtgtctgtaagtgcccgaggctcaggagagctggggctcccactcgcggcagacaggcccgcgtccaccctgcgtccaccccggcccggcggcagcacggtgccagtcatctgcatgtgctcctgcggcgtgggggtttgtagacttggaaaaccctgttggcagaaagttaagagctcccaggcctgaaggcaggacacagtgccagcagggggccgtttgcccccatgtgtaagggaggcagggcccagctctcccacggcgaggtgagctgagactttctgagaatagttagagtgggtgcgtgtctgaaatgggtactcctagcagctattgtgtacgcaaagcctgagtacagcctgctggtgtcatggccacgtgtgagcaggccagcgtcacacggctcgctgtgacccgtcccggagactgaaatgggcctgggtcttctccttgtcctgtgattaaagtcctctcttgaaagtggagagcaaaggcacacagaggtgcgcgctcacaagaattcctcccggtgactgggtaatcaatgttactgctgtttcctttgcaggaaagaccacagcaagattctttcattcgtctcctcctagcctgggggaccaggctcgaactgaccctggacatcaaaggagggattatgtggctgctaaagccatcggcccacagccctgttcacgtcttggtgcttctctttcccagaggctggtcccagccaggcacacacaaaaggcagattctcgtaaacgcagcctccctccctggaggctgcctcctgccctggatctggagtggagctgctctgagattttgagttcttctgcagagatgattaaatatatccaagagacattggaaaacctgctgaacattttacattggtctgctcagcacatggctggatgcggatatttctataattccagaaagtcacacagctcctctgtatgagaccagtgggcgccatttaaaagaacaggatgagaatctaagatatattattaataaatgtaatggattttttttttgta

SEQ ID NO: 368253 - DNA, 5702 bp, Homo sapiens
tgctgcggtcatctagaggatcccgacgagttgtccgagttatgaatatggaatgaagggataaattcctgatgtctccattaagctcctctgtgtaaaatactccatggcaaagttgctgctatttaaagtagtgagtttgatcttggctttgatctaaatcttttgatcttgaaagaaggatggagtagcaataaagagagggcaagacagattttctttaaagaaatgtgataaagttaaagggatggtcaagacccagcaagtaactcggacaacccgactctccgccccggcccgccctcaccggcaggcgggttccagcaactgctgatgcggatgagaaggcctttggcgggtggaggaaaatcttggggtatcgcacatttttataaaccgctgcagagggagcgtcgcgccggggcggagtgcgggcttgcgcggcaagtgcgcgccgaggtcacgaaatggattggagtgaaccggagaccccgaaaacggaagcgcagggagaaggaagaggtgtttgaaaagcttcttccagaccagctggtcttgcttctggagcatctcttggagcagaagactctgagcccccgaactctgcaaagcctccagaggacataccacctccaggatcaggatgcagaggttcgccatcggtggtgtgaactcattgttaagcacaagttcacgaaagcctacaaaagtgtggagaggttccttcaggaggatcaggccatgggtgtgtacctctacggggagctgatggtgagtgaggacgccagacagcagcagctcgcccgtaggtgcttcgagcggaccaaggagcagatggataggtcctcagcccaggtggtggccgaaatgttattttaacgaggtgattctctccctttcctttctgtcatttagttctaaccagatactccttttaggagccaactaaatcagtaagccgaatagttagccaagactacccgcagcatcaatagtcggctccctggcccagggcctggagagtaactggccaagtgggtgctgggctggtatgggagccccgggtccctggagcaccttgcctggctgtggcagtcaccgggaagcagaggctgtccacctggaggcacagcggcactccttggcactattttggccacttcaggttttataatctgttgaaacaaaaattgtgggggaacatcttgagtaggtttagagatggaatgggaagcctggcagaagcgctggtccagtcttcagggtcacggctgatacaggagtttaagcggccgtgtgactccaaagcctagcttctgcaagcagatgttttcttctagccatgtgtgaattggaggttccttgggctgtccacgcctggtcatcagctggcaggaggctctccaggcacacgcagcacacacagcacatgcaccacacgtagcacacacactgcatgcagcacacacacaccagaggacgcaccacacagagcacgcacagcacacaccacacagcgcacgcaccacacagagcacacgcggcacacacagcacacacagcgcacgcaccacgcagagcacacacggcacatgcagcatacacaccaaacagcgcacgcaccacacagagcacacgcggcacacgcagcacacacaccacacagagcacctggagcacccacagcacacacaccacgcagagtacacgcggcacacacaccacacacagcgcatgcacaacacagagcacacacagcacatgcaccacacgtagcgcgcacactgcatgcagcacacacaccacacacagcgcgtgcaccacacagagcacctgcggcacacacagcacacaccgcacgcaccacacagagcacatgtggcacacacagtgcacgcaccacacagcacccgcggcgcacacagcacacgtggcatatggcctccatgaccctgtgtcttgagggcaggtcctactttttgctttgttgtgttggagcggaatttctcccctggcttctattggagtcctagattatttaaatcacttcctctgttaattgtgcctggaattaacctgttagatttacttcctagcagttagttgctcagtatgggtttctacactattaaagcaacctagcggtagtacacaaggttttgttaggatagctgtgagattttttttctctaacaatcatcattatttctgtgtctgctccgtttttcttcagtgttttatatgatattaataggggatgtctaattttgtatctttaaaaaaactttatcaaatctgaagcatttttcgtgttatagcttctctataatttttcatggatattgaatatttggtgttgatattcttcactcagttttgaacattgagttttcttctaatgttttgtgcttatgaaaaccatttctgtgtaacgtgtttaagtagcttatttatctgaaagaactctaataatgaaaagaaataaaaagtttttcagaagcatgatcatattcttccagaagagtcaggaaccatgtgtgccaggaaagggaaacgggactgagcgtctcgtagcgaaacgcctgctgcagacttgacgcggctcccctccaggacgggctggcggcacacagactgtgcacttacctcactgccggcctcataatagtaatcagtgtaaatggtgtttctctttcgttttgttatttcgtggcgtacgtgttaaagtgtgtgaaactacaaggccagctagtcctttcatcattccctttggtgcaggttttggagcagcaccacagggcacacccctcgccactctttatggggaatttttgcccaggcaggcagaggagtcatcttggtcacaagtctcccttttccccctccccagcatcttcgatcctgtccccacccctccagatgcatccaggggttgcaagcctgccccccaaccagtccccgtgaggaacagtggccgggattgtcccagggccccttccagcagggggacctcctgacttgagagtccccaaagccttcccagggcagctagaatctgcctggagagaagggatcttgtccccaagggttagaggcagtaaactaatagcaaggacagctgcctttagcaattgtgtgtgtcgcatggccggtccctgcatttttcttcagttccaaagctgcactggcatttttatggtcatctctggagtccctttgattcaagaaattatacctctaggatgccaactaaacgaacaacaaacagaaactccacctgtttgctagcataacaggcgtgaaggcggcagtgtcgccggcgtccttccgcggaagcccagtgtgtgcagacagcacggggtggcgctgctctcaggtgctctggctgcttgggttcctggcatgctgatttgtgacttaagattaaaatcacattgccagggattaccacgcaaccacgaccttggctgctcctccagaaaccgtggtcgcgctcactgcagattggagaacaggtgcatctcgtagctcttctttggaaacaaaagaagccaccagctgaggaagatgctcaccggtcaccgtccctttatttatgcccagcgatgacctctctaacaaggtgcagagcttagctgattggtgaacagtgattggtttccgctttgttcacagtggctaagttctgcacctgaagagaaggtgagatggggacagttaagttggagccgctggggcagaggccgttgctgacgggccggccgctgctgcacagtcagcttgggtgcggagcgcgatcctggaggatgagagaccacttgaccccaaggatgcactgtctcctgctgggaatgctagccatgtactgagtccttaagtctgtccacagaaacatccactaatcggacatctgtctgaaaggtcaaatgtattgaaagttgcaaaaattcttcttacaaaaaactaaaaccaaatgcatcacctaagtcgtgtgaaatcatgtggtagctcatggctgtgagcggggcggggcggggctttcggaggagctcctgttgttctgggcgcggtgaactctctcttgtatttgcagtccaggccttcgcgtctcctgcgccagcagacggtgcccacggagctcccagctgaggcgctgcttctccgggctgtcgattggacccgccctccggtgcctactgagctgatatcagttctcattttacacactggctcagttcagcaggaacaggagtcgagcccttgagcaaaaagccttcgtgtctgtaagtgcccgaggctcaggagagctggggctcccactcgcggcagacaggcccgcgtccaccctgcgtccaccccggcccggcggcagcacggtgccagtcatctgcatgtgctcctgcggcgtgggggtttgtagacttggaaaaccctgttggcagaaagttaagagctcccaggcctgaaggcaggacacagtgccagcagggggccgtttgcccccatgtgtaagggaggcagggcccagctctcccacggcgaggtgagctgagactttctgagaatagttagagtgggtgcgtgtctgaaatgggtactcctagcagctattgtgtacgcaaagcctgagtacagcctgctggtgtcatggccacgtgtgagcaggccagcgtcacacggctcgctgtgacccgtcccggagactgaaatgggcctgggtcttctccttgtcctgtgattaaagtcctctcttgaaagtggagagcaaaggcacacagaggtgcgcgctcacaagaattcctcccggtgactgggtaatcaatgttactgctgtttcctttgcaggaaagaccacagcaagattctttcattcgtctcctcctagcctgggggaccaggctcgaactgaccctggacatcaaaggagggattatgtggctgctaaagccatcggcccacagccctgttcacgtcttggtgcttctctttcccagaggctggtcccagccaggcacacacaaaaggcagattctcgtaaacgcagcctccctccctggaggctgcctcctgccctggatctggagtggagctgctctgagattttgagttcttctgcagagatgattaaatatatccaagagacattggaaaacctgctgaacattttacattggtctgctcagcacatggctggatgcggatatttctataattccagaaagtcacacagctcctctgtatgagaccagtgggcgccatttaaaagaacaggatgagaatctaagatatattattaataaatgtaatggattttttttttgtaaaaaaaaaaaaaaaaaaaaaaaaaaaaaaaaaaaaaaaaaaaaaaaaaaaaaaaaaaaaaaaaaaaaaagaaaaaaagaaaaaaaaaaaaaaaaggggggggggcccgaaatagaccccccgcggggggccgccaagtagacacgagccccagagtgagcacgaggggggccccaatgggggggcgcatatatcaacagggaagagagggggcggcctgatacaaccgcgctgccgacggagggaaaaacaagacaccggacggcaacagtgctgggacagaggccccccaacttagggggagggaggacatagaggggcgcacccacccccggggaaagaacgcaccccagcggaagaaacaaaccacgccacgaaca

SEQ ID NO: 368254 - DNA, 1091 bp, Homo sapiens
gctttcttcgtgtgaggctgcagcgcaccagctgggccacgccgggaggtgccctcctttgctttcggaggggtgcaggcaatggggcttggatgttgccatttgctggtctcttgtcacaggccctgcctctgcaaggtcagtcatgggacatgtccgtggcattttctgatgtaggaggtgagctggcctgttctgcatcatgctaatggaagaaatggtggcggaacctcagttgcgtgggtggtcttctgggagcacagacttcttccagaccagctggtcttgcttctggagcatctcttggagcagaagactctgagcccccgaactctgcaaagcctccagaggacataccacctccaggatcaggatgcagaggttcgccatcggtggtgtgaactcattgttaagcacaagttcacgaaagcctacaaaagtgtggagaggttccttcaggaggatcaggccatgggtgtgtacctctacggggagctgatggtgagtgaggacgccagacagcagcagctcgcccgtaggtgcttcgagcggaccaaggagcagatggataggtcctcagcccaggtggtggccgaaatgttattttaacgaggaaagaccacagcaagattctttcattcgtctcctcctagcctgggggaccaggctcgaactgaccctggacatcaaaggagggattatgtggctgctaaagccatcggcccacagccctgttcacgtcttggtgcttctctttcccagaggctggtcccagccaggcacacacaaaaggcagattctcgtaaacgcagcctccctccctggaggctgcctcctgccctggatctggagtggagctgctctgagattttgagttcttctgcagagatgattaaatatatccaagagacattggaaaacctgctgaacattttacattggtctgctcagcacatggctggatgcggatatttctataattccagaaagtcacacagctcctctgtatgagaccagtgggcgccatttaaaagaacaggatgagaatctaagatatattattaataaatgtaatggattttttttttgta

SEQ ID NO: 368255 - DNA, 5385 bp, Homo sapiens
tgctgcggtcatctagaggatcccgacgagttgtccgagttatgaatatggaatgaagggataaattcctgatgtctccattaagctcctctgtgtaaaatactccatggcaaagttgctgctatttaaagtagtgagtttgatcttggctttgatctaaatcttttgatcttgaaagaaggatggagtagcaataaagagagggcaagacagattttctttaaagaaatgtgataaagttaaagggatggtcaagacccagcaagtaactcggacaacccgactctccgccccggcccgccctcaccggcaggcgggttccagcaactgctgatgcggatgagaaggcctttggcgggtggaggaaaatcttggggtatcgcacatttttataaaccgctgcagagggagcgtcgcgccggggcggagtgcgggcttgcgcggcaagtgcgcgccgaggtcacgaaatggattggagtgaaccggagaccccgaaaacggaagcgcagggagaaggaagaggtgtttgaaaagcttcttccagaccagctggtcttgcttctggagcatctcttggagcagaagactctgagcccccgaactctgcaaagcctccagaggacataccacctccaggatcaggatgcagaggttcgccatcggtggtgtgaactcattgttaagcacaagttcacgaaagcctacaaaagtgtggagaggttccttcaggaggatcaggccatgggtgtgtacctctacggggagctgatggtgagtgaggacgccagacagcagcagctcgcccgtaggtgcttcgagcggaccaaggagcagatggataggtcctcagcccaggtggtggccgaaatgttattttaacgaggtgattctctccctttcctttctgtcatttagttctaaccagatactccttttaggagccaactaaatcagtaagccgaatagttagccaagactacccgcagcatcaatagtcggctccctggcccagggcctggagagtaactggccaagtgggtgctgggctggtatgggagccccgggtccctggagcaccttgcctggctgtggcagtcaccgggaagcagaggctgtccacctggaggcacagcggcactccttggcactattttggccacttcaggttttataatctgttgaaacaaaaattgtgggggaacatcttgagtaggtttagagatggaatgggaagcctggcagaagcgctggtccagtcttcagggtcacggctgatacaggagtttaagcggccgtgtgactccaaagcctagcttctgcaagcagatgttttcttctagccatgtgtgaattggaggttccttgggctgtccacgcctggtcatcagctggcaggaggctctccaggcacacgcagcacacacagcacatgcaccacacgtagcacacacactgcatgcagcacacacacaccagaggacgcaccacacagagcacgcacagcacacaccacacagcgcacgcaccacacagagcacacgcggcacacacagcacacacagcgcacgcaccacgcagagcacacacggcacatgcagcatacacaccaaacagcgcacgcaccacacagagcacacgcggcacacgcagcacacacaccacacagagcacctggagcacccacagcacacacaccacgcagagtacacgcggcacacacaccacacacagcgcatgcacaacacagagcacacacagcacatgcaccacacgtagcgcgcacactgcatgcagcacacacaccacacacagcgcgtgcaccacacagagcacctgcggcacacacagcacacaccgcacgcaccacacagagcacatgtggcacacacagtgcacgcaccacacagcacccgcggcgcacacagcacacgtggcatatggcctccatgaccctgtgtcttgagggcaggtcctactttttgctttgttgtgttggagcggaatttctcccctggcttctattggagtcctagattatttaaatcacttcctctgttaattgtgcctggaattaacctgttagatttacttcctagcagttagttgctcagtatgggtttctacactattaaagcaacctagcggtagtacacaaggttttgttaggatagctgtgagattttttttctctaacaatcatcattatttctgtgtctgctccgtttttcttcagtgttttatatgatattaataggggatgtctaattttgtatctttaaaaaaactttatcaaatctgaagcatttttcgtgttatagcttctctataatttttcatggatattgaatatttggtgttgatattcttcactcagttttgaacattgagttttcttctaatgttttgtgcttatgaaaaccatttctgtgtaacgtgtttaagtagcttatttatctgaaagaactctaataatgaaaagaaataaaaagtttttcagaagcatgatcatattcttccagaagagtcaggaaccatgtgtgccaggaaagggaaacgggactgagcgtctcgtagcgaaacgcctgctgcagacttgacgcggctcccctccaggacgggctggcggcacacagactgtgcacttacctcactgccggcctcataatagtaatcagtgtaaatggtgtttctctttcgttttgttatttcgtggcgtacgtgttaaagtgtgtgaaactacaaggccagctagtcctttcatcattccctttggtgcaggttttggagcagcaccacagggcacacccctcgccactctttatggggaatttttgcccaggcaggcagaggagtcatcttggtcacaagtctcccttttccccctccccagcatcttcgatcctgtccccacccctccagatgcatccaggggttgcaagcctgccccccaaccagtccccgtgaggaacagtggccgggattgtcccagggccccttccagcagggggacctcctgacttgagagtccccaaagccttcccagggcagctagaatctgcctggagagaagggatcttgtccccaagggttagaggcagtaaactaatagcaaggacagctgcctttagcaattgtgtgtgtcgcatggccggtccctgcatttttcttcagttccaaagctgcactggcatttttatggtcatctctggagtccctttgattcaagaaattatacctctaggatgccaactaaacgaacaacaaacagaaactccacctgtttgctagcataacaggcgtgaaggcggcagtgtcgccggcgtccttccgcggaagcccagtgtgtgcagacagcacggggtggcgctgctctcaggtgctctggctgcttgggttcctggcatgctgatttgtgacttaagattaaaatcacattgccagggattaccacgcaaccacgaccttggctgctcctccagaaaccgtggtcgcgctcactgcagattggagaacaggtgcatctcgtagctcttctttggaaacaaaagaagccaccagctgaggaagatgctcaccggtcaccgtccctttatttatgcccagcgatgacctctctaacaaggtgcagagcttagctgattggtgaacagtgattggtttccgctttgttcacagtggctaagttctgcacctgaagagaaggtgagatggggacagttaagttggagccgctggggcagaggccgttgctgacgggccggccgctgctgcacagtcagcttgggtgcggagcgcgatcctggaggatgagagaccacttgaccccaaggatgcactgtctcctgctgggaatgctagccatgtactgagtccttaagtctgtccacagaaacatccactaatcggacatctgtctgaaaggtcaaatgtattgaaagttgcaaaaattcttcttacaaaaaactaaaaccaaatgcatcacctaagtcgtgtgaaatcatgtggtagctcatggctgtgagcggggcggggcggggctttcggaggagctcctgttgttctgggcgcggtgaactctctcttgtatttgcagtccaggccttcgcgtctcctgcgccagcagacggtgcccacggagctcccagctgaggcgctgcttctccgggctgtcgattggacccgccctccggtgcctactgagctgatatcagttctcattttacacactggctcagttcagcaggaacaggagtcgagcccttgagcaaaaagccttcgtgtctgtaagtgcccgaggctcaggagagctggggctcccactcgcggcagacaggcccgcgtccaccctgcgtccaccccggcccggcggcagcacggtgccagtcatctgcatgtgctcctgcggcgtgggggtttgtagacttggaaaaccctgttggcagaaagttaagagctcccaggcctgaaggcaggacacagtgccagcagggggccgtttgcccccatgtgtaagggaggcagggcccagctctcccacggcgaggtgagctgagactttctgagaatagttagagtgggtgcgtgtctgaaatgggtactcctagcagctattgtgtacgcaaagcctgagtacagcctgctggtgtcatggccacgtgtgagcaggccagcgtcacacggctcgctgtgacccgtcccggagactgaaatgggcctgggtcttctccttgtcctgtgattaaagtcctctcttgaaagtggagagcaaaggcacacagaggtgcgcgctcacaagaattcctcccggtgactgggtaatcaatgttactgctgtttcctttgcaggaaagaccacagcaagattctttcattcgtctcctcctagcctgggggaccaggctcgaactgaccctggacatcaaaggagggattatgtggctgctaaagccatcggcccacagccctgttcacgtcttggtgcttctctttcccagaggctggtcccagccaggcacacacaaaaggcagattctcgtaaacgcagcctccctccctggaggctgcctcctgccctggatctggagtggagctgctctgagattttgagttcttctgcagagatgattaaatatatccaagagacattggaaaacctgctgaacattttacattggtctgctcagcacatggctggatgcggatatttctataattccagaaagtcacacagctcctctgtatgagaccagtgggcgccatttaaaagaacaggatgagaatctaagatatattattaataaatgtaatggattttttttttgtaatacgtgtttgcttctaaatttcatatttttttttttttttttttttttttttttttttttt

SEQ ID NO: 368256 - DNA, 941 bp, Homo sapiens
gcgcggggagcggccgtgacgaaggtcgcggcccctgcggtcacgaaatggattggagtgaaccggagaccccgaaaacggaagcgcagggagaaggaagaggtgtttgaaaagcttcttccagaccagctggtcttgcttctggagcatctcttggagcagaagactctgagcccccgaactctgcaaagcctccagaggacataccacctccaggatcaggatgcagaggttcgccatcggtggtgtgaactcattgttaagcacaagttcacgaaagcctacaaaagtgtggagaggttccttcaggaggatcaggccatgggtgtgtacctctacggggagctgatggtgagtgaggacgccagacagcagcagctcgcccgtaggtgcttcgagcggaccaaggagcagatggataggtcctcagcccaggtggtggccgaaatgttattttaacgaggaaagaccacagcaagattctttcattcgtctcctcctagcctgggggaccaggctcgaactgaccctggacatcaaaggagggattatgtggctgctaaagccatcggcccacagccctgttcacgtcttggtgcttctctttcccagaggctggtcccagccaggcacacacaaaaggcagattctcgtaaacgcagcctccctccctggaggctgcctcctgccctggatctggagtggagctgctctgagattttgagttcttctgcagagatgattaaatatatccaagagacattggaaaacctgctgaacattttacattggtctgctcagcacatggctggatgcggatatttctataattccagaaagtcacacagctcctctgtatgagaccagtgggcgccatttaaaagaacaggatgagaatctaagatatattattaataaatgtaatggattttttttttgta

SEQ ID NO: 368257 - DNA, 910 bp, Homo sapiens
cgcggccgcgcctgaggtgatgcggaccccgggcgggcgcagggcgcgggctccggcgccgccgctgcgtcctccccggccgcgggcgagccgctgcagagggagcgtcgcgccggggcggagtgcgggcttgcgcggcaagtgcgcgccgaggtcacgaaatggattggagtgaaccggagaccccgaaaacggaagcgcagggagaaggaagaggtgtttgaaaagcttcttccagaccagctggtcttgcttctggagcatctcttggagcagaagactctgagcccccgaactctgcaaagcctccagaggacataccacctccaggatcaggatgcagaggttcgccatcggtggtgtgaactcattgttaagcacaagttcacgaaagcctacaaaagtgtggagaggttccttcaggaggatcaggaaagaccacagcaagattctttcattcgtctcctcctagcctgggggaccaggctcgaactgaccctggacatcaaaggagggattatgtggctgctaaagccatcggcccacagccctgttcacgtcttggtgcttctctttcccagaggctggtcccagccaggcacacacaaaaggcagattctcgtaaacgcagcctccctccctggaggctgcctcctgccctggatctggagtggagctgctctgagattttgagttcttctgcagagatgattaaatatatccaagagacattggaaaacctgctgaacattttacattggtctgctcagcacatggctggatgcggatatttctataattccagaaagtcacacagctcctctgtatgagaccagtgggcgccatttaaaagaacaggatgagaatctaagatatattattaataaatgtaatggattttttttttgta

SEQ ID NO: 368258 - DNA, 1318 bp, Homo sapiens
aaaatgcaaagctgattttcatgtttatatatattcataccttgatatattgcaattttagagtttctgcagtctgtctaacttggctgtttgttcataggccagatcaaactaccctcattccccaaaacttggattgtgaagggattagtgccccagaactctctgtgttactggcagggcaaaatgggtaggaatagtctggcttagggaaaaagacatattttctctctaacacaactggcagatactgaagtgggcaggtggcaagaaaaggcaagtactgagctgattcagacttgcagaaagcttcctctcctccttcttagcaaaatgaaaggctctgggaaaaggcacctgcctttccctgccttgaggatcctggcatccttgagtctttattgaagattaatttaatgacttggtcaacaatagcattacctaatcacagagcatcagattatcataagacaaatttaaatgatgccgaagtatcttccagcagaggattagtgatgtaccagcatgcatgtgtagcttgtgtgggtgtgtgtgcatacaagcatgcacatgtgcgcacacacacagagagtctaattggcctttgtcctctgagcagggggcaggtttgggctggggcctgctgtgtgaccacagtctcccatcttggattgaagctacatcgctgtgtgcatctaactcttgattcacggtctgaccgacgccttggtttctggagaactgccctcgtttatggaagagtcactgtcatcaggagccatcccagggagaggctcagtgggaagtgtaaaggtggagcaagtaaaccggctccagaagagaaggcgaagaaggactatttctgtttagatttgcttaaccgcattttcactttcttgggaacccctgatggagttcaaggtcatagaagagaagaaatcagacactgctacaggactcttgctcttggttcagattattcaatgggaggggagaagagagtagtcgcaagtgattgttgtagattttgtctcagctttttgtttttctttgtatcaaacctgttttgagatcatacactgttacagagaaagagaggaggcatattataaacgtgtggacttcagtgttattccttctcttcaaaatgatgttccaggtgtctagagggtgaggtatgtcatttacatgaaggttaagaataaaacagaaagtgcctctatggtattcttagtggggtttttttcctctgaaaaactgttgccagcatatttgggaatacatccttatattattatttttgagatggggtctctgt

SEQ ID NO: 368259 - DNA, 772 bp, Homo sapiens
tgctgcggtcatctagaggatcccgacgagttgtccgagttatgaatatggaatgaagggataaattcctgatgtctccattaagctcctctgtgtaaaatactccatggcaaagttgctgctatttaaagtagtgagtttgatcttggctttgatctaaatcttttgatcttgaaagaaggatggagtagcaataaagagagggcaagacagattttctttaaagaaatgtgataaagttaaagggatggtcaagacccagcaagtaactcggacaacccgactctccgccccggcccgccctcaccggcaggcgggttccagcaactgctgatgcggatgagaaggcctttggcgggtggaggaaaatcttggggtatcgcacatttttataaaccgctgcagagggagcgtcgcgccggggcggagtgcgggcttgcgcggcaagtgcgcgccgaggtcacgaaatggattggagtgaaccggagaccccgaaaacggaagcgcagggagaaggaagaggtgtttgaaaagcttcttccagaccagctggtcttgcttctggagcatctcttggagcagaagactctgagcccccgaactctgcaaagcctccagaggacataccacctccaggatcaggatgcagaggttcgccatcggtggtgtgaactcattgttaagcacaagttcacgaaagcctacaaaagtgtggagaggttccttcaggaggatcagtagaaggtccagaatgccggtccgagcgtgacta

SEQ ID NO: 368260 - DNA, 2178 bp, Homo sapiens
tgctttccttttttgccaggagactgaaaggaaccataatttgtgacatcagttgttttctttgataagcagctatttatgattctggaagattaaggcagataggaaaccccatctgagattttaataaatccctcaaacaataaaccacatcatggacatacagctggaccctgccagagatgacctgcctctcatggccaacaccagccacatacttgtgaagcactatgtactggatttggatgtggattttgaaagtcaagtcattgaggggaccatagtgcttttcctcgaggatggaaacagattcaagaaacagaatagctctattgaggaagcctgccaatcagaatcaaacaaagcctgcaaatttgggatgcctgaaccctgccatattcccgtgacaaatgcaaggaccttctcatctgaaatggaatataatgattttgcaatctgtagtaaaggtgaaaaagatacttctgataaagatggtaaccatgacaaccaggaacatgcttctgggatttctagctcaaagtactgctgtgacacagggaatcatgggagtgaggattttttgctagtgttggactgctgtgatttatctgtgttaaaagtcgaggaggtggatgttgctgctgtgccaggtctggaaaaatttacaaggtctcctgagctcacggttgtttctgaggagttcaggaatcagattgtacgtgaacttgtgactttgcctgcaaatcgttggagggagcagttagactattacgctcgctgcagccaggctcctggctgtggggaactcctctttgacactgacacttggagcttgcagataaggaagacaggggctcagacagctactgactttcctcatgctatcaggatatggtacaaaactaaacctgaagggcgatcggttacatggacctcagaccagagtggcaggccatgtgtttatactgtgggatctcccataaacaacagggccctttttccatgccaggagccacccgttgccatgtcaacatggcaggctacagttcgagcagctgcatcttttgttgttttaatgagtggggaaaattctgccaaaccaacgcagctttgggaagagtgctcaagctggtattactatgtaactatgccaatgccagcctccaccttcacaattgcagtgggatgctggacagaaatgaagatggagacatggtcatcaaatgatttggcaacagagagacccttctcaccttctgaggccaacttcaggcatgttggtgtttgcagtcacatggaatacccctgccgcttccagaatgcttctgccaccacccaggagatcattcctcatcgggtctttgcccctgtgtgcctcacgggtgcctgccaagagacccttctgcggctgatccctccttgcctctcagcagcacattctgttctgggagcacacccgttctctcggctggatgttctcatcgtccctgccaactttccaagtctggggatggccagacccagtaaagacaaaactggccacacaagtgactcgggagcatctgttatcaagcatggacttaatccggagaagatcttcatgcaggtgcattatttaaagggctacttccttcttcggtttcttgccaaaagacttggagatgaaacctatttttcatttttaagaaaatttgtgcacacatttcatggacagctgattctttcccaggatttccttcaaatgctactggagaacattccagaagaaaaaaggcttgagctgtctgttgaaaacatctaccaagactggcttgagagttccggaataccaaagccgctgcagagggagcgtcgcgccggggcggagtgcgggcttgcgcggcaagtgcgcgccgaggtcacgaaatggattggagtgaaccggagaccccgaaaacggaagcgcagggagaaggaagaggtgtttgaaaagactttaaattggagtcatctaagaaatagagagagaagaagaaagaagtggattacttttaaaacactaggaggaattttatttactgtaaagcagatgagaaatttgtttgcccaagtttagaatttcagtatgttactttgcagaagtttggactgcctgtcttttgattttgtattaaaacttgatttgtcattgtaatatca

SEQ ID NO: 368261 - DNA, 1772 bp, Homo sapiens
gttgattaatatttattaaacttccatatgccagttgccaaggatgtaaaaatatgacagggtgtctggcctcaaaggagcatagtctagtgggaagacttgacatgtaaacatataataatattaaaagcattgcatagtaattggggaacacaaaggaggagaaactgtttcaagaaaggatagaaataaatggtcaaggcagacatgaagtagtgttctgattagttttaagagaaatgtaggtgttttacatgttggtggatggggaaagtgcagaggtatgtgtgtgaaatgtgcatggtgtctctggagagctttaactagttccatgtgacctgaggtataggttaggctgtgagactgaaaaaggggagagaagggatactgtaaaggctttatatattatgctgagttatctaaggtgcgaaatgatcagacttacattctagccaaaatgagtcagatgagtgttgatgatgctttggtggaaaggccgcaacagaaactggtaagaatacacacatgcaagcgattcttaactacattgtaatcagtaaatgaagataacgacaatattctcattagggtacttactggctgaaacaaaactaactttgtcaggccggtgcagtggctcacacccgtaatcccagcactttggggaggctgaggcaggaggatggcttgagcccaggagtttgagaccagcctgggcaacatagtgaaaccccatcgctaccaaaaaaaaaaaaaaaaaaaaccctggctttgtatgtgtcttggtaaagtagcaactggcttttatgatccccctacccccacaccctgtgtctaaaagggcacatgactgctacagcctcaaaacaaaagtacttgatctcagtccaatgttgaaaagagctcattctgcctggcacggtggctcacgcctgtaatgccagcactttgggaggccgaggtgggtggatcatgaggtcaggagattgagaccatcctggctaacacggtgaaaccccatctctactaaaaaaatacaaaaaattagccaggcgtcgtggtgggcgcctgtattcccagctactcgggaggctgaggcaggagaatggcgtgaacccgcgaggcggagcttgcagtgagccgagatcgcaccgctgcactccagcctgggcgacagagcgagactccgtctcaaaaaaaaaaaaaaaagagaaaagagctcattcttacttttgctcaccaagaaaaacctgggagacgagaagaccttgcaggcaattccttaactgtttaccctcatcacacttccttgtcagagcccagcttacctagcaagggtgcctgggaatcccctgtacttcaatccccttcctgttctgtctctgtcctgacttcatccagttgatagtggacaaaccctattgtagattgctgcctgaaccccagtcagcaagtcctgttttggcttaaatctaaggtcttgttggatgtgatggctcacgcccgtaatcccaacacagagactaagacagatcacttgaggtcaggagttcgagaccagcctgggcaacatgaaaccccatctctactaaaaatacaaaaatacaaaaaaatccccagcacatggggcacatgcctatattcccagctacttgggatgctgaggcaggaggatagcttgaacccgggaggcagaggttgcagtcagccaagattgtgccactgaactccactccagcctgggcgacagagtgaggactccgtctcaaaaa

SEQ ID NO: 368262 - DNA, 1120 bp, Homo sapiens
cgcgttgtaccaccacggggctagaggggccggggagcgcatcccgcccccgcccccacccacgccgccccctcctccgccgccactgccgctcctcacacactcggaatcactggcctcactacctggggtcggggcggtgcgggtgtgcgcgcgccgacctctggcgcgttctaacccgcgcgcctgccttcccgggcttcgtcggcgcacaccgatttccgcatccggctccggacgcttccggtcttagctggacccgtctgggaggtaggtttgtgagcgtgagagatcgatctgtaccgcggggatccgaagtatgctgtgacacctcccatatcccccccctcaaccggaaggctgactgcccggagaatgccaccatgtctctgaagcatctcaccaagaagctgctaaaccgggatatccagagagcgagactctgtctcaaaaaaaaaaaaaaattaaaattgtgtggtccctttccatgtcacagagtctgcttttggctcagagtctgtatctagcctgtgtcaggatattgcctgttcttcccaccttttcatccataagccacttctttcccaattacctcttccgcccttccaatggccccttatgtctactttacggcgtcaactctgattggggggaccctcctcccaagaaaggctttaggaaggaattgccaagcaccgaaatttgtgtcaagaagcggaggctcttaagactcagagggtcgagctctataagccctcaattcccttcattttacccattggagactccaccctaagagcgcggaaatggccctttactaaggacccaagtgcttggtggactggcgctcactaagaatccaggtggcgtggttaacaccaattggtcctcccctcaatttcgtgtgtgtgttctccattccccctttggcttggagattggcctgttgtttccctccataagtctaccggggaccggcttacccttttctcccggcgggggccatacacgacacttttccccggtgtcgacccctgtggcgggtcgcgaaggccccccctttccacgcccggggggtcctcgcgcggccgagaagggtggcccccgtgaggtcccacag

SEQ ID NO: 368263 - DNA, 5035 bp, Homo sapiens
cgcgttgtaccaccacggggctagaggggccggggagcgcatcccgcccccgcccccacccacgccgccccctcctccgccgccactgccgctcctcacacactcggaatcactggcctcactacctggggtcggggcggtgcgggtgtgcgcgcgccgacctctggcgcgttctaacccgcgcgcctgccttcccgggcttcgtcggcgcacaccgatttccgcatccggctccggacgcttccggtcttagctggacccgtctgggagggtgtactacagacctccacatgttggacagtaggattcagcagagaatgagtcccacatcctcttttcatccataagccactcttcccaactactcttccgccttccattgtccctatgtctactttactgctcaatctggattttggggaacctcctcccaaaaaggcattagaaggaaatgccaagcaccgaaattttgtcaagaagcggaggctcttagaacggagaggctttctgagtaaaaagaaccaaccccctagcaaggcgcctaagttgcactctgaaccttcaaagaaaggggaaactcctacggtcgatggcacttggaagaccccttccttcccaaaaaagaagacagctgcttccagcaatgggtcaggacagcccctggacaagaaagctgcagtgtcttggttgacccctgccccttcaaaaaaggctgattctgttgctgctaaagtagatttgctgggggagttccagagtgcccttccaaagatcaatagccacccaacccgctctcagaagaagagctcccagaagaaatcctctaaaaagaaccatcctcagaagaatgccccacagaactccacccaagctcattcagagaataaatgctccggagcatcccagaagttgccacggaagatggtggcaattgactgtgagatggtgggcacaggaccaaaggggcatgttagttccttggctcgatgtagcattgtcaactacaacggagatgtgctttatgacgagtacattcttcccccctgccacattgtggactaccgaaccaggtggagtggtatccggaagcagcacatggtgaatgccacacccttcaagattgctcgaggccagatcttgaagatactcacagggaagatagtggtggggcatgccatccacaacgacttcaaagcccttcagtactttcaccccaagtccctcacccgtgacacctcccatatcccccccctcaaccggaaggctgactgcccggagaatgccaccatgtctctgaagcatctcaccaagaagctgctaaaccgggatatccaggttgggaagagcggacattcctctgtggaagatgcccaggccaccatggagctatataagttggttgaagtcgagtgggaagagcacctagcccggaatccccctacagactagtggcagtggggacgctggtgatatgaggaggcagaggcagcacccaggagaaacagggcagtggaccaatggacagctccaccagctccacatctttggaagctagatttggggagagagaagctctaccccagacttaatacccattgaaatttcacctcaggtgttgtgtcctgtgtctggttaagtgtcccatggaaggggaaagccttcacgtcagaacccaaccctataccttttacttcttaaatggtgctaaccacaggtgtcccagggtgctctgtgccagttaagatttttaactttcaaggggcagggcatactgggaaatgtagtttcccaaactgccttatcacttgggtggacatatgtctccttttatgccttttggtcttgagtaattaacagcatcctcttccacgctcagaagtgttctggttggggccaggcatggtggctcacgcctgtagtcccaacacttagggaggccgaggcgggcggatcacctgagatcaggagttcaagaccagcctggccaacatggcgaattcccgttctctactaaaaatacaaaaaatgtgtggggtgtggtggcaggagcctgtaatcctagctactcaggaggctgaggcaggagaatcgcttgagcccaggaggcggagattgcagtgagccgagatcgtgtcactgcactccagcctgggtgacaagagtgagactccgtctccaaaaaaaaaaaaaaagaatttattaacctggttggttaataaattgtgtggtccctgccgggcgtggtggctcacgcctgtaatcccagcactttgggaggccgaggcgggcagatcacgaggtcaggagatcgagaccatcctggctaacacggtgaaaccccgtctctactaaaaatacaaaaaattagccaggcgtggtggcgggcacctgtagttccagctacttgggaggctgaggcaggagaatggcgtgaacccaggaggcggagcttgcagtgagccgagattgtgccactgcactccagcctgggccacggccacagagcgagactctgtctcaaaaaaaaaaaaaaattaaaattgtgtggtccctttccatgtcacagagtctgcttttggctcagagtctgtatctagcctgtgtcaggatattgcctgttcttcccaccttgacttccagagcagccatcgctggtgagctttagttctccttagggttccaaggcattagaagtaagagtgtagcttggaaaccaacttctgtgatttaggaaagctgtctctttcctaaggtaatagggggtttatttcatttaggccccagttggtaggttttaaaataatttataaagtgttttaataatttggttgtcttttttaccttgctaaaccaagcctctaaaaactcaaattattcccttgataaatttttataatggaaaagcaaataagtacagtttcttctttatgttaaatagctctatcacaaagtattgtggagctgtagttttcttaggggatttccaggttcactggatgacactaactggggcccttcctggaagtcatagaactgaccaagcctttgtgcgtaacccacgtgacacatatggttccttgtcctcatccctaccacacatcagagctgagcatggcagctcacgcctgtaatcccagctacccgggaggctaaggcatgatgattccttgagcccaggaatttaaatccagcccaggcaaaatagaccccatctcaattttaaaaaaaaggaatgagcacacctaaaatgacaccccaagccatgcaactccccctgacacacacagggtatgtgaccaggagagtgagatagagagagtgggcatgaaggaggggcagagcaggggagaaagggtgcttggtgatgacagcctggtcctgctgccagcttttggtggtacacaccccatcttgggaaagagtcaccagtctgaccttgtgtccaggatcattatctgcactttcttgagagaatgcagactccatgtctacacaaggacttttgcattcttgagtggctggtctggttccaggggccagagtcacggtcacagctgcctatagaagtgaatttcgtgcagccagaccagacccagacatggtcttgttgaggcctgcactgtggggtctgttgcacaggcagccattgtgctctgagcaaattggttcctgtggggcccaacatatttaatgtccatgacttcacaaaggggtgccaggtatccttgcacagcaagaactaagaatagtgcaaggaggccgcaacagaaactggtaagaatacacacatgcaagcgattcttaactacattgtaatcagtaaatgaagataacgacaatattctcattagggtacttactggctgaaacaaaactaactttgtcaggccggtgcagtggctcacacccgtaatcccagcactttggggaggctgaggcaggaggatggcttgagcccaggagtttgagaccagcctgggcaacatagtgaaaccccatcgctaccaaaaaaaaaaaaaaaaaaaaccctggctttgtatgtgtcttggtaaagtagcaactggcttttatgatccccctacccccacaccctgtgtctaaaagggcacatgactgctacagcctcaaaacaaaagtacttgatctcagtccaatgttgaaaagagctcattctgcctggcacggtggctcacgcctgtaatgccagcactttgggaggccgaggtgggtggatcatgaggtcaggagattgagaccatcctggctaacacggtgaaaccccatctctactaaaaaaatacaaaaaattagccaggcgtcgtggtgggcgcctgtattcccagctactcgggaggctgaggcaggagaatggcgtgaacccgcgaggcggagcttgcagtgagccgagatcgcaccgctgcactccagcctgggcgacagagcgagactccgtctcaaaaaaaaaaaaaaaagagaaaagagctcattcttacttttgctcaccaagaaaaacctgggagacgagaagaccttgcaggcaattccttaactgtttaccctcatcacacttccttgtcagagcccagcttacctagcaagggtgcctgggaatcccctgtacttcaatccccttcctgttctgtctctgtcctgacttcatccagttgatagtggacaaaccctattgtagattgctgcctgaaccccagtcagcaagtcctgttttggcttaaatctaaggtcttgttggatgtgatggctcacgcccgtaatcccaacacagagactaagacagatcacttgaggtcaggagttcgagaccagcctgggcaacatgaaaccccatctctactaaaaatacaaaaatacaaaaaaatccccagcacatggggcacatgcctatattcccagctacttgggatgctgaggcaggaggatagcttgaacccgggaggcagaggttgcagtcagccaagattgtgccactgaactccactccagcctgggcgacagagtgaggactccgtctcaaaaa

SEQ ID NO: 368264 - DNA, 5074 bp, Homo sapiens
cgcgttgtaccaccacggggctagaggggccggggagcgcatcccgcccccgcccccacccacgccgccccctcctccgccgccactgccgctcctcacacactcggaatcactggcctcactacctggggtcggggcggtgcgggtgtgcgcgcgccgacctctggcgcgttctaacccgcgcgcctgccttcccgggcttcgtcggcgcacaccgatttccgcatccggctccggacgcttccggtcttagctggacccgtctgggaggcctaggagctcaattaccaggatcactttcttccccagggtgtactacagacctccacatgttggacagtaggattcagcagagaatgagtcccacatcctcttttcatccataagccactcttcccaactactcttccgccttccattgtccctatgtctactttactgctcaatctggattttggggaacctcctcccaaaaaggcattagaaggaaatgccaagcaccgaaattttgtcaagaagcggaggctcttagaacggagaggctttctgagtaaaaagaaccaaccccctagcaaggcgcctaagttgcactctgaaccttcaaagaaaggggaaactcctacggtcgatggcacttggaagaccccttccttcccaaaaaagaagacagctgcttccagcaatgggtcaggacagcccctggacaagaaagctgcagtgtcttggttgacccctgccccttcaaaaaaggctgattctgttgctgctaaagtagatttgctgggggagttccagagtgcccttccaaagatcaatagccacccaacccgctctcagaagaagagctcccagaagaaatcctctaaaaagaaccatcctcagaagaatgccccacagaactccacccaagctcattcagagaataaatgctccggagcatcccagaagttgccacggaagatggtggcaattgactgtgagatggtgggcacaggaccaaaggggcatgttagttccttggctcgatgtagcattgtcaactacaacggagatgtgctttatgacgagtacattcttcccccctgccacattgtggactaccgaaccaggtggagtggtatccggaagcagcacatggtgaatgccacacccttcaagattgctcgaggccagatcttgaagatactcacagggaagatagtggtggggcatgccatccacaacgacttcaaagcccttcagtactttcaccccaagtccctcacccgtgacacctcccatatcccccccctcaaccggaaggctgactgcccggagaatgccaccatgtctctgaagcatctcaccaagaagctgctaaaccgggatatccaggttgggaagagcggacattcctctgtggaagatgcccaggccaccatggagctatataagttggttgaagtcgagtgggaagagcacctagcccggaatccccctacagactagtggcagtggggacgctggtgatatgaggaggcagaggcagcacccaggagaaacagggcagtggaccaatggacagctccaccagctccacatctttggaagctagatttggggagagagaagctctaccccagacttaatacccattgaaatttcacctcaggtgttgtgtcctgtgtctggttaagtgtcccatggaaggggaaagccttcacgtcagaacccaaccctataccttttacttcttaaatggtgctaaccacaggtgtcccagggtgctctgtgccagttaagatttttaactttcaaggggcagggcatactgggaaatgtagtttcccaaactgccttatcacttgggtggacatatgtctccttttatgccttttggtcttgagtaattaacagcatcctcttccacgctcagaagtgttctggttggggccaggcatggtggctcacgcctgtagtcccaacacttagggaggccgaggcgggcggatcacctgagatcaggagttcaagaccagcctggccaacatggcgaattcccgttctctactaaaaatacaaaaaatgtgtggggtgtggtggcaggagcctgtaatcctagctactcaggaggctgaggcaggagaatcgcttgagcccaggaggcggagattgcagtgagccgagatcgtgtcactgcactccagcctgggtgacaagagtgagactccgtctccaaaaaaaaaaaaaaagaatttattaacctggttggttaataaattgtgtggtccctgccgggcgtggtggctcacgcctgtaatcccagcactttgggaggccgaggcgggcagatcacgaggtcaggagatcgagaccatcctggctaacacggtgaaaccccgtctctactaaaaatacaaaaaattagccaggcgtggtggcgggcacctgtagttccagctacttgggaggctgaggcaggagaatggcgtgaacccaggaggcggagcttgcagtgagccgagattgtgccactgcactccagcctgggccacggccacagagcgagactctgtctcaaaaaaaaaaaaaaattaaaattgtgtggtccctttccatgtcacagagtctgcttttggctcagagtctgtatctagcctgtgtcaggatattgcctgttcttcccaccttgacttccagagcagccatcgctggtgagctttagttctccttagggttccaaggcattagaagtaagagtgtagcttggaaaccaacttctgtgatttaggaaagctgtctctttcctaaggtaatagggggtttatttcatttaggccccagttggtaggttttaaaataatttataaagtgttttaataatttggttgtcttttttaccttgctaaaccaagcctctaaaaactcaaattattcccttgataaatttttataatggaaaagcaaataagtacagtttcttctttatgttaaatagctctatcacaaagtattgtggagctgtagttttcttaggggatttccaggttcactggatgacactaactggggcccttcctggaagtcatagaactgaccaagcctttgtgcgtaacccacgtgacacatatggttccttgtcctcatccctaccacacatcagagctgagcatggcagctcacgcctgtaatcccagctacccgggaggctaaggcatgatgattccttgagcccaggaatttaaatccagcccaggcaaaatagaccccatctcaattttaaaaaaaaggaatgagcacacctaaaatgacaccccaagccatgcaactccccctgacacacacagggtatgtgaccaggagagtgagatagagagagtgggcatgaaggaggggcagagcaggggagaaagggtgcttggtgatgacagcctggtcctgctgccagcttttggtggtacacaccccatcttgggaaagagtcaccagtctgaccttgtgtccaggatcattatctgcactttcttgagagaatgcagactccatgtctacacaaggacttttgcattcttgagtggctggtctggttccaggggccagagtcacggtcacagctgcctatagaagtgaatttcgtgcagccagaccagacccagacatggtcttgttgaggcctgcactgtggggtctgttgcacaggcagccattgtgctctgagcaaattggttcctgtggggcccaacatatttaatgtccatgacttcacaaaggggtgccaggtatccttgcacagcaagaactaagaatagtgcaaggaggccgcaacagaaactggtaagaatacacacatgcaagcgattcttaactacattgtaatcagtaaatgaagataacgacaatattctcattagggtacttactggctgaaacaaaactaactttgtcaggccggtgcagtggctcacacccgtaatcccagcactttggggaggctgaggcaggaggatggcttgagcccaggagtttgagaccagcctgggcaacatagtgaaaccccatcgctaccaaaaaaaaaaaaaaaaaaaaccctggctttgtatgtgtcttggtaaagtagcaactggcttttatgatccccctacccccacaccctgtgtctaaaagggcacatgactgctacagcctcaaaacaaaagtacttgatctcagtccaatgttgaaaagagctcattctgcctggcacggtggctcacgcctgtaatgccagcactttgggaggccgaggtgggtggatcatgaggtcaggagattgagaccatcctggctaacacggtgaaaccccatctctactaaaaaaatacaaaaaattagccaggcgtcgtggtgggcgcctgtattcccagctactcgggaggctgaggcaggagaatggcgtgaacccgcgaggcggagcttgcagtgagccgagatcgcaccgctgcactccagcctgggcgacagagcgagactccgtctcaaaaaaaaaaaaaaaagagaaaagagctcattcttacttttgctcaccaagaaaaacctgggagacgagaagaccttgcaggcaattccttaactgtttaccctcatcacacttccttgtcagagcccagcttacctagcaagggtgcctgggaatcccctgtacttcaatccccttcctgttctgtctctgtcctgacttcatccagttgatagtggacaaaccctattgtagattgctgcctgaaccccagtcagcaagtcctgttttggcttaaatctaaggtcttgttggatgtgatggctcacgcccgtaatcccaacacagagactaagacagatcacttgaggtcaggagttcgagaccagcctgggcaacatgaaaccccatctctactaaaaatacaaaaatacaaaaaaatccccagcacatggggcacatgcctatattcccagctacttgggatgctgaggcaggaggatagcttgaacccgggaggcagaggttgcagtcagccaagattgtgccactgaactccactccagcctgggcgacagagtgaggactccgtctcaaaaa

SEQ ID NO: 368265 - DNA, 4751 bp, Homo sapiens
cgcgttgtaccaccacggggctagaggggccggggagcgcatcccgcccccgcccccacccacgccgccccctcctccgccgccactgccgctcctcacacactcggaatcactggcctcactacctggggtcggggcggtgcgggtgtgcgcgcgccgacctctggcgcgttctaacccgcgcgcctgccttcccgggcttcgtcggcgcacaccgatttccgcatccggctccggacgcttccggtcttagctggacccgtctgggaggtaggtttgtgagcgtgagagatcgatctgtaccgcggggatccgaagtatgctggtgtactacagacctccacatgttggacagtaggattcagcagagaatgagtcccacatcctcttttcatccataagccactcttcccaactactcttccgccttccattgtccctatgtctactttactgctcaatctggattttggggaacctcctcccaaaaaggcattagaaggaaatgccaagcaccgaaattttgtcaagaagcggaggctcttagaacggagaggctttctgagtaaaaagaaccaaccccctagcaaggcgcctaagttgcactctgaaccttcaaagaaaggggaaactcctacggtcgatggcacttggaagaccccttccttcccaaaaaagaagacagctgcttccagcaatgggtcaggacagcccctggacaagaaagctgcagtgtcttggttgacccctgccccttcaaaaaaggctgattctgttgctgctaaagtagatttgctgggggagttccagagtgcccttccaaagatcaatagccacccaacccgctctcagaagaagagctcccagaagaaatcctctaaaaagaaccatcctcagaagaatgccccacagaactccacccaagctcattcagagaataaatgctccggagcatcccagaagttgccacggaagatggtggcaattgactgtgagatggtgggcacaggaccaaaggggcatgttagttccttggctcgatgtagcattgtcaactacaacggagatgtgctttatgacgagtacattcttcccccctgccacattgtggactaccgaaccaggtggagtggtatccggaagcagcacatggtgaatgccacacccttcaagattgctcgaggccagatcttgaagatactcacagggaagatagtggtggggcatgccatccacaacgacttcaaagcccttcagtactttcaccccaagtccctcacccgtgacacctcccatatcccccccctcaaccggaaggctgactgcccggagaatgccaccatgtctctgaagcatctcaccaagaagctgctaaaccgggatatccaggttgggaagagcggacattcctctgtggaagatgcccaggccaccatggagctatataagttggttgaagtcgagtgggaagagcacctagcccggaatccccctacagactagtggcagtggggacgctggtgatatgaggaggcagaggcagcacccaggagaaacagggcagtggaccaatggacagctccaccagctccacatctttggaagctagatttggggagagagaagctctaccccagacttaatacccattgaaatttcacctcaggtgttgtgtcctgtgtctggttaagtgtcccatggaaggggaaagccttcacgtcagaacccaaccctataccttttacttcttaaatggtgctaaccacaggtgtcccagggtgctctgtgccagttaagatttttaactttcaaggggcagggcatactgggaaatgtagtttcccaaactgccttatcacttgggtggacatatgtctccttttatgccttttggtcttgagtaattaacagcatcctcttccacgctcagaagtgttctggttggggccaggcatggtggctcacgcctgtagtcccaacacttagggaggccgaggcgggcggatcacctgagatcaggagttcaagaccagcctggccaacatggcgaattcccgttctctactaaaaatacaaaaaatgtgtggggtgtggtggcaggagcctgtaatcctagctactcaggaggctgaggcaggagaatcgcttgagcccaggaggcggagattgcagtgagccgagatcgtgccactgcactccagcctgggccacggccacagagcgagactctgtctcaaaaaaaaaaaaaaattaaaattgtgtggtccctttccatgtcacagagtctgcttttggctcagagtctgtatctagcctgtgtcaggatattgcctgttcttcccaccttgacttccagagcagccatcgctggtgagctttagttctccttagggttccaaggcattagaagtaagagtgtagcttggaaaccaacttctgtgatttaggaaagctgtctctttcctaaggtaatagggggtttatttcatttaggccccagttggtaggttttaaaataatttataaagtgttttaataatttggttgtcttttttaccttgctaaaccaagcctctaaaaactcaaattattcccttgataaatttttataatggaaaagcaaataagtacagtttcttctttatgttaaatagctctatcacaaagtattgtggagctgtagttttcttaggggatttccaggttcactggatgacactaactggggcccttcctggaagtcatagaactgaccaagcctttgtgcgtaacccacgtgacacatatggttccttgtcctcatccctaccacacatcagagctgagcatggcagctcacgcctgtaatcccagctacccgggaggctaaggcatgatgattccttgagcccaggaatttaaatccagcccaggcaaaatagaccccatctcaattttaaaaaaaaggaatgagcacacctaaaatgacaccccaagccatgcaactccccctgacacacacagggtatgtgaccaggagagtgagatagagagagtgggcatgaaggaggggcagagcaggggagaaagggtgcttggtgatgacagcctggtcctgctgccagcttttggtggtacacaccccatcttgggaaagagtcaccagtctgaccttgtgtccaggatcattatctgcactttcttgagagaatgcagactccatgtctacacaaggacttttgcattcttgagtggctggtctggttccaggggccagagtcacggtcacagctgcctatagaagtgaatttcgtgcagccagaccagacccagacatggtcttgttgaggcctgcactgtggggtctgttgcacaggcagccattgtgctctgagcaaattggttcctgtggggcccaacatatttaatgtccatgacttcacaaaggggtgccaggtatccttgcacagcaagaactaagaatagtgcaaggaggccgcaacagaaactggtaagaatacacacatgcaagcgattcttaactacattgtaatcagtaaatgaagataacgacaatattctcattagggtacttactggctgaaacaaaactaactttgtcaggccggtgcagtggctcacacccgtaatcccagcactttggggaggctgaggcaggaggatggcttgagcccaggagtttgagaccagcctgggcaacatagtgaaaccccatcgctaccaaaaaaaaaaaaaaaaaaaaccctggctttgtatgtgtcttggtaaagtagcaactggcttttatgatccccctacccccacaccctgtgtctaaaagggcacatgactgctacagcctcaaaacaaaagtacttgatctcagtccaatgttgaaaagagctcattctgcctggcacggtggctcacgcctgtaatgccagcactttgggaggccgaggtgggtggatcatgaggtcaggagattgagaccatcctggctaacacggtgaaaccccatctctactaaaaaaatacaaaaaattagccaggcgtcgtggtgggcgcctgtattcccagctactcgggaggctgaggcaggagaatggcgtgaacccgcgaggcggagcttgcagtgagccgagatcgcaccgctgcactccagcctgggcgacagagcgagactccgtctcaaaaaaaaaaaaaaaagagaaaagagctcattcttacttttgctcaccaagaaaaacctgggagacgagaagaccttgcaggcaattccttaactgtttaccctcatcacacttccttgtcagagcccagcttacctagcaagggtgcctgggaatcccctgtacttcaatccccttcctgttctgtctctgtcctgacttcatccagttgatagtggacaaaccctattgtagattgctgcctgaaccccagtcagcaagtcctgttttggcttaaatctaaggtcttgttggatgtgatggctcacgcccgtaatcccaacacagagactaagacagatcacttgaggtcaggagttcgagaccagcctgggcaacatgaaaccccatctctactaaaaatacaaaaatacaaaaaaatccccagcacatggggcacatgcctatattcccagctacttgggatgctgaggcaggaggatagcttgaacccgggaggcagaggttgcagtcagccaagattgtgccactgaactccactccagcctgggcgacagagtgaggactccgtctcaaaaa

SEQ ID NO: 368266 - DNA, 5451 bp, Homo sapiens
cgcgttgtaccaccacggggctagaggggccggggagcgcatcccgcccccgcccccacccacgccgccccctcctccgccgccactgccgctcctcacacactcggaatcactggcctcactacctggggtcggggcggtgcgggtgtgcgcgcgccgacctctggcgcgttctaacccgcgcgcctgccttcccgggcttcgtcggcgcacaccgatttccgcatccggctccggacgcttccggtcttagctggacccgtctgggaggtaggtttgtgagcgtgagagatcgatctgtaccgcggggatccgaagtatgcttatccaggtgggctgcctcaagcctcgatcccacccccgcgctggtagatggtgtcaaggtccttgcgtgggagaaggacttgggtgagatgcatgcggagattgcccccaattccggcctggagccaagggaaagggatgcctggatttgtgtctctattggtggtccacgctgcggatgcctgggtagcccagaggttatctacgccatacttctcactgtttttgagcatacctagatgttcctttcctaggcggagtatagatcgcacgtgttctagcctcttagactcagagggttcgagctctataagcccctccactcccttcattttacaaatgagactcaaacctagagcgcggtaatgaccttactaagaccaaatggctggtgaattgggcttcactagaatccaggcttgctggctaacaccaatgctccctccatcatttcatgttatgttttcatttcccctctgtctgagagattgctctgatgtctttccttccataagtcctacggagatcgagcttacctcatttttctcccaggcctaggagctcaattaccaggatcactttcttccccagggtgtactacagacctccacatgttggacagtaggattcagcagagaatgagtcccacatcctcttttcatccataagccactcttcccaactactcttccgccttccattgtccctatgtctactttactgctcaatctggattttggggaacctcctcccaaaaaggcattagaaggaaatgccaagcaccgaaattttgtcaagaagcggaggctcttagaacggagaggctttctgagtaaaaagaaccaaccccctagcaaggcgcctaagttgcactctgaaccttcaaagaaaggggaaactcctacggtcgatggcacttggaagaccccttccttcccaaaaaagaagacagctgcttccagcaatgggtcaggacagcccctggacaagaaagctgcagtgtcttggttgacccctgccccttcaaaaaaggctgattctgttgctgctaaagtagatttgctgggggagttccagagtgcccttccaaagatcaatagccacccaacccgctctcagaagaagagctcccagaagaaatcctctaaaaagaaccatcctcagaagaatgccccacagaactccacccaagctcattcagagaataaatgctccggagcatcccagaagttgccacggaagatggtggcaattgactgtgagatggtgggcacaggaccaaaggggcatgttagttccttggctcgatgtagcattgtcaactacaacggagatgtgctttatgacgagtacattcttcccccctgccacattgtggactaccgaaccaggtggagtggtatccggaagcagcacatggtgaatgccacacccttcaagattgctcgaggccagatcttgaagatactcacagggaagatagtggtggggcatgccatccacaacgacttcaaagcccttcagtactttcaccccaagtccctcacccgggacgctggtgatatgaggaggcagaggcagcacccaggagaaacagggcagtggaccaatggacagctccaccagctccacatctttggaagctagatttggggagagagaagctctaccccagacttaatacccattgaaatttcacctcaggtgttgtgtcctgtgtctggttaagtgtcccatggaaggggaaagccttcacgtcagaacccaaccctataccttttacttcttaaatggtgctaaccacaggtgtcccagggtgctctgtgccagttaagatttttaactttcaaggggcagggcatactgggaaatgtagtttcccaaactgccttatcacttgggtggacatatgtctccttttatgccttttggtcttgagtaattaacagcatcctcttccacgctcagaagtgttctggttggggccaggcatggtggctcacgcctgtagtcccaacacttagggaggccgaggcgggcggatcacctgagatcaggagttcaagaccagcctggccaacatggcgaattcccgttctctactaaaaatacaaaaaatgtgtggggtgtggtggcaggagcctgtaatcctagctactcaggaggctgaggcaggagaatcgcttgagcccaggaggcggagattgcagtgagccgagatcgtgtcactgcactccagcctgggtgacaagagtgagactccgtctccaaaaaaaaaaaaaaagaatttattaacctggttggttaataaattgtgtggtccctgccgggcgtggtggctcacgcctgtaatcccagcactttgggaggccgaggcgggcagatcacgaggtcaggagatcgagaccatcctggctaacacggtgaaaccccgtctctactaaaaatacaaaaaattagccaggcgtggtggcgggcacctgtagttccagctacttgggaggctgaggcaggagaatggcgtgaacccaggaggcggagcttgcagtgagccgagattgtgccactgcactccagcctgggccacggccacagagcgagactctgtctcaaaaaaaaaaaaaaattaaaattgtgtggtccctttccatgtcacagagtctgcttttggctcagagtctgtatctagcctgtgtcaggatattgcctgttcttcccaccttgacttccagagcagccatcgctggtgagctttagttctccttagggttccaaggcattagaagtaagagtgtagcttggaaaccaacttctgtgatttaggaaagctgtctctttcctaaggtaatagggggtttatttcatttaggccccagttggtaggttttaaaataatttataaagtgttttaataatttggttgtcttttttaccttgctaaaccaagcctctaaaaactcaaattattcccttgataaatttttataatggaaaagcaaataagtacagtttcttctttatgttaaatagctctatcacaaagtattgtggagctgtagttttcttaggggatttccaggttcactggatgacactaactggggcccttcctggaagtcatagaactgaccaagcctttgtgcgtaacccacgtgacacatatggttccttgtcctcatccctaccacacatcagagctgagcatggcagctcacgcctgtaatcccagctacccgggaggctaaggcatgatgattccttgagcccaggaatttaaatccagcccaggcaaaatagaccccatctcaattttaaaaaaaaggaatgagcacacctaaaatgacaccccaagccatgcaactccccctgacacacacagggtatgtgaccaggagagtgagatagagagagtgggcatgaaggaggggcagagcaggggagaaagggtgcttggtgatgacagcctggtcctgctgccagcttttggtggtacacaccccatcttgggaaagagtcaccagtctgaccttgtgtccaggatcattatctgcactttcttgagagaatgcagactccatgtctacacaaggacttttgcattcttgagtggctggtctggttccaggggccagagtcacggtcacagctgcctatagaagtgaatttcgtgcagccagaccagacccagacatggtcttgttgaggcctgcactgtggggtctgttgcacaggcagccattgtgctctgagcaaattggttcctgtggggcccaacatatttaatgtccatgacttcacaaaggggtgccaggtatccttgcacagcaagaactaagaatagtgcaaggaggccgcaacagaaactggtaagaatacacacatgcaagcgattcttaactacattgtaatcagtaaatgaagataacgacaatattctcattagggtacttactggctgaaacaaaactaactttgtcaggccggtgcagtggctcacacccgtaatcccagcactttggggaggctgaggcaggaggatggcttgagcccaggagtttgagaccagcctgggcaacatagtgaaaccccatcgctaccaaaaaaaaaaaaaaaaaaaaccctggctttgtatgtgtcttggtaaagtagcaactggcttttatgatccccctacccccacaccctgtgtctaaaagggcacatgactgctacagcctcaaaacaaaagtacttgatctcagtccaatgttgaaaagagctcattctgcctggcacggtggctcacgcctgtaatgccagcactttgggaggccgaggtgggtggatcatgaggtcaggagattgagaccatcctggctaacacggtgaaaccccatctctactaaaaaaatacaaaaaattagccaggcgtcgtggtgggcgcctgtattcccagctactcgggaggctgaggcaggagaatggcgtgaacccgcgaggcggagcttgcagtgagccgagatcgcaccgctgcactccagcctgggcgacagagcgagactccgtctcaaaaaaaaaaaaaaaagagaaaagagctcattcttacttttgctcaccaagaaaaacctgggagacgagaagaccttgcaggcaattccttaactgtttaccctcatcacacttccttgtcagagcccagcttacctagcaagggtgcctgggaatcccctgtacttcaatccccttcctgttctgtctctgtcctgacttcatccagttgatagtggacaaaccctattgtagattgctgcctgaaccccagtcagcaagtcctgttttggcttaaatctaaggtcttgttggatgtgatggctcacgcccgtaatcccaacacagagactaagacagatcacttgaggtcaggagttcgagaccagcctgggcaacatgaaaccccatctctactaaaaatacaaaaatacaaaaaaatccccagcacatggggcacatgcctatattcccagctacttgggatgctgaggcaggaggatagcttgaacccgggaggcagaggttgcagtcagccaagattgtgccactgaactccactccagcctgggcgacagagtgaggactccgtctcaaaaa

SEQ ID NO: 368267 - DNA, 5307 bp, Homo sapiens
  misc_feature (1)..(1): n is a, c, g, or t
ncgttagaggtgaggtgactgactattttagaaaagacggaaagaagagttaaacatcttgtgcacaaaggggcgcagccaagcaaaggcataggagaggcagaagatgggacgggtctgagacagcaaatctgcccagctttgatgagggctatatgtcgaggttaataagaagtgaaggtggtggtggacagtaagtaggtgaagtcaggagtaacgaaatatctagttcacgggactacgtctggttttcatcataaagcacttccccagtgccaagctggggttatgagactaaggtatgtccagatgagcctagccccttcagagggggtccctttgggaggctatgcaggactgtcacttttgttgaaaacctgtttggaacctcatttgggaatggccttcagagcctgtggtgtgttcttcggttgtcctcattggtagcatgtcctcctacttcaagagcctgaaatggctaggtgtggtgacatgtgtctgtaatcccagctactcaggagtttgaggtgagagcattgcttgagcccaggagtttgaggccagccaacctgggaaaaatagcaagacctcatctcttttaaaaaataagttacctgaaggccaggtgtggtggctcacacctgtaatcccagcactttgggagcctgaagcgggcagatcacaagatcaggagttcaagaccagcctggcccatatggtgaaactccgtctctactaaaaatacaaaacttagccaggcatggtggcaggtgccagtagtcccagctacttgggaggctgaggcaggagaaacgcttgaacccgggaggcggaggttgtagtgagccaagatcgcgccagtacactccagcctgggcaacagagcaagactccatctcaaaaaaaaaaaacagtttcctgaaatattgagaagttatttttattttacttggttccaaaactagtgtgaataaggttgcttctgcaactttagtttatatgtgattcttaattttttacggtttgtagactctgagaatttgatgaaagccacagattctcttcctctagtacccatacacatctaattgcatgtaattttgggcttttgttagcctccctggagcccgggtcccagccatgtgtctaaggccaacataatggtaatagttaaaggacttcatgtagcaagccagaactgaactaaatacatggacatctcaaacatgagtgtcatttaggactgaaggcaaattaatgtcatggggtggagatcaataagaaggtaaggagccactggcagtatgagtccaaacagggtataccatggaaatcacctgtggaagaggaaggtggattccagaagaaagaaaacttgtgggagtgagcatttcaaggatggagagatcttgaagatactcacagggaagatagtggtggggcatgccatccacaacgacttcaaagcccttcagtactttcaccccaagtccctcacccgtgacacctcccatatcccccccctcaaccggaaggctgactgcccggagaatgccaccatgtctctgaagcatctcaccaagaagctgctaaaccgggatatccaggttgggaagagcggacattcctctgtggaagatgcccaggccaccatggagctatataagttggttgaagtcgagtgggaagagcacctagcccggaatccccctacagactagtggcagtggggacgctggtgatatgaggaggcagaggcagcacccaggagaaacagggcagtggaccaatggacagctccaccagctccacatctttggaagctagatttggggagagagaagctctaccccagacttaatacccattgaaatttcacctcaggtgttgtgtcctgtgtctggttaagtgtcccatggaaggggaaagccttcacgtcagaacccaaccctataccttttacttcttaaatggtgctaaccacaggtgtcccagggtgctctgtgccagttaagatttttaactttcaaggggcagggcatactgggaaatgtagtttcccaaactgccttatcacttgggtggacatatgtctccttttatgccttttggtcttgagtaattaacagcatcctcttccacgctcagaagtgttctggttggggccaggcatggtggctcacgcctgtagtcccaacacttagggaggccgaggcgggcggatcacctgagatcaggagttcaagaccagcctggccaacatggcgaattcccgttctctactaaaaatacaaaaaatgtgtggggtgtggtggcaggagcctgtaatcctagctactcaggaggctgaggcaggagaatcgcttgagcccaggaggcggagattgcagtgagccgagatcgtgtcactgcactccagcctgggtgacaagagtgagactccgtctccaaaaaaaaaaaaaaagaatttattaacctggttggttaataaattgtgtggtccctgccgggcgtggtggctcacgcctgtaatcccagcactttgggaggccgaggcgggcagatcacgaggtcaggagatcgagaccatcctggctaacacggtgaaaccccgtctctactaaaaatacaaaaaattagccaggcgtggtggcgggcacctgtagttccagctacttgggaggctgaggcaggagaatggcgtgaacccaggaggcggagcttgcagtgagccgagattgtgccactgcactccagcctgggccacggccacagagcgagactctgtctcaaaaaaaaaaaaaaattaaaattgtgtggtccctttccatgtcacagagtctgcttttggctcagagtctgtatctagcctgtgtcaggatattgcctgttcttcccaccttgacttccagagcagccatcgctggtgagctttagttctccttagggttccaaggcattagaagtaagagtgtagcttggaaaccaacttctgtgatttaggaaagctgtctctttcctaaggtaatagggggtttatttcatttaggccccagttggtaggttttaaaataatttataaagtgttttaataatttggttgtcttttttaccttgctaaaccaagcctctaaaaactcaaattattcccttgataaatttttataatggaaaagcaaataagtacagtttcttctttatgttaaatagctctatcacaaagtattgtggagctgtagttttcttaggggatttccaggttcactggatgacactaactggggcccttcctggaagtcatagaactgaccaagcctttgtgcgtaacccacgtgacacatatggttccttgtcctcatccctaccacacatcagagctgagcatggcagctcacgcctgtaatcccagctacccgggaggctaaggcatgatgattccttgagcccaggaatttaaatccagcccaggcaaaatagaccccatctcaattttaaaaaaaaggaatgagcacacctaaaatgacaccccaagccatgcaactccccctgacacacacagggtatgtgaccaggagagtgagatagagagagtgggcatgaaggaggggcagagcaggggagaaagggtgcttggtgatgacagcctggtcctgctgccagcttttggtggtacacaccccatcttgggaaagagtcaccagtctgaccttgtgtccaggatcattatctgcactttcttgagagaatgcagactccatgtctacacaaggacttttgcattcttgagtggctggtctggttccaggggccagagtcacggtcacagctgcctatagaagtgaatttcgtgcagccagaccagacccagacatggtcttgttgaggcctgcactgtggggtctgttgcacaggcagccattgtgctctgagcaaattggttcctgtggggcccaacatatttaatgtccatgacttcacaaaggggtgccaggtatccttgcacagcaagaactaagaatagtgcaaggaggccgcaacagaaactggtaagaatacacacatgcaagcgattcttaactacattgtaatcagtaaatgaagataacgacaatattctcattagggtacttactggctgaaacaaaactaactttgtcaggccggtgcagtggctcacacccgtaatcccagcactttggggaggctgaggcaggaggatggcttgagcccaggagtttgagaccagcctgggcaacatagtgaaaccccatcgctaccaaaaaaaaaaaaaaaaaaaaccctggctttgtatgtgtcttggtaaagtagcaactggcttttatgatccccctacccccacaccctgtgtctaaaagggcacatgactgctacagcctcaaaacaaaagtacttgatctcagtccaatgttgaaaagagctcattctgcctggcacggtggctcacgcctgtaatgccagcactttgggaggccgaggtgggtggatcatgaggtcaggagattgagaccatcctggctaacacggtgaaaccccatctctactaaaaaaatacaaaaaattagccaggcgtcgtggtgggcgcctgtattcccagctactcgggaggctgaggcaggagaatggcgtgaacccgcgaggcggagcttgcagtgagccgagatcgcaccgctgcactccagcctgggcgacagagcgagactccgtctcaaaaaaaaaaaaaaaagagaaaagagctcattcttacttttgctcaccaagaaaaacctgggagacgagaagaccttgcaggcaattccttaactgtttaccctcatcacacttccttgtcagagcccagcttacctagcaagggtgcctgggaatcccctgtacttcaatccccttcctgttctgtctctgtcctgacttcatccagttgatagtggacaaaccctattgtagattgctgcctgaaccccagtcagcaagtcctgttttggcttaaatctaaggtcttgttggatgtgatggctcacgcccgtaatcccaacacagagactaagacagatcacttgaggtcaggagttcgagaccagcctgggcaacatgaaaccccatctctactaaaaatacaaaaatacaaaaaaatccccagcacatggggcacatgcctatattcccagctacttgggatgctgaggcaggaggatagcttgaacccgggaggcagaggttgcagtcagccaagattgtgccactgaactccactccagcctgggcgacagagtgaggactccgtctcaaaaa

SEQ ID NO: 368268 - DNA, 4461 bp, Homo sapiens
ctggtgatatgaggaggcagaggcagcacccaggagaaacagggcagtggaccaatggacagctccaccagctccacatctttggaagctagatttggggagagagaagctctaccccagacttaatacccattgaaatttcacctcaggtgttgtgtcctgtgtctggttaagtgtcccatgaaaggggaaagccttcacgtcagaacccaacccgctctcagaagaagagctcccagaagaaatcctctaaaaagaaccatcctcagaagaatgccccacagaactccacccaagctcattcagagaataaatgctccggagcatcccagaagttgccacggaagatggtggcaattgactgtgagatggtgggcacaggaccaaaggggcatgttagttccttggctcgatgtagcattgtcaactacaacggagatgtgctttatgacgagtacattcttcccccctgccacattgtggactaccgaaccaggtggagtggtatccggaagcagcacatggtgaatgccacacccttcaagattgctcgaggccagatcttgaagatactcacagggaagatagtggtggggcatgccatccacaacgacttcaaagcccttcagtactttcaccccaagtccctcacccgtgacacctcccatatcccccccctcaaccggaaggctgactgcccggagaatgccaccatgtctctgaagcatctcaccaagaagctgctaaaccgggatatccaggttgggaagagcggacattcctctgtggaagatgcccaggccaccatggagctatataagttggttgaagtcgagtgggaagagcacctagcccggaatccccctacagactagtggcagtggggacgctggtgatatgaggaggcagaggcagcacccaggagaaacagggcagtggaccaatggacagctccaccagctccacatctttggaagctagatttggggagagagaagctctaccccagacttaatacccattgaaatttcacctcaggtgttgtgtcctgtgtctggttaagtgtcccatggaaggggaaagccttcacgtcagaacccaaccctataccttttacttcttaaatggtgctaaccacaggtgtcccagggtgctctgtgccagttaagatttttaactttcaaggggcagggcatactgggaaatgtagtttcccaaactgccttatcacttgggtggacatatgtctccttttatgccttttggtcttgagtaattaacagcatcctcttccacgctcagaagtgttctggttggggccaggcatggtggctcacgcctgtagtcccaacacttagggaggccgaggcgggcggatcacctgagatcaggagttcaagaccagcctggccaacatggcgaattcccgttctctactaaaaatacaaaaaatgtgtggggtgtggtggcaggagcctgtaatcctagctactcaggaggctgaggcaggagaatcgcttgagcccaggaggcggagattgcagtgagccgagatcgtgtcactgcactccagcctgggtgacaagagtgagactccgtctccaaaaaaaaaaaaaaagaatttattaacctggttggttaataaattgtgtggtccctgccgggcgtggtggctcacgcctgtaatcccagcactttgggaggccgaggcgggcagatcacgaggtcaggagatcgagaccatcctggctaacacggtgaaaccccgtctctactaaaaatacaaaaaattagccaggcgtggtggcgggcacctgtagttccagctacttgggaggctgaggcaggagaatggcgtgaacccaggaggcggagcttgcagtgagccgagattgtgccactgcactccagcctgggccacggccacagagcgagactctgtctcaaaaaaaaaaaaaaattaaaattgtgtggtccctttccatgtcacagagtctgcttttggctcagagtctgtatctagcctgtgtcaggatattgcctgttcttcccaccttgacttccagagcagccatcgctggtgagctttagttctccttagggttccaaggcattagaagtaagagtgtagcttggaaaccaacttctgtgatttaggaaagctgtctctttcctaaggtaatagggggtttatttcatttaggccccagttggtaggttttaaaataatttataaagtgttttaataatttggttgtcttttttaccttgctaaaccaagcctctaaaaactcaaattattcccttgataaatttttataatggaaaagcaaataagtacagtttcttctttatgttaaatagctctatcacaaagtattgtggagctgtagttttcttaggggatttccaggttcactggatgacactaactggggcccttcctggaagtcatagaactgaccaagcctttgtgcgtaacccacgtgacacatatggttccttgtcctcatccctaccacacatcagagctgagcatggcagctcacgcctgtaatcccagctacccgggaggctaaggcatgatgattccttgagcccaggaatttaaatccagcccaggcaaaatagaccccatctcaattttaaaaaaaaggaatgagcacacctaaaatgacaccccaagccatgcaactccccctgacacacacagggtatgtgaccaggagagtgagatagagagagtgggcatgaaggaggggcagagcaggggagaaagggtgcttggtgatgacagcctggtcctgctgccagcttttggtggtacacaccccatcttgggaaagagtcaccagtctgaccttgtgtccaggatcattatctgcactttcttgagagaatgcagactccatgtctacacaaggacttttgcattcttgagtggctggtctggttccaggggccagagtcacggtcacagctgcctatagaagtgaatttcgtgcagccagaccagacccagacatggtcttgttgaggcctgcactgtggggtctgttgcacaggcagccattgtgctctgagcaaattggttcctgtggggcccaacatatttaatgtccatgacttcacaaaggggtgccaggtatccttgcacagcaagaactaagaatagtgcaaggaggccgcaacagaaactggtaagaatacacacatgcaagcgattcttaactacattgtaatcagtaaatgaagataacgacaatattctcattagggtacttactggctgaaacaaaactaactttgtcaggccggtgcagtggctcacacccgtaatcccagcactttggggaggctgaggcaggaggatggcttgagcccaggagtttgagaccagcctgggcaacatagtgaaaccccatcgctaccaaaaaaaaaaaaaaaaaaaaccctggctttgtatgtgtcttggtaaagtagcaactggcttttatgatccccctacccccacaccctgtgtctaaaagggcacatgactgctacagcctcaaaacaaaagtacttgatctcagtccaatgttgaaaagagctcattctgcctggcacggtggctcacgcctgtaatgccagcactttgggaggccgaggtgggtggatcatgaggtcaggagattgagaccatcctggctaacacggtgaaaccccatctctactaaaaaaatacaaaaaattagccaggcgtcgtggtgggcgcctgtattcccagctactcgggaggctgaggcaggagaatggcgtgaacccgcgaggcggagcttgcagtgagccgagatcgcaccgctgcactccagcctgggcgacagagcgagactccgtctcaaaaaaaaaaaaaaaagagaaaagagctcattcttacttttgctcaccaagaaaaacctgggagacgagaagaccttgcaggcaattccttaactgtttaccctcatcacacttccttgtcagagcccagcttacctagcaagggtgcctgggaatcccctgtacttcaatccccttcctgttctgtctctgtcctgacttcatccagttgatagtggacaaaccctattgtagattgctgcctgaaccccagtcagcaagtcctgttttggcttaaatctaaggtcttgttggatgtgatggctcacgcccgtaatcccaacacagagactaagacagatcacttgaggtcaggagttcgagaccagcctgggcaacatgaaaccccatctctactaaaaatacaaaaatacaaaaaaatccccagcacatggggcacatgcctatattcccagctacttgggatgctgaggcaggaggatagcttgaacccgggaggcagaggttgcagtcagccaagattgtgccactgaactccactccagcctgggcgacagagtgaggactccgtctcaaaaa

SEQ ID NO: 368269 - DNA, 2333 bp, Homo sapiens
cgcgttgtaccaccacggggctagaggggccggggagcgcatcccgcccccgcccccacccacgccgccccctcctccgccgccactgccgctcctcacacactcggaatcactggcctcactacctggggtcggggcggtgcgggtgtgcgcgcgccgacctctggcgcgttctaacccgcgcgcctgccttcccgggcttcgtcggcgcacaccgatttccgcatccggctccggacgcttccggtcttagctggacccgtctgggaggtaggtttgtgagcgtgagagatcgatctgtaccgcggggatccgaagtatgcttatccaggtgggctgcctcaagcctcgatcccacccccgcgctggtagatggtgtcaaggtccttgcgtgggagaaggacttgggtgagatgcatgcggagattgcccccaattccggcctggagccaagggaaagggatgcctggatttgtgtctctattggtggtccacgctgcggatgcctgggtagcccagaggttatctacgccatacttctcactgtttttgagcatacctagatgttcctttcctaggcggagtatagatcgcacgtgttctagcctcttagactcagagggttcgagctctataagcccctccactcccttcattttacaaatgagactcaaacctagagcgcggtaatgaccttactaagaccaaatggctggtgaattgggcttcactagaatccaggcttgctggctaacaccaatgctccctccatcatttcatgttatgttttcatttcccctctgtctgagagattgctctgatgtctttccttccataagtcctacggagatcgagcttacctcatttttctcccaggcctaggagctcaattaccaggatcactttcttccccagggtgtactacagacctccacatgttggacagtaggattcagcagagaatgagtcccacatcctcttttcatccataagccactcttcccaactactcttccgccttccattgtccctatgtctactttactgctcaatctggattttggggaacctcctcccaaaaaggcattagaaggaaatgccaagcaccgaaattttgtcaagaagcggaggctcttagaacggagaggctttctgagtaaaaagaaccaaccccctagcaaggcgcctaagttgcactctgaaccttcaaagaaaggggaaactcctacggtcgatggcacttggaagaccccttccttcccaaaaaagaagacagctgcttccagcaatgggtcaggacagcccctggacaagaaagctgcagtgtcttggttgacccctgccccttcaaaaaaggctgattctgttgctgctaaagtagatttgctgggggagttccagagtgcccttccaaagatcaatagccacccaacccgctctcagaagaagagctcccagaagaaatcctctaaaaagaaccatcctcagaagaatgccccacagaactccacccaagctcattcagagaataaatgctccggagcatcccagaagttgccacggaagatggtggcaattgactgtgagatggtgggcacaggaccaaaggggcatgttagttccttggctcgatgtagcattgtcaactacaacggagatgtgctttatgacgagtacattcttcccccctgccacattgtggactaccgaaccaggtggagtggtatccggaagcagcacatggtgaatgccacacccttcaagattgctcgaggccagatcttgaagatactcacagggaagatagtggtggggcatgccatccacaacgacttcaaagcccttcagtactttcaccccaagtccctcacccgtgacacctcccatatcccccccctcaaccggaaggctgactgcccggagaatgccaccatgtctctgaagcatctcaccaagaagctgctaaaccgggatatccagtgggaagagctgcgaagcgagctgatggctgcagaacaggaggatgacgtggagggtgtgtgcaagcctctgtctgcggctggagaacacaaaacactccgtgtgcgtgggccctgtcttcaccccagcgagcatcatgtgagtgggcctcgttccccccggagaatcacagcggggcctcagagatgcatctgggagaggtggggaagatggcaggcaagggtacccttggccaggactctggtgcccaccctgccacccccgcgctccacctgcagtgtttctgccctgtaaataggaccagtcttacactcgctgtagttcaagtatgcaacataaatcctgttccttcc

SEQ ID NO: 368270 - DNA, 378 bp, Homo sapiens
gaaattacataaggagtaggaccccaccagaattctgtctttgtaggctgctgactgcagaagaaactgtgtagcggaggcagggggaagaggagtacagagagtacactgggaaggaagaaacggtttcttttctcttcatgctcttgtcttccttgcttgctcaggttgggaagagcggacattcctctgtggaagatgcccaggccaccatggagctatataagttggttgaagtcgagtgggaagagcacctagcccggaatccccctacagactagtggcagtggggacgctggtgatatgaggaggcagaggcagcacccaggagaaacagggcagtggaccaatggacagctccaccagctccacatcttt

SEQ ID NO: 368271 - DNA, 5680 bp, Homo sapiens
cgcgttgtaccaccacggggctagaggggccggggagcgcatcccgcccccgcccccacccacgccgccccctcctccgccgccactgccgctcctcacacactcggaatcactggcctcactacctggggtcggggcggtgcgggtgtgcgcgcgccgacctctggcgcgttctaacccgcgcgcctgccttcccgggcttcgtcggcgcacaccgatttccgcatccggctccggacgcttccggtcttagctggacccgtctgggaggtaggtttgtgagcgtgagagatcgatctgtaccgcggggatccgaagtatgcttatccaggtgggctgcctcaagcctcgatcccacccccgcgctggtagatggtgtcaaggtccttgcgtgggagaaggacttgggtgagatgcatgcggagattgcccccaattccggcctggagccaagggaaagggatgcctggatttgtgtctctattggtggtccacgctgcggatgcctgggtagcccagaggttatctacgccatacttctcactgtttttgagcatacctagatgttcctttcctaggcggagtatagatcgcacgtgttctagcctcttagactcagagggttcgagctctataagcccctccactcccttcattttacaaatgagactcaaacctagagcgcggtaatgaccttactaagaccaaatggctggtgaattgggcttcactagaatccaggcttgctggctaacaccaatgctccctccatcatttcatgttatgttttcatttcccctctgtctgagagattgctctgatgtctttccttccataagtcctacggagatcgagcttacctcatttttctcccaggcctaggagctcaattaccaggatcactttcttccccagggtgtactacagacctccacatgttggacagtaggattcagcagagaatgagtcccacatcctcttttcatccataagccactcttcccaactactcttccgccttccattgtccctatgtctactttactgctcaatctggattttggggaacctcctcccaaaaaggcattagaaggaaatgccaagcaccgaaattttgtcaagaagcggaggctcttagaacggagaggctttctgagtaaaaagaaccaaccccctagcaaggcgcctaagttgcactctgaaccttcaaagaaaggggaaactcctacggtcgatggcacttggaagaccccttccttcccaaaaaagaagacagctgcttccagcaatgggtcaggacagcccctggacaagaaagctgcagtgtcttggttgacccctgccccttcaaaaaaggctgattctgttgctgctaaagtagatttgctgggggagttccagagtgcccttccaaagatcaatagccacccaacccgctctcagaagaagagctcccagaagaaatcctctaaaaagaaccatcctcagaagaatgccccacagaactccacccaagctcattcagagaataaatgctccggagcatcccagaagttgccacggaagatggtggcaattgactgtgagatggtgggcacaggaccaaaggggcatgttagttccttggctcgatgtagcattgtcaactacaacggagatgtgctttatgacgagtacattcttcccccctgccacattgtggactaccgaaccaggtggagtggtatccggaagcagcacatggtgaatgccacacccttcaagattgctcgaggccagatcttgaagatactcacagggaagatagtggtggggcatgccatccacaacgacttcaaagcccttcagtactttcaccccaagtccctcacccgtgacacctcccatatcccccccctcaaccggaaggctgactgcccggagaatgccaccatgtctctgaagcatctcaccaagaagctgctaaaccgggatatccaggttgggaagagcggacattcctctgtggaagatgcccaggccaccatggagctatataagttggttgaagtcgagtgggaagagcacctagcccggaatccccctacagactagtggcagtggggacgctggtgatatgaggaggcagaggcagcacccaggagaaacagggcagtggaccaatggacagctccaccagctccacatctttggaagctagatttggggagagagaagctctaccccagacttaatacccattgaaatttcacctcaggtgttgtgtcctgtgtctggttaagtgtcccatggaaggggaaagccttcacgtcagaacccaaccctataccttttacttcttaaatggtgctaaccacaggtgtcccagggtgctctgtgccagttaagatttttaactttcaaggggcagggcatactgggaaatgtagtttcccaaactgccttatcacttgggtggacatatgtctccttttatgccttttggtcttgagtaattaacagcatcctcttccacgctcagaagtgttctggttggggccaggcatggtggctcacgcctgtagtcccaacacttagggaggccgaggcgggcggatcacctgagatcaggagttcaagaccagcctggccaacatggcgaattcccgttctctactaaaaatacaaaaaatgtgtggggtgtggtggcaggagcctgtaatcctagctactcaggaggctgaggcaggagaatcgcttgagcccaggaggcggagattgcagtgagccgagatcgtgtcactgcactccagcctgggtgacaagagtgagactccgtctccaaaaaaaaaaaaaaagaatttattaacctggttggttaataaattgtgtggtccctgccgggcgtggtggctcacgcctgtaatcccagcactttgggaggccgaggcgggcagatcacgaggtcaggagatcgagaccatcctggctaacacggtgaaaccccgtctctactaaaaatacaaaaaattagccaggcgtggtggcgggcacctgtagttccagctacttgggaggctgaggcaggagaatggcgtgaacccaggaggcggagcttgcagtgagccgagattgtgccactgcactccagcctgggccacggccacagagcgagactctgtctcaaaaaaaaaaaaaaattaaaattgtgtggtccctttccatgtcacagagtctgcttttggctcagagtctgtatctagcctgtgtcaggatattgcctgttcttcccaccttgacttccagagcagccatcgctggtgagctttagttctccttagggttccaaggcattagaagtaagagtgtagcttggaaaccaacttctgtgatttaggaaagctgtctctttcctaaggtaatagggggtttatttcatttaggccccagttggtaggttttaaaataatttataaagtgttttaataatttggttgtcttttttaccttgctaaaccaagcctctaaaaactcaaattattcccttgataaatttttataatggaaaagcaaataagtacagtttcttctttatgttaaatagctctatcacaaagtattgtggagctgtagttttcttaggggatttccaggttcactggatgacactaactggggcccttcctggaagtcatagaactgaccaagcctttgtgcgtaacccacgtgacacatatggttccttgtcctcatccctaccacacatcagagctgagcatggcagctcacgcctgtaatcccagctacccgggaggctaaggcatgatgattccttgagcccaggaatttaaatccagcccaggcaaaatagaccccatctcaattttaaaaaaaaggaatgagcacacctaaaatgacaccccaagccatgcaactccccctgacacacacagggtatgtgaccaggagagtgagatagagagagtgggcatgaaggaggggcagagcaggggagaaagggtgcttggtgatgacagcctggtcctgctgccagcttttggtggtacacaccccatcttgggaaagagtcaccagtctgaccttgtgtccaggatcattatctgcactttcttgagagaatgcagactccatgtctacacaaggacttttgcattcttgagtggctggtctggttccaggggccagagtcacggtcacagctgcctatagaagtgaatttcgtgcagccagaccagacccagacatggtcttgttgaggcctgcactgtggggtctgttgcacaggcagccattgtgctctgagcaaattggttcctgtggggcccaacatatttaatgtccatgacttcacaaaggggtgccaggtatccttgcacagcaagaactaagaatagtgcaaggaggccgcaacagaaactggtaagaatacacacatgcaagcgattcttaactacattgtaatcagtaaatgaagataacgacaatattctcattagggtacttactggctgaaacaaaactaactttgtcaggccggtgcagtggctcacacccgtaatcccagcactttggggaggctgaggcaggaggatggcttgagcccaggagtttgagaccagcctgggcaacatagtgaaaccccatcgctaccaaaaaaaaaaaaaaaaaaaaccctggctttgtatgtgtcttggtaaagtagcaactggcttttatgatccccctacccccacaccctgtgtctaaaagggcacatgactgctacagcctcaaaacaaaagtacttgatctcagtccaatgttgaaaagagctcattctgcctggcacggtggctcacgcctgtaatgccagcactttgggaggccgaggtgggtggatcatgaggtcaggagattgagaccatcctggctaacacggtgaaaccccatctctactaaaaaaatacaaaaaattagccaggcgtcgtggtgggcgcctgtattcccagctactcgggaggctgaggcaggagaatggcgtgaacccgcgaggcggagcttgcagtgagccgagatcgcaccgctgcactccagcctgggcgacagagcgagactccgtctcaaaaaaaaaaaaaaaagagaaaagagctcattcttacttttgctcaccaagaaaaacctgggagacgagaagaccttgcaggcaattccttaactgtttaccctcatcacacttccttgtcagagcccagcttacctagcaagggtgcctgggaatcccctgtacttcaatccccttcctgttctgtctctgtcctgacttcatccagttgatagtggacaaaccctattgtagattgctgcctgaaccccagtcagcaagtcctgttttggcttaaatctaaggtcttgttggatgtgatggctcacgcccgtaatcccaacacagagactaagacagatcacttgaggtcaggagttcgagaccagcctgggcaacatgaaaccccatctctactaaaaatacaaaaatacaaaaaaatccccagcacatggggcacatgcctatattcccagctacttgggatgctgaggcaggaggatagcttgaacccgggaggcagaggttgcagtcagccaagattgtgccactgaactccactccagcctgggcgacagagtgaggactccgtctcaaaaa

SEQ ID NO: 368272 - DNA, 5342 bp, Homo sapiens
cgcgttgtaccaccacggggctagaggggccggggagcgcatcccgcccccgcccccacccacgccgccccctcctccgccgccactgccgctcctcacacactcggaatcactggcctcactacctggggtcggggcggtgcgggtgtgcgcgcgccgacctctggcgcgttctaacccgcgcgcctgccttcccgggcttcgtcggcgcacaccgatttccgcatccggctccggacgcttccggtcttagctggacccgtctgggaggtaggtttgtgagcgtgagagatcgatctgtaccgcggggatccgaagtatgcttatccaggtgggctgcctcaagcctcgatcccacccccgcgctggtagatggtgtcaaggtccttgcgtgggagaaggacttgggtgagatgcatgcggagattgcccccaattccggcctggagccaagggaaagggatgcctggatttgtgtctctattggtggtccacgctgcggatgcctgggtagcccagaggttatctacgccatacttctcactgtttttgagcatacctagatgttcctttcctaggcggagtatagatcgcacgtgttctagcctcttagactcagagggttcgagctctataagcccctccactcccttcattttacaaatgagactcaaacctagagcgcggtaatgaccttactaagaccaaatggctggtgaattgggcttcactagaatccaggcttgctggctaacaccaatgctccctccatcatttcatgttatgttttcatttcccctctgtctgagagattgctctgatgtctttccttccataagtcctacggagatcgagcttacctcatttttctcccaggcctaggagctcaattaccaggatcactttcttccccagggtgtactacagacctccacatgttggacagtaggattcagcagagaatgagtcccacatcctcttttcatccataagccactcttcccaactactcttccgccttccattgtccctatgtctactttactgctcaatctggattttggggaacctcctcccaaaaaggcattagaaggaaatgccaagcaccgaaattttgtcaagaagcggaggctcttagaacggagaggctttctgagtaaaaagaaccaaccccctagcaaggcgcctaagttgcactctgaaccttcaaagaaaggggaaactcctacggtcgatggcacttggaagaccccttccttcccaaaaaagaagacagctgcttccagcaatgggtcaggacagcccctggacaagaaagctgcagtgtcttggttgacccctgccccttcaaaaaaggctgattctgttgctgctaaagtagatttgctgggggagttccagagtgcccttccaaagatcaatagccacccaacccgctctcagaagaagagctcccagaagaaatcctctaaaaagaaccatcctcagaagaatgccccacagaactccacccaagctcattcagagaataaatgctccggagcatcccagaagttgccacggaagatggtggcaattgactgtgagatggtgggcacaggaccaaaggggcatgttagttccttggctcgatgtagcattgtcaactacaacggagatgtgctttatgacgagtacattcttcccccctgccacattgtggactaccgaaccaggtggagtggtatccggaagcagcacatggtgaatgccacacccttcaagattgctcgaggccagatcttgaagatactcacagggaagatagtggtggggcatgccatccacaacgacttcaaagcccttcagtactttcaccccaagtccctcacccgtgacacctcccatatcccccccctcaaccggaaggctgactgcccggagaatgccaccatgtctctgaagcatctcaccaagaagctgctaaaccgggatatccaggttgggaagagcggacattcctctgtggaagatgcccaggccaccatggagctatataagttggttgaagtcgagtgggaagagcacctagcccggaatccccctacagactagtggcagtggggacgctggtgatatgaggaggcagaggcagcacccaggagaaacagggcagtggaccaatggacagctccaccagctccacatctttggaagctagatttggggagagagaagctctaccccagacttaatacccattgaaatttcacctcaggtgttgtgtcctgtgtctggttaagtgtcccatggaaggggaaagccttcacgtcagaacccaaccctataccttttacttcttaaatggtgctaaccacaggtgtcccagggtgctctgtgccagttaagatttttaactttcaaggggcagggcatactgggaaatgtagtttcccaaactgccttatcacttgggtggacatatgtctccttttatgccttttggtcttgagtaattaacagcatcctcttccacgctcagaagtgttctggttggggccaggcatggtggctcacgcctgtagtcccaacacttagggaggccgaggcgggcggatcacctgagatcaggagttcaagaccagcctggccaacatggcgaattcccgttctctactaaaaatacaaaaaatgtgtggggtgtggtggcaggagcctgtaatcctagctactcaggaggctgaggcaggagaatcgcttgagcccaggaggcggagattgcagtgagccgagatcgtgccactgcactccagcctgggccacggccacagagcgagactctgtctcaaaaaaaaaaaaaaattaaaattgtgtggtccctttccatgtcacagagtctgcttttggctcagagtctgtatctagcctgtgtcaggatattgcctgttcttcccaccttgacttccagagcagccatcgctggtgagctttagttctccttagggttccaaggcattagaagtaagagtgtagcttggaaaccaacttctgtgatttaggaaagctgtctctttcctaaggtaatagggggtttatttcatttaggccccagttggtaggttttaaaataatttataaagtgttttaataatttggttgtcttttttaccttgctaaaccaagcctctaaaaactcaaattattcccttgataaatttttataatggaaaagcaaataagtacagtttcttctttatgttaaatagctctatcacaaagtattgtggagctgtagttttcttaggggatttccaggttcactggatgacactaactggggcccttcctggaagtcatagaactgaccaagcctttgtgcgtaacccacgtgacacatatggttccttgtcctcatccctaccacacatcagagctgagcatggcagctcacgcctgtaatcccagctacccgggaggctaaggcatgatgattccttgagcccaggaatttaaatccagcccaggcaaaatagaccccatctcaattttaaaaaaaaggaatgagcacacctaaaatgacaccccaagccatgcaactccccctgacacacacagggtatgtgaccaggagagtgagatagagagagtgggcatgaaggaggggcagagcaggggagaaagggtgcttggtgatgacagcctggtcctgctgccagcttttggtggtacacaccccatcttgggaaagagtcaccagtctgaccttgtgtccaggatcattatctgcactttcttgagagaatgcagactccatgtctacacaaggacttttgcattcttgagtggctggtctggttccaggggccagagtcacggtcacagctgcctatagaagtgaatttcgtgcagccagaccagacccagacatggtcttgttgaggcctgcactgtggggtctgttgcacaggcagccattgtgctctgagcaaattggttcctgtggggcccaacatatttaatgtccatgacttcacaaaggggtgccaggtatccttgcacagcaagaactaagaatagtgcaaggaggccgcaacagaaactggtaagaatacacacatgcaagcgattcttaactacattgtaatcagtaaatgaagataacgacaatattctcattagggtacttactggctgaaacaaaactaactttgtcaggccggtgcagtggctcacacccgtaatcccagcactttggggaggctgaggcaggaggatggcttgagcccaggagtttgagaccagcctgggcaacatagtgaaaccccatcgctaccaaaaaaaaaaaaaaaaaaaaccctggctttgtatgtgtcttggtaaagtagcaactggcttttatgatccccctacccccacaccctgtgtctaaaagggcacatgactgctacagcctcaaaacaaaagtacttgatctcagtccaatgttgaaaagagctcattctgcctggcacggtggctcacgcctgtaatgccagcactttgggaggccgaggtgggtggatcatgaggtcaggagattgagaccatcctggctaacacggtgaaaccccatctctactaaaaaaatacaaaaaattagccaggcgtcgtggtgggcgcctgtattcccagctactcgggaggctgaggcaggagaatggcgtgaacccgcgaggcggagcttgcagtgagccgagatcgcaccgctgcactccagcctgggcgacagagcgagactccgtctcaaaaaaaaaaaaaaaagagaaaagagctcattcttacttttgctcaccaagaaaaacctgggagacgagaagaccttgcaggcaattccttaactgtttaccctcatcacacttccttgtcagagcccagcttacctagcaagggtgcctgggaatcccctgtacttcaatccccttcctgttctgtctctgtcctgacttcatccagttgatagtggacaaaccctattgtagattgctgcctgaaccccagtcagcaagtcctgttttggcttaaatctaaggtcttgttggatgtgatggctcacgcccgtaatcccaacacagagactaagacagatcacttgaggtcaggagttcgagaccagcctgggcaacatgaaaccccatctctactaaaaatacaaaaatacaaaaaaatccccagcacatggggcacatgcctatattcccagctacttgggatgctgaggcaggaggatagcttgaacccgggaggcagaggttgcagtcagccaagattgtgccactgaactccactccagcctgggcgacagagtgaggactccgtctcaaaaa

SEQ ID NO: 368273 - DNA, 5089 bp, Homo sapiens
cgcgttgtaccaccacggggctagaggggccggggagcgcatcccgcccccgcccccacccacgccgccccctcctccgccgccactgccgctcctcacacactcggaatcactggcctcactacctggggtcggggcggtgcgggtgtgcgcgcgccgacctctggcgcgttctaacccgcgcgcctgccttcccgggcttcgtcggcgcacaccgatttccgcatccggctccggacgcttccggtcttagctggacccgtctgggaggtaggtttgtgagcgtgagagatcgatctgtaccgcggggatccgaagtatgctggtgtactacagacctccacatgttggacagtaggattcagcagagaatgagtcccacatcctcttttcatccataagccactcttcccaactactcttccgccttccattgtccctatgtctactttactgctcaatctggattttggggaacctcctcccaaaaaggcattagaaggaaatgccaagcaccgaaattttgtcaagaagcggaggctcttagaacggagaggctttctgagtaaaaagaaccaaccccctagcaaggcgcctaagttgcactctgaaccttcaaagaaaggggaaactcctacggtcgatggcacttggaagaccccttccttcccaaaaaagaagacagctgcttccagcaatgggtcaggacagcccctggacaagaaagctgcagtgtcttggttgacccctgccccttcaaaaaaggctgattctgttgctgctaaagtagatttgctgggggagttccagagtgcccttccaaagatcaatagccacccaacccgctctcagaagaagagctcccagaagaaatcctctaaaaagaaccatcctcagaagaatgccccacagaactccacccaagctcattcagagaataaatgctccggagcatcccagaagttgccacggaagatggtggcaattgactgtgagatggtgggcacaggaccaaaggggcatgttagttccttggctcgatgtagcattgtcaactacaacggagatgtgctttatgacgagtacattcttcccccctgccacattgtggactaccgaaccaggtggagtggtatccggaagcagcacatggtgaatgccacacccttcaagattgctcgaggccagatcttgaagatactcacagggaagatagtggtggggcatgccatccacaacgacttcaaagcccttcagtactttcaccccaagtccctcacccgtgacacctcccatatcccccccctcaaccggaaggctgactgcccggagaatgccaccatgtctctgaagcatctcaccaagaagctgctaaaccgggatatccaggttgggaagagcggacattcctctgtggaagatgcccaggccaccatggagctatataagttggttgaagtcgagtgggaagagcacctagcccggaatccccctacagactagtggcagtggggacgctggtgatatgaggaggcagaggcagcacccaggagaaacagggcagtggaccaatggacagctccaccagctccacatctttggaagctagatttggggagagagaagctctaccccagacttaatacccattgaaatttcacctcaggtgttgtgtcctgtgtctggttaagtgtcccatggaaggggaaagccttcacgtcagaacccaaccctataccttttacttcttaaatggtgctaaccacaggtgtcccagggtgctctgtgccagttaagatttttaactttcaaggggcagggcatactgggaaatgtagtttcccaaactgccttatcacttgggtggacatatgtctccttttatgccttttggtcttgagtaattaacagcatcctcttccacgctcagaagtgttctggttggggccaggcatggtggctcacgcctgtagtcccaacacttagggaggccgaggcgggcggatcacctgagatcaggagttcaagaccagcctggccaacatggcgaattcccgttctctactaaaaatacaaaaaatgtgtggggtgtggtggcaggagcctgtaatcctagctactcaggaggctgaggcaggagaatcgcttgagcccaggaggcggagattgcagtgagccgagatcgtgtcactgcactccagcctgggtgacaagagtgagactccgtctccaaaaaaaaaaaaaaagaatttattaacctggttggttaataaattgtgtggtccctgccgggcgtggtggctcacgcctgtaatcccagcactttgggaggccgaggcgggcagatcacgaggtcaggagatcgagaccatcctggctaacacggtgaaaccccgtctctactaaaaatacaaaaaattagccaggcgtggtggcgggcacctgtagttccagctacttgggaggctgaggcaggagaatggcgtgaacccaggaggcggagcttgcagtgagccgagattgtgccactgcactccagcctgggccacggccacagagcgagactctgtctcaaaaaaaaaaaaaaattaaaattgtgtggtccctttccatgtcacagagtctgcttttggctcagagtctgtatctagcctgtgtcaggatattgcctgttcttcccaccttgacttccagagcagccatcgctggtgagctttagttctccttagggttccaaggcattagaagtaagagtgtagcttggaaaccaacttctgtgatttaggaaagctgtctctttcctaaggtaatagggggtttatttcatttaggccccagttggtaggttttaaaataatttataaagtgttttaataatttggttgtcttttttaccttgctaaaccaagcctctaaaaactcaaattattcccttgataaatttttataatggaaaagcaaataagtacagtttcttctttatgttaaatagctctatcacaaagtattgtggagctgtagttttcttaggggatttccaggttcactggatgacactaactggggcccttcctggaagtcatagaactgaccaagcctttgtgcgtaacccacgtgacacatatggttccttgtcctcatccctaccacacatcagagctgagcatggcagctcacgcctgtaatcccagctacccgggaggctaaggcatgatgattccttgagcccaggaatttaaatccagcccaggcaaaatagaccccatctcaattttaaaaaaaaggaatgagcacacctaaaatgacaccccaagccatgcaactccccctgacacacacagggtatgtgaccaggagagtgagatagagagagtgggcatgaaggaggggcagagcaggggagaaagggtgcttggtgatgacagcctggtcctgctgccagcttttggtggtacacaccccatcttgggaaagagtcaccagtctgaccttgtgtccaggatcattatctgcactttcttgagagaatgcagactccatgtctacacaaggacttttgcattcttgagtggctggtctggttccaggggccagagtcacggtcacagctgcctatagaagtgaatttcgtgcagccagaccagacccagacatggtcttgttgaggcctgcactgtggggtctgttgcacaggcagccattgtgctctgagcaaattggttcctgtggggcccaacatatttaatgtccatgacttcacaaaggggtgccaggtatccttgcacagcaagaactaagaatagtgcaaggaggccgcaacagaaactggtaagaatacacacatgcaagcgattcttaactacattgtaatcagtaaatgaagataacgacaatattctcattagggtacttactggctgaaacaaaactaactttgtcaggccggtgcagtggctcacacccgtaatcccagcactttggggaggctgaggcaggaggatggcttgagcccaggagtttgagaccagcctgggcaacatagtgaaaccccatcgctaccaaaaaaaaaaaaaaaaaaaaccctggctttgtatgtgtcttggtaaagtagcaactggcttttatgatccccctacccccacaccctgtgtctaaaagggcacatgactgctacagcctcaaaacaaaagtacttgatctcagtccaatgttgaaaagagctcattctgcctggcacggtggctcacgcctgtaatgccagcactttgggaggccgaggtgggtggatcatgaggtcaggagattgagaccatcctggctaacacggtgaaaccccatctctactaaaaaaatacaaaaaattagccaggcgtcgtggtgggcgcctgtattcccagctactcgggaggctgaggcaggagaatggcgtgaacccgcgaggcggagcttgcagtgagccgagatcgcaccgctgcactccagcctgggcgacagagcgagactccgtctcaaaaaaaaaaaaaaaagagaaaagagctcattcttacttttgctcaccaagaaaaacctgggagacgagaagaccttgcaggcaattccttaactgtttaccctcatcacacttccttgtcagagcccagcttacctagcaagggtgcctgggaatcccctgtacttcaatccccttcctgttctgtctctgtcctgacttcatccagttgatagtggacaaaccctattgtagattgctgcctgaaccccagtcagcaagtcctgttttggcttaaatctaaggtcttgttggatgtgatggctcacgcccgtaatcccaacacagagactaagacagatcacttgaggtcaggagttcgagaccagcctgggcaacatgaaaccccatctctactaaaaatacaaaaatacaaaaaaatccccagcacatggggcacatgcctatattcccagctacttgggatgctgaggcaggaggatagcttgaacccgggaggcagaggttgcagtcagccaagattgtgccactgaactccactccagcctgggcgacagagtgaggactccgtctcaaaaa

SEQ ID NO: 368274 - DNA, 2367 bp, Homo sapiens
cttcttcgcgattgcacggattcagggacgctcagtggcgccgcgccgctccttggtttgacttttgtttttcagttgcgttccctgactcggagtcttagtgtgtcgttatttggacaagaggcacattgacccaatttggagacgtattttggaaggaggtgtgaaaaagacagcatgaactttaccccaacacacacccctgtctgcagaaagcgaacagttgtctccaaacgtggtgttgccgtcagtggtcccaccaagaggaggggaatggcagattcactggagtcaacccccttgccttcccccgaagatcgtctggccaaactccatccttctaaggagctcctggaatattatcaaaagaagatggctgagtgtgaggcagaaaatgaggacttgctgaagaaactggaactctacaaagaagcttgtgaaggacagcataaacttgaatgtgatttgcagcagagggaggaagagattgctgaattgcagaaagctctaagtgatatgcaggtctgcctcttccaggaacgggaacatgttttacgcctctactcagaaaatgaccgactgagaatcagggagctagaagacaagaaaaagattcagaatctcttggctcttgtgggaacagatgctggagaagtgacctatttttgtaaggagcctcctcacaaagtcaccattctccaaaagactatccaggctgtaggtgaatgtgagcagagtgaatcttcagctttcaaagcagatcctaaaataagcaaaagaagaccatcgagagagagaaaagaaagttctgagcattaccaaagagacatacagacactcatcctacaggtggaagcactgcaggctcagctgggagagcagaccaaactttctcgagaacaaattgaagggctcatcgaggacagacggattcaccttgaggaaatacaagttcagcaccagagaaatcagaacaaaatcaaagagctaaccaaaaatcttcaccacacccaagaactgctctatgagagcaccaaagattttctgcaactcagatctgaaaaccaaaataaagagaagtcatggatgcttgaaaaagataatttgatgtcaaagattaagcaatatagggtgcagtgtaagaagaaagaagataaaattggaaaagtgttgcccgttatgcatgagagtcaccatgctcaaagtgaatatattaagtccctaaaagataagttagtacaagagaaaaagctgtccaatatgtaccaagagcagtgcatttccttagaagaagaacttgcccgaattcgtgaggaagagggaatgaggagagagatcttcaaggatcgcactaacaagatggggaagcgtttacagataatgacaaaacgctatgaggcattggagcgtcgacgtatcctggaagtagaaggctttaagacagatattaaagttctccgacagaaactgaaagacttggagcaaatgttgtataaggcaacagttaatgcccgggcaaaccaggatcttgcccttctgtgtgaggtccgtgacagcaatagacgggcacataagatacaaggagaactgaagaatcttaagtcgaaagtgtttggtctggagaatgaacttagactctgttaatgtctacttttggaaatggcccccatttagaagaggtgtgcttcttgaaacctgaggacaaggtcatctgctgccagaaaatgtaaacctgagttgactagagtggtggtattcattattgtaaagacagcttgaagaatcggggaccactaggaaagcttttcttgcatactcagcttgctttatcatttttgctgtccttttaacatttgcgaggagtaggggcctggtcctgaatgacttggaggctttcattatttatcctgtctgtattgaccggtttttgttttttcagaaggcagtgatgatgaaaacttaggaagaaggtattttgcaataagcttggctgagtgtccatgggaagaatactttccctaaagagagagaagcactcacagaggctgcctttctcctgagctcggggagaaggcagcacatcacaacctgtcacattgaaataggcgctcattctgctatttcaccttccgtcctgagcagagcctgaattacgtttttgggcaatttcatggtgtttcaccagagggcgctagagactcaaacgaaatgtccatctggaaagattcgggagacactttgccgaggggatgaagctgagatgatgcttgtatggaaagtttgatatttttatcagtcacatggcttttgaaaaatgatgtatatattttaaattaactattttcaataaaatatttcactcaaaag

SEQ ID NO: 368275 - DNA, 676 bp, Homo sapiens
gagtaattgagtgatagagtacttttttccagcagacacagttctttagaatacaagtcgcctcaagagtcttcttaatgagatttagccagttagcctgtgttccagacaaggttagttgcagaaaagaggagacgcctgctttcattctgtgacaaacttaccagtagtgttgcgctttcattctgtgacaaacttaccagtagtgtcgcttatcctggcctctcttactcctctttcatggtgcattgatctctacctcaagcctcctttattgcatgggaaggattttcatgagatttctgccttaattctacattttccttctttagttagccactgaacaaaggatggaatttatcctatgtactcaaaatctcacaaaaaggagctagcatagctgtgtctttttgactgatatcgctcccctggcatatgccatcatcatttctttttttttttttttttcaaaccctttcatggtgtttcaccagagggcgctagagactcaaacgaaatgtccatctggaaagattcgggagacactttgccgaggggatgaagctgagatgatgcttgtatggaaagtttgatatttttatcagtcacatggcttttgaaaaatgatgtatatattttaaattaactattttcaataaaatatttcactcaaaag

SEQ ID NO: 368276 - DNA, 833 bp, Homo sapiens
cttcttcgcgattgcacggattcagggacgctcagtggcgccgcgccgctccttggtttgacttttgtttttcagttgcgttccctgactcggagtcttagtgtgtcgtaaggtctcactctgtcacctaggctggagagcagtggggcaatctcagctcagtgcagcctctgcctcccaagctcaagcaatcctctgcctcagcctcctgaatagctgggactacaggcacgtgccaccactcccagctaattcctgtctttactaaaaatacaaaaaaaattagccacagtggcaggtgcctgtaatcccagccactggggaggctgaggcaggagaatcacttgaacccaggaggtggaggttgcagtgagccaagatcgtgccactgcactccagcctgggctgaacagagtgagactctgtctcaaaaaataaataaataaataggtagttggcactatctaattaagaatacaagtgaaggagtaactattggatggaggaggatagaaacagaaaagagcaattgaatttattaatttggatgtctgctgaccaataagagcttggttagatgtcatagtagaagcccgaggcctggctcagtggctcatgcctgtaatctcagcactttggaaggccaagggaggaggattgtttgagtccgggagttcaaggccagcctgggcaacatagcaaggccccgtcttgcagccagagaggtgagtgtagacaacttttcgtagacatgtgcaacagtgaggacagtcactatgaaggagaagagggattgcaggttgttagaagggtctttcaaagcttcaaattac

SEQ ID NO: 368277 - DNA, 2433 bp, Homo sapiens
cttcttcgcgattgcacggattcagggacgctcagtggcgccgcgccgctccttggtttgacttttgtttttcagttgcgttccctgactcggagtcttagtgtgtcgttatttggacaagaggcacattgacccaatttggagacgtattttggaaggaggtgtgaaaaagacagcatgaactttaccccaacacacacccctgtctgcagaaagcgaacagttgtctccaaacgtggtgttgccgtcagtggtcccaccaagaggaggggaatggcagattcactggagtcaacccccttgccttcccccgaagatcgtctggccaaactccatccttctaaggagctcctggaatattatcaaaagaagatggctgagtgtgaggcagaaaatgaggacttgctgaagaaactggaactctacaaagaagcttgtgaaggacagcataaacttgaatgtgatttgcagcagagggaggaagagattgctgaattgcagaaagctctaagtgatatgcaggtctgcctcttccaggaacgggaacatgttttacgcctctactcagaaaatgaccgactgagaatcagggagctagaagacaagaaaaagattcagaatctcttggctcttgtgggaacagatgctggagaagtgacctatttttgtaaggagcctcctcacaaagtcaccattctccaaaagactatccaggctgtaggtgaatgtgagcagagtgaatcttcagctttcaaagcagatcctaaaataagcaaaagaagaccatcgagagagagaaaagaaagttctgagcattaccaaagagacatacagacactcatcctacaggtggaagcactgcaggctcagctgggagagcagaccaaactttctcgagaacaaattgaagggctcatcgaggacagacggattcaccttgaggaaatacaagttcagcaccagagaaatcagaacaaaatcaaagagctaaccaaaaacgggtcatagaactaaagggagccttgaaaagactgtcttcctcagaaacccccgcctctacgtagtcttcaccacacccaagaactgctctatgagagcaccaaagattttctgcaactcagatctgaaaaccaaaataaagagaagtcatggatgcttgaaaaagataatttgatgtcaaagattaagcaatatagggtgcagtgtaagaagaaagaagataaaattggaaaagtgttgcccgttatgcatgagagtcaccatgctcaaagtgaatatattaagtccctaaaagataagttagtacaagagaaaaagctgtccaatatgtaccaagagcagtgcatttccttagaagaagaacttgcccgaattcgtgaggaagagggaatgaggagagagatcttcaaggatcgcactaacaagatggggaagcgtttacagataatgacaaaacgctatgaggcattggagcgtcgacgtatcctggaagtagaaggctttaagacagatattaaagttctccgacagaaactgaaagacttggagcaaatgttgtataaggcaacagttaatgcccgggcaaaccaggatcttgcccttctgtgtgaggtccgtgacagcaatagacgggcacataagatacaaggagaactgaagaatcttaagtcgaaagtgtttggtctggagaatgaacttagactctgttaatgtctacttttggaaatggcccccatttagaagaggtgtgcttcttgaaacctgaggacaaggtcatctgctgccagaaaatgtaaacctgagttgactagagtggtggtattcattattgtaaagacagcttgaagaatcggggaccactaggaaagcttttcttgcatactcagcttgctttatcatttttgctgtccttttaacatttgcgaggagtaggggcctggtcctgaatgacttggaggctttcattatttatcctgtctgtattgaccggtttttgttttttcagaaggcagtgatgatgaaaacttaggaagaaggtattttgcaataagcttggctgagtgtccatgggaagaatactttccctaaagagagagaagcactcacagaggctgcctttctcctgagctcggggagaaggcagcacatcacaacctgtcacattgaaataggcgctcattctgctatttcaccttccgtcctgagcagagcctgaattacgtttttgggcaatttcatggtgtttcaccagagggcgctagagactcaaacgaaatgtccatctggaaagattcgggagacactttgccgaggggatgaagctgagatgatgcttgtatggaaagtttgatatttttatcagtcacatggcttttgaaaaatgatgtatatattttaaattaactattttcaataaaatatttcactcaaaag

SEQ ID NO: 368278 - DNA, 2313 bp, Homo sapiens
cttcttcgcgattgcacggattcagggacgctcagtggcgccgcgccgctccttggtttgacttttgtttttcagttgcgttccctgactcggagtcttagtgtgtcgttatttggacaagaggcacattgacccaatttggagacgtattttggaaggaggcgaacagttgtctccaaacgtggtgttgccgtcagtggtcccaccaagaggaggggaatggcagattcactggagtcaacccccttgccttcccccgaagatcgtctggccaaactccatccttctaaggagctcctggaatattatcaaaagaagatggctgagtgtgaggcagaaaatgaggacttgctgaagaaactggaactctacaaagaagcttgtgaaggacagcataaacttgaatgtgatttgcagcagagggaggaagagattgctgaattgcagaaagctctaagtgatatgcaggtctgcctcttccaggaacgggaacatgttttacgcctctactcagaaaatgaccgactgagaatcagggagctagaagacaagaaaaagattcagaatctcttggctcttgtgggaacagatgctggagaagtgacctatttttgtaaggagcctcctcacaaagtcaccattctccaaaagactatccaggctgtaggtgaatgtgagcagagtgaatcttcagctttcaaagcagatcctaaaataagcaaaagaagaccatcgagagagagaaaagaaagttctgagcattaccaaagagacatacagacactcatcctacaggtggaagcactgcaggctcagctgggagagcagaccaaactttctcgagaacaaattgaagggctcatcgaggacagacggattcaccttgaggaaatacaagttcagcaccagagaaatcagaacaaaatcaaagagctaaccaaaaatcttcaccacacccaagaactgctctatgagagcaccaaagattttctgcaactcagatctgaaaaccaaaataaagagaagtcatggatgcttgaaaaagataatttgatgtcaaagattaagcaatatagggtgcagtgtaagaagaaagaagataaaattggaaaagtgttgcccgttatgcatgagagtcaccatgctcaaagtgaatatattaagtccctaaaagataagttagtacaagagaaaaagctgtccaatatgtaccaagagcagtgcatttccttagaagaagaacttgcccgaattcgtgaggaagagggaatgaggagagagatcttcaaggatcgcactaacaagatggggaagcgtttacagataatgacaaaacgctatgaggcattggagcgtcgacgtatcctggaagtagaaggctttaagacagatattaaagttctccgacagaaactgaaagacttggagcaaatgttgtataaggcaacagttaatgcccgggcaaaccaggatcttgcccttctgtgtgaggtccgtgacagcaatagacgggcacataagatacaaggagaactgaagaatcttaagtcgaaagtgtttggtctggagaatgaacttagactctgttaatgtctacttttggaaatggcccccatttagaagaggtgtgcttcttgaaacctgaggacaaggtcatctgctgccagaaaatgtaaacctgagttgactagagtggtggtattcattattgtaaagacagcttgaagaatcggggaccactaggaaagcttttcttgcatactcagcttgctttatcatttttgctgtccttttaacatttgcgaggagtaggggcctggtcctgaatgacttggaggctttcattatttatcctgtctgtattgaccggtttttgttttttcagaaggcagtgatgatgaaaacttaggaagaaggtattttgcaataagcttggctgagtgtccatgggaagaatactttccctaaagagagagaagcactcacagaggctgcctttctcctgagctcggggagaaggcagcacatcacaacctgtcacattgaaataggcgctcattctgctatttcaccttccgtcctgagcagagcctgaattacgtttttgggcaatttcatggtgtttcaccagagggcgctagagactcaaacgaaatgtccatctggaaagattcgggagacactttgccgaggggatgaagctgagatgatgcttgtatggaaagtttgatatttttatcagtcacatggcttttgaaaaatgatgtatatattttaaattaactattttcaataaaatatttcactcaaaag

SEQ ID NO: 368279 - DNA, 2220 bp, Homo sapiens
tgtggctgtttgtctccttgcccgccaaagttctgcccagtccaacgactccacgcagctcgcccttggcgaacagttgtctccaaacgtggtgttgccgtcagtggtcccaccaagaggaggggaatggcagattcactggagtcaacccccttgccttcccccgaagatcgtctggccaaactccatccttctaaggagctcctggaatattatcaaaagaagatggctgagtgtgaggcagaaaatgaggacttgctgaagaaactggaactctacaaagaagcttgtgaaggacagcataaacttgaatgtgatttgcagcagagggaggaagagattgctgaattgcagaaagctctaagtgatatgcaggtctgcctcttccaggaacgggaacatgttttacgcctctactcagaaaatgaccgactgagaatcagggagctagaagacaagaaaaagattcagaatctcttggctcttgtgggaacagatgctggagaagtgacctatttttgtaaggagcctcctcacaaagtcaccattctccaaaagactatccaggctgtaggtgaatgtgagcagagtgaatcttcagctttcaaagcagatcctaaaataagcaaaagaagaccatcgagagagagaaaagaaagttctgagcattaccaaagagacatacagacactcatcctacaggtggaagcactgcaggctcagctgggagagcagaccaaactttctcgagaacaaattgaagggctcatcgaggacagacggattcaccttgaggaaatacaagttcagcaccagagaaatcagaacaaaatcaaagagctaaccaaaaatcttcaccacacccaagaactgctctatgagagcaccaaagattttctgcaactcagatctgaaaaccaaaataaagagaagtcatggatgcttgaaaaagataatttgatgtcaaagattaagcaatatagggtgcagtgtaagaagaaagaagataaaattggaaaagtgttgcccgttatgcatgagagtcaccatgctcaaagtgaatatattaagtccctaaaagataagttagtacaagagaaaaagctgtccaatatgtaccaagagcagtgcatttccttagaagaagaacttgcccgaattcgtgaggaagagggaatgaggagagagatcttcaaggatcgcactaacaagatggggaagcgtttacagataatgacaaaacgctatgaggcattggagcgtcgacgtatcctggaagtagaaggctttaagacagatattaaagttctccgacagaaactgaaagacttggagcaaatgttgtataaggcaacagttaatgcccgggcaaaccaggatcttgcccttctgtgtgaggtccgtgacagcaatagacgggcacataagatacaaggagaactgaagaatcttaagtcgaaagtgtttggtctggagaatgaacttagactctgttaatgtctacttttggaaatggcccccatttagaagaggtgtgcttcttgaaacctgaggacaaggtcatctgctgccagaaaatgtaaacctgagttgactagagtggtggtattcattattgtaaagacagcttgaagaatcggggaccactaggaaagcttttcttgcatactcagcttgctttatcatttttgctgtccttttaacatttgcgaggagtaggggcctggtcctgaatgacttggaggctttcattatttatcctgtctgtattgaccggtttttgttttttcagaaggcagtgatgatgaaaacttaggaagaaggtattttgcaataagcttggctgagtgtccatgggaagaatactttccctaaagagagagaagcactcacagaggctgcctttctcctgagctcggggagaaggcagcacatcacaacctgtcacattgaaataggcgctcattctgctatttcaccttccgtcctgagcagagcctgaattacgtttttgggcaatttcatggtgtttcaccagagggcgctagagactcaaacgaaatgtccatctggaaagattcgggagacactttgccgaggggatgaagctgagatgatgcttgtatggaaagtttgatatttttatcagtcacatggcttttgaaaaatgatgtatatattttaaattaactattttcaataaaatatttcactcaaaag

SEQ ID NO: 368280 - DNA, 2088 bp, Homo sapiens
cttcttcgcgattgcacggattcagggacgctcagtggcgccgcgccgctccttggtttgacttttgtttttcagttgcgttccctgactcggagtcttagtgtgtcgttatttggacaagaggcacattgacccaatttggagacgtattttggaaggaggtgtgaaaaagacagcatgaactttaccccaacacacacccctgtctgcagaaagcgaacagttgtctccaaacgtggtgttgccgtcagtggtcccaccaagaggaggggaatggcagattcactggagtcaacccccttgccttcccccgaagatcgtctggccaaactccatccttctaaggagctcctggaatattatcaaaagaagatggctgagtgtgaggcagaaaatgaggacttgctgaagaaactggaactctacaaagaagcttgtgaaggacagcataaacttgaatgtgatttgcagcagagggaggaagagattgctgaattgcagaaagctctaagtgatatgcaggtctgcctcttccaggaacgggaacatgttttacgcctctactcagaaaatgaccgactgagaatcagggagctagaagacaagaaaaagattcagaatctcttggctcttgtgggaacagatgctggagaagtgacctatttttgtaaggagcctcctcacaaagtcaccattctccaaaagactatccaggctgtaggtgaatgtgagcagagtgaatcttcagctttcaaagcagatcctaaaataagcaaaagaagaccatcgagagagagaaaagaaagttctgagcattaccaaagagacatacagacactcatcctacaggtggaagcactgcaggctcagctgggagagcagaccaaactttctcgagaacaaattgaagggctcatcgaggacagacggattcaccttgaggaaatacaagttcagcaccagagaaatcagaacaaaatcaaagagctaaccaaaaatcttcaccacacccaagaactgctctatgagagcaccaaagattttctgcaactcagatctgaaaaccaaaataaagagaagtcatggatgcttgaaaaagataatttgatgtcaaagattaagcaatatagggtgcagtgtaagaagaaagaagataaaattggaaaagtgttgcccgttatgcatgagagtcaccatgctcaaagtgaatatattaaggcaacagttaatgcccgggcaaaccaggatcttgcccttctgtgtgaggtccgtgacagcaatagacgggcacataagatacaaggagaactgaagaatcttaagtcgaaagtgtttggtctggagaatgaacttagactctgttaatgtctacttttggaaatggcccccatttagaagaggtgtgcttcttgaaacctgaggacaaggtcatctgctgccagaaaatgtaaacctgagttgactagagtggtggtattcattattgtaaagacagcttgaagaatcggggaccactaggaaagcttttcttgcatactcagcttgctttatcatttttgctgtccttttaacatttgcgaggagtaggggcctggtcctgaatgacttggaggctttcattatttatcctgtctgtattgaccggtttttgttttttcagaaggcagtgatgatgaaaacttaggaagaaggtattttgcaataagcttggctgagtgtccatgggaagaatactttccctaaagagagagaagcactcacagaggctgcctttctcctgagctcggggagaaggcagcacatcacaacctgtcacattgaaataggcgctcattctgctatttcaccttccgtcctgagcagagcctgaattacgtttttgggcaatttcatggtgtttcaccagagggcgctagagactcaaacgaaatgtccatctggaaagattcgggagacactttgccgaggggatgaagctgagatgatgcttgtatggaaagtttgatatttttatcagtcacatggcttttgaaaaatgatgtatatattttaaattaactattttcaataaaatatttcactcaaaag

SEQ ID NO: 368281 - DNA, 2072 bp, Homo sapiens
cttcttcgcgattgcacggattcagggacgctcagtggcgccgcgccgctccttggtttgacttttgtttttcagttgcgttccctgactcggagtcttagtgtgtcgcgaacagttgtctccaaacgtggtgttgccgtcagtggtcccaccaagaggaggggaatggcagattcactggagtcaacccccttgccttcccccgaagatcgtctggccaaactccatccttctaaggagctcctggaatattatcaaaagaagatggctgagtgtgaggcagaaaatgaggacttgctgaagaaactggaactctacaaagaagcttgtgaaggacagcataaacttgaatgtgatttgcagcagagggaggaagagattgctgaattgcagaaagctatcctaaaataagcaaaagaagaccatcgagagagagaaaagaaagttctgagcattaccaaagagacatacagacactcatcctacaggtggaagcactgcaggctcagctgggagagcagaccaaactttctcgagaacaaattgaagggctcatcgaggacagacggattcaccttgaggaaatacaagttcagcaccagagaaatcagaacaaaatcaaagagctaaccaaaaacgggtcatagaactaaagggagccttgaaaagactgtcttcctcagaaacccccgcctctacgtagtcttcaccacacccaagaactgctctatgagagcaccaaagattttctgcaactcagatctgaaaaccaaaataaagagaagtcatggatgcttgaaaaagataatttgatgtcaaagattaagcaatatagggtgcagtgtaagaagaaagaagataaaattggaaaagtgttgcccgttatgcatgagagtcaccatgctcaaagtgaatatattaagtccctaaaagataagttagtacaagagaaaaagctgtccaatatgtaccaagagcagtgcatttccttagaagaagaacttgcccgaattcgtgaggaagagggaatgaggagagagatcttcaaggatcgcactaacaagatggggaagcgtttacagataatgacaaaacgctatgaggcattggagcgtcgacgtatcctggaagtagaaggctttaagacagatattaaagttctccgacagaaactgaaagacttggagcaaatgttgtataaggcaacagttaatgcccgggcaaaccaggatcttgcccttctgtgtgaggtccgtgacagcaatagacgggcacataagatacaaggagaactgaagaatcttaagtcgaaagtgtttggtctggagaatgaacttagactctgttaatgtctacttttggaaatggcccccatttagaagaggtgtgcttcttgaaacctgaggacaaggtcatctgctgccagaaaatgtaaacctgagttgactagagtggtggtattcattattgtaaagacagcttgaagaatcggggaccactaggaaagcttttcttgcatactcagcttgctttatcatttttgctgtccttttaacatttgcgaggagtaggggcctggtcctgaatgacttggaggctttcattatttatcctgtctgtattgaccggtttttgttttttcagaaggcagtgatgatgaaaacttaggaagaaggtattttgcaataagcttggctgagtgtccatgggaagaatactttccctaaagagagagaagcactcacagaggctgcctttctcctgagctcggggagaaggcagcacatcacaacctgtcacattgaaataggcgctcattctgctatttcaccttccgtcctgagcagagcctgaattacgtttttgggcaatttcatggtgtttcaccagagggcgctagagactcaaacgaaatgtccatctggaaagattcgggagacactttgccgaggggatgaagctgagatgatgcttgtatggaaagtttgatatttttatcagtcacatggcttttgaaaaatgatgtatatattttaaattaactattttcaataaaatatttcactcaaaag

SEQ ID NO: 368282 - DNA, 1345 bp, Homo sapiens
gagtaattgagtgatagagtacttttttccagcagacacagttctttagaatacaagtcgcctcaagagtcttcttaatgagatttagccagttagcctgtgttccagacaaggttagttgcagaaaagaggagacgcctgctttcattctgtgacaaacttaccagtagtgttgcgctttcattctgtgacaaacttaccagtagtgtcgcttatcctggcctctcttactcctctttcatggtgcattgatctctacctcaagcctcctttattgcatgggaaggattttcatgagatttctgccttaattctacattttccttctttagttagccactgaacaaaggatggaatttatcctatgtactcaaaatctcacaaaaaggagctagcatagctgtgtctttttgactgatatcgctcccctggcatatgccatcatcatttctttttttttttttttttcaaacccgcaacagttaatgcccgggcaaaccaggatcttgcccttctgtgtgaggtccgtgacagcaatagacgggcacataagatacaaggagaactgaagaatcttaagtcgaaagtgtttggtctggagaatgaacttagactctgttaatgtctacttttggaaatggcccccatttagaagaggtgtgcttcttgaaacctgaggacaaggtcatctgctgccagaaaatgtaaacctgagttgactagagtggtggtattcattattgtaaagacagcttgaagaatcggggaccactaggaaagcttttcttgcatactcagcttgctttatcatttttgctgtccttttaacatttgcgaggagtaggggcctggtcctgaatgacttggaggctttcattatttatcctgtctgtattgaccggtttttgttttttcagaaggcagtgatgatgaaaacttaggaagaaggtattttgcaataagcttggctgagtgtccatgggaagaatactttccctaaagagagagaagcactcacagaggctgcctttctcctgagctcggggagaaggcagcacatcacaacctgtcacattgaaataggcgctcattctgctatttcaccttccgtcctgagcagagcctgaattacgtttttgggcaatttcatggtgtttcaccagagggcgctagagactcaaacgaaatgtccatctggaaagattcgggagacactttgccgaggggatgaagctgagatgatgcttgtatggaaagtttgatatttttatcagtcacatggcttttgaaaaatgatgtatatattttaaattaactattttcaataaaatatttcactcaaaag

SEQ ID NO: 368283 - DNA, 1577 bp, Homo sapiens
cttcttcgcgattgcacggattcagggacgctcagtggcgccgcgccgctccttggtttgacttttgtttttcagttgcgttccctgactcggagtcttagtgtgtcgttatttggacaagaggcacattgacccaatttggagacgtattttggaaggaggtgtgaaaaagacagcatgaactttaccccaacacacacccctgtctgcagaaagcgaacagttgtctccaaacgtggtgttgccgtcagtggtcccaccaagaggaggggaatggcagattcactggagtcaacccccttgccttcccccgaagatcgtctggccaaactccatccttctaaggagctcctggaatattatcaaaagaagatggctgagtgtgaggcagaaaatgaggacttgctgaagaaactggaactctacaaagaagcttgtgaaggacagcataaacttgaatgtgatttgcagcagagggaggaagagattgctgaattgcagaaagctctaagtgatatgcaggtctgcctcttccaggaacgggaacatgttttacgcctctactcagaaaatgaccgactgagaatcagggagctagaagacaagaaaaagattcagaatctcttggctcttgtgggaacagatgctggagaagtgacctatttttgtaaggagcctcctcacaaagtcaccattctccaaaagactatccaggctgtaggtgaatgtgagcagagtgaatcttcagctttcaaagcagatcctaaaataagcaaaagaagaccatcgagagagagaaaagaaagttctgagcattaccaaagagacatacagacactcatcctacaggtggaagcactgcaggctcagctgggagagcagaccaaactttctcgagaacaaattgaagggctcatcgaggacagacggattcaccttgaggaaatacaagttcagcaccagagaaatcagaacaaaatcaaagagctaaccaaaaatcttcaccacacccaagaactgctctatgagagcaccaaagattttctgcaactcagatctgaaaaccaaaataaagagaagtcatggatgcttgaaaaagataatttgatgtcaaagattaagcaatatagggtgcagtgtaagaagaaagaagataaaattggaaaagtgttgcccgttatgcatgagagtcaccatgctcaaagtgaatatattaaggtaatgtccttatgtcgtaacgaagttgtttatttttctgggagagttgaaggaattccaaagaacctacaatttgtaatgtaagatccattcagtccaggaagctctggtagcagctgcctcaagaactaggtttcaaagagcagctgatcgttgtagtatttggggattcaaaatattagacttgttgattcattcattcattcattcaacaaatatttattgtactcctggccgggcacagtggttcacgcctgtaatcccagcactttgggaggcctaggtgggcaaatcgtgaggtcaggagttcaagaccagcctggccaacatggtgaaaccccgtctctactaaaaataca

SEQ ID NO: 368284 - DNA, 378 bp, Homo sapiens
accagagaaatcagaacaaaatcaaagagctaaccaaaaagtgagtgtctaagaaagctgtacctaacgggtattgtatttttctgagtgacttaaaagttaacattttgtacttgaacaacagcgggtcatagaactaaagggagccttgaaaagactgtcttcctcagaaacccccgcctctacgtaggtgagtacctcgcttttccaggcgtgctgttgaagagctgatgagtatttcacgtgctccttttaatccattttggtgttttagcttgcttctggtggctaagaagtgttcttaggccgggtgcagtggctcacgcctgtaatcgctcctgcctgggtgacagagtgagaccctgtctcaaaaaaaaa

SEQ ID NO: 368285 - DNA, 302 bp, Homo sapiens
tgcactccagcctgggggacagagcaagaccttgtcttgaaatgaacaagaggattaggattgagatgtttttgtttgtgtttgttttttaatttttctggagaaaggctcacttttcctagaggtatgaagtaagtggaagtagggctggattcctcacccctttttggcctgtctaggtggaagcactgcaggctcagctgggagagcagaccaaactttctcgagaacaaattgaagggctcatcgaggacagacggattcaccttgaggaaatacaagttcagcaccagagaaatcag

SEQ ID NO: 368286 - DNA, 2259 bp, Homo sapiens
cttcttcgcgattgcacggattcagggacgctcagtggcgccgcgccgctccttggtttgacttttgtttttcagttgcgttccctgactcggagtcttagtgtgtcgcgaacagttgtctccaaacgtggtgttgccgtcagtggtcccaccaagaggaggggaatggcagattcactggagtcaacccccttgccttcccccgaagatcgtctggccaaactccatccttctaaggagctcctggaatattatcaaaagaagatggctgagtgtgaggcagaaaatgaggacttgctgaagaaactggaactctacaaagaagcttgtgaaggacagcataaacttgaatgtgatttgcagcagagggaggaagagattgctgaattgcagaaagctctaagtgatatgcaggtctgcctcttccaggaacgggaacatgttttacgcctctactcagaaaatgaccgactgagaatcagggagctagaagacaagaaaaagattcagaatctcttggctcttgtgggaacagatgctggagaagtgacctatttttgtaaggagcctcctcacaaagtcaccattctccaaaagactatccaggctgtaggtgaatgtgagcagagtgaatcttcagctttcaaagcagatcctaaaataagcaaaagaagaccatcgagagagagaaaagaaagttctgagcattaccaaagagacatacagacactcatcctacaggtggaagcactgcaggctcagctgggagagcagaccaaactttctcgagaacaaattgaagggctcatcgaggacagacggattcaccttgaggaaatacaagttcagcaccagagaaatcagaacaaaatcaaagagctaaccaaaaatcttcaccacacccaagaactgctctatgagagcaccaaagattttctgcaactcagatctgaaaaccaaaataaagagaagtcatggatgcttgaaaaagataatttgatgtcaaagattaagcaatatagggtgcagtgtaagaagaaagaagataaaattggaaaagtgttgcccgttatgcatgagagtcaccatgctcaaagtgaatatattaagtccctaaaagataagttagtacaagagaaaaagctgtccaatatgtaccaagagcagtgcatttccttagaagaagaacttgcccgaattcgtgaggaagagggaatgaggagagagatcttcaaggatcgcactaacaagatggggaagcgtttacagataatgacaaaacgctatgaggcattggagcgtcgacgtatcctggaagtagaaggctttaagacagatattaaagttctccgacagaaactgaaagacttggagcaaatgttgtataaggcaacagttaatgcccgggcaaaccaggatcttgcccttctgtgtgaggtccgtgacagcaatagacgggcacataagatacaaggagaactgaagaatcttaagtcgaaagtgtttggtctggagaatgaacttagactctgttaatgtctacttttggaaatggcccccatttagaagaggtgtgcttcttgaaacctgaggacaaggtcatctgctgccagaaaatgtaaacctgagttgactagagtggtggtattcattattgtaaagacagcttgaagaatcggggaccactaggaaagcttttcttgcatactcagcttgctttatcatttttgctgtccttttaacatttgcgaggagtaggggcctggtcctgaatgacttggaggctttcattatttatcctgtctgtattgaccggtttttgttttttcagaaggcagtgatgatgaaaacttaggaagaaggtattttgcaataagcttggctgagtgtccatgggaagaatactttccctaaagagagagaagcactcacagaggctgcctttctcctgagctcggggagaaggcagcacatcacaacctgtcacattgaaataggcgctcattctgctatttcaccttccgtcctgagcagagcctgaattacgtttttgggcaatttcatggtgtttcaccagagggcgctagagactcaaacgaaatgtccatctggaaagattcgggagacactttgccgaggggatgaagctgagatgatgcttgtatggaaagtttgatatttttatcagtcacatggcttttgaaaaatgatgtatatattttaaattaactattttcaataaaatatttcactcaaaag

SEQ ID NO: 368287 - DNA, 2313 bp, Homo sapiens
cttcttcgcgattgcacggattcagggacgctcagtggcgccgcgccgctccttggtttgacttttgtttttcagttgcgttccctgactcggagtcttagtgtgtcgtgtgaaaaagacagcatgaactttaccccaacacacacccctgtctgcagaaagcgaacagttgtctccaaacgtggtgttgccgtcagtggtcccaccaagaggaggggaatggcagattcactggagtcaacccccttgccttcccccgaagatcgtctggccaaactccatccttctaaggagctcctggaatattatcaaaagaagatggctgagtgtgaggcagaaaatgaggacttgctgaagaaactggaactctacaaagaagcttgtgaaggacagcataaacttgaatgtgatttgcagcagagggaggaagagattgctgaattgcagaaagctctaagtgatatgcaggtctgcctcttccaggaacgggaacatgttttacgcctctactcagaaaatgaccgactgagaatcagggagctagaagacaagaaaaagattcagaatctcttggctcttgtgggaacagatgctggagaagtgacctatttttgtaaggagcctcctcacaaagtcaccattctccaaaagactatccaggctgtaggtgaatgtgagcagagtgaatcttcagctttcaaagcagatcctaaaataagcaaaagaagaccatcgagagagagaaaagaaagttctgagcattaccaaagagacatacagacactcatcctacaggtggaagcactgcaggctcagctgggagagcagaccaaactttctcgagaacaaattgaagggctcatcgaggacagacggattcaccttgaggaaatacaagttcagcaccagagaaatcagaacaaaatcaaagagctaaccaaaaatcttcaccacacccaagaactgctctatgagagcaccaaagattttctgcaactcagatctgaaaaccaaaataaagagaagtcatggatgcttgaaaaagataatttgatgtcaaagattaagcaatatagggtgcagtgtaagaagaaagaagataaaattggaaaagtgttgcccgttatgcatgagagtcaccatgctcaaagtgaatatattaagtccctaaaagataagttagtacaagagaaaaagctgtccaatatgtaccaagagcagtgcatttccttagaagaagaacttgcccgaattcgtgaggaagagggaatgaggagagagatcttcaaggatcgcactaacaagatggggaagcgtttacagataatgacaaaacgctatgaggcattggagcgtcgacgtatcctggaagtagaaggctttaagacagatattaaagttctccgacagaaactgaaagacttggagcaaatgttgtataaggcaacagttaatgcccgggcaaaccaggatcttgcccttctgtgtgaggtccgtgacagcaatagacgggcacataagatacaaggagaactgaagaatcttaagtcgaaagtgtttggtctggagaatgaacttagactctgttaatgtctacttttggaaatggcccccatttagaagaggtgtgcttcttgaaacctgaggacaaggtcatctgctgccagaaaatgtaaacctgagttgactagagtggtggtattcattattgtaaagacagcttgaagaatcggggaccactaggaaagcttttcttgcatactcagcttgctttatcatttttgctgtccttttaacatttgcgaggagtaggggcctggtcctgaatgacttggaggctttcattatttatcctgtctgtattgaccggtttttgttttttcagaaggcagtgatgatgaaaacttaggaagaaggtattttgcaataagcttggctgagtgtccatgggaagaatactttccctaaagagagagaagcactcacagaggctgcctttctcctgagctcggggagaaggcagcacatcacaacctgtcacattgaaataggcgctcattctgctatttcaccttccgtcctgagcagagcctgaattacgtttttgggcaatttcatggtgtttcaccagagggcgctagagactcaaacgaaatgtccatctggaaagattcgggagacactttgccgaggggatgaagctgagatgatgcttgtatggaaagtttgatatttttatcagtcacatggcttttgaaaaatgatgtatatattttaaattaactattttcaataaaatatttcactcaaaag

SEQ ID NO: 368288 - DNA, 1590 bp, Homo sapiens
gtatttgaagggttgtgtgaaataagtaacatgatctgatttgggtttttaaaagatcattttaactgctcaatagggcatgtataataagcgttgttgttaatatttcttcctttttaaagaagaactttagaaatgtagcccaaaacatatattgtaatgtcttccttgggacagcttctgagctccgttatctgagtcttcccagagccaaaaatatttgttttaatttttactgtgtacactttagaaaaagggcttaagagactggtctagaagtagattttcagatgttcctcaaagttccttgtcatctggttccttaactcattttgtacctctggaaatcccttcttttctttctttctttgcctaaaagctacttgaattacctgaattgtagaactgagtgttaatgttttttgtccctttgacttgtagtccctaaaagataagttagtacaagagaaaaagctgtccaatatgtaccaagagcagtgcatttccttagaagaagaacttgcccgaattcgtgaggaagagggaatgaggagagagatcttcaaggatcgcactaacaagatggggaagcgtttacagataatgacaaaacgctatgaggcattggagcgtcgacgtatcctggaagtagaaggctttaagacagatattaaagttctccgacagaaactgaaagacttggagcaaatgttgtataaggcaacagttaatgcccgggcaaaccaggatcttgcccttctgtgtgaggtccgtgacagcaatagacgggcacataagatacaaggagaactgaagaatcttaagtcgaaagtgtttggtctggagaatgaacttagactctgttaatgtctacttttggaaatggcccccatttagaagaggtgtgcttcttgaaacctgaggacaaggtcatctgctgccagaaaatgtaaacctgagttgactagagtggtggtattcattattgtaaagacagcttgaagaatcggggaccactaggaaagcttttcttgcatactcagcttgctttatcatttttgctgtccttttaacatttgcgaggagtaggggcctggtcctgaatgacttggaggctttcattatttatcctgtctgtattgaccggtttttgttttttcagaaggcagtgatgatgaaaacttaggaagaaggtattttgcaataagcttggctgagtgtccatgggaagaatactttccctaaagagagagaagcactcacagaggctgcctttctcctgagctcggggagaaggcagcacatcacaacctgtcacattgaaataggcgctcattctgctatttcaccttccgtcctgagcagagcctgaattacgtttttgggcaatttcatggtgtttcaccagagggcgctagagactcaaacgaaatgtccatctggaaagattcgggagacactttgccgaggggatgaagctgagatgatgcttgtatggaaagtttgatatttttatcagtcacatggcttttgaaaaatgatgtatatattttaaattaactattttcaataaaatatttcactcaaaag

SEQ ID NO: 368289 - DNA, 2813 bp, Homo sapiens
cttcttcgcgattgcacggattcagggacgctcagtggcgccgcgccgctccttggtttgacttttgtttttcagttgcgttccctgactcggagtcttagtgtgtcgttatttggacaagaggcacattgacccaatttggagacgtattttggaaggaggtgtgaaaaagacagcatgaactttaccccaacacacacccctgtctgcagaaagcgaacagttgtctccaaacgtggtgttgccgtcagtggtcccaccaagaggaggggaatggcagattcactggagtcaacccccttgccttcccccgaagatcgtctggccaaactccatccttctaaggagctcctggaatattatcaaaagaagatggctgagtgtgaggcagaaaatgaggacttgctgaagaaactggaactctacaaagaagcttgtgaaggacagcataaacttgaatgtgatttgcagcagagggaggaagagattgctgaattgcagaaagctctaagtgatatgcaggtctgcctcttccaggaacgggaacatgttttacgcctctactcagaaaatgaccgactgagaatcagggagctagaagacaagaaaaagattcagaatctcttggctcttgtgggaacagatgctggagaagtgacctatttttgtaaggagcctcctcacaaagtcaccattctccaaaagactatccaggctgtaggtgaatgtgagcagagtgaatcttcagctttcaaagcagatcctaaaataagcaaaagaagaccatcgagagagagaaaagaaagttctgagcattaccaaagagacatacagacactcatcctacaggtggaagcactgcaggctcagctgggagagcagaccaaactttctcgagaacaaattgaagggctcatcgaggacagacggattcaccttgaggaaatacaagttcagcaccagagaaatcagaacaaaatcaaagagctaaccaaaaatcttcaccacacccaagaactgctctatgagagcaccaaagattttctgcaactcagatctgaaaaccaaaataaagagaagtcatggatgcttgaaaaagataatttgatgtcaaagattaagcaatatagggtgcagtgtaagaagaaagaagataaaattggaaaagtgttgcccgttatgcatgagagtcaccatgctcaaagtgaatatattaagtccctaaaagataagttagtacaagagaaaaagctgtccaatatgtaccaagagcagtgcatttccttagaagaagaacttgcccgaattcgtgaggaagagggaatgaggagagagatcttcaaggatcgcactaacaagatggggaagcgtttacagataatgacaaaacgctatgaggcattggagcgtcgacgtatcctggaagtagaaggctttaagacagatattaaagttctccgacagaaactgaaagacttggagcaaatgttgtataaggcaacagttaatgcccgggcaaaccaggatcttgcccttctgtgtgaggtccgtgacagcaatagacgggcacataagatacaaggagaactgaagaatcttaagtcgaaagtgtttggtctggagaatgaacttagactctgttaatgtctacttttggaaatggcccccatttagaagaggtgtgcttcttgaaacctgaggacaaggtcatctgctgccagaaaatgtaaacctgagttgactagagtggtggtattcattattgtaaagacagcttgaagaatcggggaccactaggaaagcttttcttgcatactcagcttgctttatcatttttgctgtccttttaacatttgcgaggagtaggggcctggtcctgaatgacttggaggctttcattatttatcctgtctgtattgaccggtttttgttttttcagaaggcagtgatgatgaaaacttaggaagaaggtattttgcaataagcttggctgagtgtccatgggaagaatactttccctaaagagagagaagcactcacagaggctgcctttctcctgagctcggggagaaggcagcacatcacaacctgtcacattgaaataggcgctcattctgctatttcaccttccgtcctgagcagagcctgaattacgtttttgggcaatttcatggtgtttcaccagagggcgctagagactcaaacgaaatgtccatctggaaagattcgggagacactttgccgaggggatgaagctgagatgatgcttgtatggaaagtttgatatttttatcagtcacatggcttttgaaaaatgatgtatatattttaaattaactattttcaataaaatatttcactcaaaagcaaaagaaaaaaaaaaaaaaaaaaaaaaaggaacaaagagagagaaagaaagaaaaaaagagggggggcgggaaacatgggagaaaagatacgaggacaggggggggccaaagagggggggtaacaccagatgaagacatgtgataacactggaggagaccccaaaaatgagaggggcagaaagaagaatagacaaagaaacaaacgggaccacaataaaacaacaacaaaagccgaaggaagcaacggagcggagaaacaaccaatgagagaacccagacggaaagcacatactagaaacaagagggagcaacatgaagaacaatagaagggagggagaacacacgaaatagggacgaacaccacgcaaaaggagaccaagaaaagagttcaaaaggagccacaaggggaacaaccatataaaacaacgggcaaacaagaagaca

SEQ ID NO: 368290 - DNA, 400 bp, Homo sapiens
ttgagggattattgggaaaattattgggaccactattggaacagttgacaaactgtcactgggggtgtgtagattaaatgtcagtatcgtataaatccatgttaatttcctggtagtgatgacagcactgtgattatataggagtgtgtccttggtgtttgggaattacatggtgaaatgtttaggataatggggcaacttactttcaaacggttccccaaaaattctagatagatagatagatagatagacagacaggcaggcagagtgagaaagaaagtgagaatggtaaaacaaatatatataatgttttgtggggagaatgaataggagttttttgtagtattcttacgacttttccataagtttgaaattatcaaaaataaaaaatgtttaaaac

SEQ ID NO: 368291 - DNA, 947 bp, Homo sapiens
atgaatgcagctttcttggtgtcttgatgtttgtgaatttctgtggagtttgatactgctccttttgctgcttgtttttccagagtccccttatcacttgacgtgctgttatattatgtttgatttattacagataccccatcagcctgagtctcttaaaggcctttatacacatatgtctacacatagggatttggatgatctcgggatcccacatcctcgctgtcccctgtccccccgcaacatcccccaccaatacctttctgaagttttctagtccctcctttttgtttgtgctccttaaagcccagccccatgcctgactttggttcccagtgagcattgtacatttgtggatattaaatctttggcaaagtcatttacctgggctggaatagggctcttggctgattctttttcctaaacacccacccaatgggagaggctgatactcaacatgcaaaccttgtgttttatttctccaggcgaagggatgttggaagacattctggaaggggtggggtgtgaagatttacaaataatctttgaatatctgcttcatgataggtcttggaggtgccttgtgggtgtggctttggggggatggttacgaggaaattgtggatattaaggaagtcaggaaaggaaaagatcagtcacaattcaacaattcagagaaagctcctaagggactttctggctgcttgatgcccagaggccaggccctcacttcgtattaaggctcaggactgtggatagagaatttaaaggggcaccaaaaaaaacattaaaatagataaacatatttttaatggaatacctttaaaaatgcaaatcaatgcacaaagaaaacgcccatgttgaacaaaatggtgacaattgtgccttctcttcaacaccaccccaccctccagaagtttccttcaagccgtacctgtaagagtaaa

SEQ ID NO: 368292 - DNA, 495 bp, Homo sapiens
gccctcccatttccggaagcctggcgcaaggttggtctgcaggtggcctccaggtgcaaagtgggaagtgtgagtcctccacatcccaggatgctgggggactgagtcctggtttctggcagactggtctctctctctctctttttctatctctaatctttccttgttcaggtttcttggagaatctctgggaaagaaaaaagaaaaactgttataaactctgtgtgaatggtgaatgaatgggggaggacaagggcttgcgcttgtcctccagtttgtagctccacggcgaaagctacggagttcaagtgggccctcacctgcggttccgtggcgacctcataaggcttaaggcagcatccggcatagctcgatccgagccgggggtttataccggcctgtcaatgctaagaggagcccaagtcccctaagggggagcggccaggcgggcatctgactgatcccatcacgggaccccctccccttgtttgtcta

SEQ ID NO: 368293 - DNA, 808 bp, Homo sapiens
gcacggcgggtatagtggttccgcaaccttgggatgttcggctgagcgcctgcctaacatgggagcgcctgcctaaccctcctgactggagggtcagcggcggggagtcctggccttcaatcggccatcgccacggcagaaactggggcccgggctgcgtccaggcccttccccgtccgtccacaggtctcatgggcgcccggactggggctgatgtagtttcccgacctctgacacataggatctggagattaaagctgctctgctaataattaggttcccacctctcaagatcattaggagcttcttttccaattcctctgttttgcatgcattggaaggaaaatggtgacgccgagggtgactgatttccaggtttacatcggttgccccaggggaagtgcctggcccccatctggtccttgctgctctaactttgccctgttaattgaagaaatgcagaatctggagctcaggaaccaccactctccccaacccattgcaggcttgaacatttgatggtggaaaccctgccctgagtttgtattatggtccagattttgaacaaatctcgctagagattgaacaggtaaggctcacctttcgatagttacaccaagaaacgcctagctgatgacttaagctatggttttgggcagcatgagagtggtcaggtggacagtagggaagtctatacaacccaaagggaaaagagaaaaggcccatgagaaatcagggcaaattgccacagtgtgtttttcttgatggtgtcactgaaatgtgggttaccttcccactgtgtccccca

SEQ ID NO: 368294 - DNA, 283 bp, Homo sapiens
tttcactctgtttataatttaggtggattttcacatctcaagccagctaagagtatgggaaataggactcgttaaagcacagatatcacacaagtgattcagattcacgagggtaatccagatgaaggtatatcattgtacctggcccgcatcactcagtaactgtcacctttgatttattgatttacttgagatggagtttggttctgggcaacaagagcaaaactccgtctcaaaatagataaataaaataaataataatctgtacatttatatttatgta

SEQ ID NO: 368295 - DNA, 1670 bp, Homo sapiens
gccctcccatttccggaagcctggcgcaaggttggtctgcaggtggcctccaggtgcaaagtgggaagtgtgagtcctcagtcttgggctattcggccacgtgcctgccggacatgggacgctggagggtcagcagcgtggagtcctggccttttgcgtccacgggtgggaaattggccattgccacggcgggaactgggactcaggctgccccccggccgtttctcatccgtccaccggactcgtgggcgctcgcactggcgctgatgtagtttcctgacctctgacccgtattgtctccagattaaaggtacgacatttggaggccccagcgagaaacgtcaccgggagaaacgtcaccgggcgagagccgggcccgctgtgtgctcccccggaaggacagccagcttgtaggggggagtgccacctgaaaaaaaaatttccaggtccccaaagggtgaccgtcttccggaggacagcggatcgactaccatgtgggtgcccacaaaaattccacctctgagtcctcaactgctgaccccggggtcagtagacacggggtttcaccatgttggccaggccggtcttgaactcgtgacgtcaggtgatgcacccgccttggcctcccaaagtgctgggattacaggtccagattttgaacaaatctcgctagagattgaacagagctgcgcctggatcccgccacagtgaggagacctgaagaccagagaaaacacagcaagcccctggatcctcctggaatccccgatccctcttgctccctggcagagttttctagtccctcttacttgaagcatgtctttcagagcccggcaccacccatcttgagtatctgataccccatcagcctgagtctcttaaaggcctttatacacatatgtctacacatagggatttggatgatctcgggatcccacatcctcgctgtcccctgtccccccgcaacatcccccaccaatacctttctgaagttttctagtccctcctttttgtttgtgctccttaaagcccagccccatgcctgactttggttcccagtgagcattgtacatttgtggatattaaatctttggcaaagtcatttacctgggctggaatagggctcttggctgattctttttcctaaacacccacccaatgggagaggctgatactcaacatgcaaaccttgtgttttatttctccaggcgaagggatgttggaagacattctggaaggggtggggtgtgaagatttacaaataatctttgaatatctgcttcatgataggtcttggaggtgccttgtgggtgtggctttggggggatggttacgaggaaattgtggatattaaggaagtcaggaaaggaaaagatcagtcacaattcaacaattcagagaaagctcctaagggactttctggctgcttgatgcccagaggccaggccctcacttcgtattaaggctcaggactgtggatagagaatttaaaggggcaccaaaaaaaacattaaaatagataaacatatttttaatggaatacctttaaaaatgcaaatcaatgcacaaagaaaacgcccatgttgaacaaaatggtgacaattgtgccttctcttcaacaccaccccaccctccagaagtttccttcaagccgtacctgtaagagtaaa

SEQ ID NO: 368296 - DNA, 1794 bp, Homo sapiens
gccctcccatttccggaagcctggcgcaaggttggtctgcaggtggcctccaggtgcaaagtgggaagtgtgagtcctcagtcttgggctattcggccacgtgcctgccggacatgggacgctggagggtcagcagcgtggagtcctggccttttgcgtccacgggtgggaaattggccattgccacggcgggaactgggactcaggctgccccccggccgtttctcatccgtccaccggactcgtgggcgctcgcactggcgctgatgtagtttcctgacctctgacccgtattgtctccagattaaaggtacgacatttggaggccccagcgagaaacgtcaccgggagaaacgtcaccgggcgagagccgggcccgctgtgtgctcccccggaaggacagccagcttgtaggggggagtgccacctgaaaaaaaaatttccaggtccccaaagggtgaccgtcttccggaggacagcggatcgactaccatgtgggtgcccacaaaaattccacctctgagtcctcaactgctgaccccggggtcagtagacacggggtttcaccatgttggccaggccggtcttgaactcgtgacgtcaggtgatgcacccgccttggcctcccaaagtgctgggattacaggtccagattttgaacaaatctcgctagagattgaacagagctgcgcctggatcccgccacagtgaggagacctgaagaccagagaaaacacagcaaacggagtcttgctctgttgtccaggctggagtgtagtgtggcgatctcggctccctgcaagaatctgcctcccggattcacgccattttcccacctcagcccctggagtagctggaagtgcaggctcccgccaccacgcctggctaattttgttttgtatttttggtagagacggggtttcactgtgttaggtaggatggtctcgatctcctgacctcatgatccatccgccttggcctctcaaagtgctgggattacaggcatgagccaccgcacctggctgttttttcatttctattatgatttgttctgtggaatgtcagtgacttagcggtgtttttcacatgtttataaagctgaatagttctgtatgtcagctcagcacccctagtgtcagtcatgctactctcctgctgtgcatagatgggggcctgtccacacccaaatctcctgggttcccgctgtccgcacctgaaggtacccaccagatgtgtctgtcactgccctccatccacctttcttgtggttctcatgtttctgcctccctagagaccatttctctctacagcagtagtttccaatagaaatacaatgccagacacatacgtcattttagattttctagtagtcactttagaaaagtgaaaaagaggccagctgcagtggctcacacctgtaatcccagcactttggaaggctgaggtgggtggatcacgaggtcaggagatcgagaccatcctggccaacatggtgaaaccccctctctactaaaaatacaaaaaattagctgggcgtggtggcaggcgcctgtggtcccagctactcgagaggctgaggcaggagaatggcgtgaacccggtgggcagagcttgcagtgagccgagatagcgccactgcactccagcctgggcgacagagggagactccatctcaaaaaaaaaaaaaaggttacaaagaaacaggtgaaattagttttatttcacctaaaatgttagcattatccaaaatatcacttcaacatcttatcaaaataaaaattattaatgagaaaa

SEQ ID NO: 368297 - DNA, 1117 bp, Homo sapiens
gccctcccatttccggaagcctggcgcaaggttggtctgcaggtggcctccaggtgcaaagtgggaagtgtgagtcctcagtcttgggctattcggccacgtgcctgccggacatgggacgctggagggtcagcagcgtggagtcctggccttttgcgtccacgggtgggaaattggccattgccacggcgggaactgggactcaggctgccccccggccgtttctcatccgtccaccggactcgtgggcgctcgcactggcgctgatgtagtttcctgacctctgacccgtattgtctccagattaaaggtacgacatttggaggccccagcgagaaacgtcaccgggagaaacgtcaccgggcgagagccgggcccgctgtgtgctcccccggaaggacagccagcttgtaggggggagtgccacctgaaaaaaaaatttccaggtccccaaagggtgaccgtcttccggaggacagcggatcgactaccatgtgggtgcccacaaaaattccacctctgagtcctcaactgctgaccccggggtcagtagacacggggtttcaccatgttggccaggccggtcttgaactcgtgacgtcaggtgatgcacccgccttggcctcccaaagtgctgggattacaggtccagattttgaacaaatctcgctagagattgaacagagctgcgcctggatcccgccacagtgaggagacctgaagaccagagaaaacacagcaagcccctggatcctcctggaatccccgatccctcttgctccctggcagagttttctagtccctcttacttgaagcatgtctttcagagcccggcaccacccatcttgagtatctggtggattttcacatctcaagccagctaagagtatgggaaataggactcgttaaagcacagatatcacacaagtgattcagattcacgagggtaatccagatgaaggtatatcattgtacctggcccgcatcactcagtaactgtcacctttgatttattgatttacttgagatggagtttggttctgggcaacaagagcaaaactccgtctcaaaatagataaataaaataaataataatctgtacatttatatttatgta

SEQ ID NO: 368298 - DNA, 1025 bp, Homo sapiens
gccctcccatttccggaagcctggcgcaaggttggtctgcaggtggcctccaggtgcaaagtgggaagtgtgagtcctcagtcttgggctattcggccacgtgcctgccggacatgggacgctggagggtcagcagcgtggagtcctggccttttgcgtccacgggtgggaaattggccattgccacggcgggaactgggactcaggctgccccccggccgtttctcatccgtccaccggactcgtgggcgctcgcactggcgctgatgtagtttcctgacctctgacccgtattgtctccagattaaaggtacgacatttggaggccccagcgagaaacgtcaccgggagaaacgtcaccgggcgagagccgggcccgctgtgtgctcccccggaaggacagccagcttgtaggggggagtgccacctgaaaaaaaaatttccaggtccccaaagggtgaccgtcttccggaggacagcggatcgactaccatgtgggtgcccacaaaaattccacctctgagtcctcaactgctgaccccggggtcagtagacacggggtttcaccatgttggccaggccggtcttgaactcgtgacgtcaggtgatgcacccgccttggcctcccaaagtgctgggattacaggtccagattttgaacaaatctcgctagagattgaacagagctgcgcctggatcccgccacagtgaggagacctgaagaccagagaaaacacagcaagcccctggatcctcctggaatccccgatccctcttgctccctggcagagttttctagtccctcttacttgaagcatgtctttcagagcccggcaccacccatcttgagtatctgctacacctctatggtatttttttcacctcatatcataccttcctccctcactggacttcagtgtgggacctgcaggtctcaggccttctgggaagtcccagcttttcttgaatgttttctctctctggccagctcaggctggagcagtgggtgttggtgccatcctgtg

SEQ ID NO: 368299 - DNA, 1953 bp, Homo sapiens
gccctcccatttccggaagcctggcgcaaggttggtctgcaggtggcctccaggtgcaaagtgggaagtgtgagtcctcagtcttgggctattcggccacgtgcctgccggacatgggacgctggagggtcagcagcgtggagtcctggccttttgcgtccacgggtgggaaattggccattgccacggcgggaactgggactcaggctgccccccggccgtttctcatccgtccaccggactcgtgggcgctcgcactggcgctgatgtagtttcctgacctctgacccgtattgtctccagattaaaggtacgacatttggaggccccagcgagaaacgtcaccgggagaaacgtcaccgggcgagagccgggcccgctgtgtgctcccccggaaggacagccagcttgtaggggggagtgccacctgaaaaaaaaatttccaggtccccaaagggtgaccgtcttccggaggacagcggatcgactaccatgtgggtgcccacaaaaattccacctctgagtcctcaactgctgaccccggggtcagagtctcactctgtttcccaggctggagttctgtggcaccgtgttggctcactgcaacctccgtctcctgggttcaagcaattctcttgcctcagcctccagagtagctgggattacaggtgcccaccaccacacccggctaatttttttatatttttagtagacacggggtttcaccatgttggccaggccggtcttgaactcgtgacgtcaggtgatgcacccgccttggcctcccaaagtgctgggattacaggtccagattttgaacaaatctcgctagagattgaacagagctgcgcctggatcccgccacagtgaggagacctgaagaccagagaaaacacagcaaacggagtcttgctctgttgtccaggctggagtgtagtgtggcgatctcggctccctgcaagaatctgcctcccggattcacgccattttcccacctcagcccctggagtagctggaagtgcaggctcccgccaccacgcctggctaattttgttttgtatttttggtagagacggggtttcactgtgttaggtaggatggtctcgatctcctgacctcatgatccatccgccttggcctctcaaagtgctgggattacaggcatgagccaccgcacctggctgttttttcatttctattatgatttgttctgtggaatgtcagtgacttagcggtgtttttcacatgtttataaagctgaatagttctgtatgtcagctcagcacccctagtgtcagtcatgctactctcctgctgtgcatagatgggggcctgtccacacccaaatctcctgggttcccgctgtccgcacctgaaggtacccaccagatgtgtctgtcactgccctccatccacctttcttgtggttctcatgtttctgcctccctagagaccatttctctctacagcagtagtttccaatagaaatacaatgccagacacatacgtcattttagattttctagtagtcactttagaaaagtgaaaaagaggccagctgcagtggctcacacctgtaatcccagcactttggaaggctgaggtgggtggatcacgaggtcaggagatcgagaccatcctggccaacatggtgaaaccccctctctactaaaaatacaaaaaattagctgggcgtggtggcaggcgcctgtggtcccagctactcgagaggctgaggcaggagaatggcgtgaacccggtgggcagagcttgcagtgagccgagatagcgccactgcactccagcctgggcgacagagggagactccatctcaaaaaaaaaaaaaaggttacaaagaaacaggtgaaattagttttatttcacctaaaatgttagcattatccaaaatatcacttcaacatcttatcaaaataaaaattattaatgagaaaa

SEQ ID NO: 368300 - DNA, 790 bp, Homo sapiens
gccctcccatttccggaagcctggcgcaaggttggtctgcaggtggcctccaggtgcaaagtgggaagtgtgagtcctcagtcttgggctattcggccacgtgcctgccggacatgggacgctggagggtcagcagcgtggagtcctggccttttgcgtccacgggtgggaaattggccattgccacggcgggaactgggactcaggctgccccccggccgtttctcatccgtccaccggactcgtgggcgctcgcactggcgctgatgtagtttcctgacctctgacccgtattgtctccagattaaaggtacgacatttggaggccccagcgagaaacgtcaccgggagaaacgtcaccgggcgagagccgggcccgctgtgtgctcccccggaaggacagccagcttgtaggggggagtgccacctgaaaaaaaaatttccaggtccccaaagggtgaccgtcttccggaggacagcggatcgactaccatgtgggtgcccacaaaaattccacctctgagtcctcaactgctgaccccggggtcaggaaaggtggatgccaccgtgttcacagacagtagcagcttcctcgagaagggactacgaaaggccggtgcagctgttaccatggagacagatgtgttgtgggctcaggctttaccagcaaacacctcagcacaaaaggctgaattgatcgccctcactcaggctctccgatggggtaaggatattaacgttaacactgacagcaggtacgcctttgctactgtgcatgtacgtggagcca

SEQ ID NO: 368301 - DNA, 2087 bp, Homo sapiens
ggaccacctgaggtgaggggttcaaaaccagcctggccaacatggcaaaaccccatctctgctaaaaatacaaaattagctgggcatggtggcgcatgcctgtaatcccagctacttgggaggctgagggaggagaattgtttgaacctgggaggtggaggttgcagtgagccaaaatcacgccattgcactccagcctgggcaacaagagcaagactccatctcaaaaacaaacaaacaaacaaagggtggaaaagagggattccagagtgccaggcacacagattttctggaaggtttacatgaggactgctgtggtttgaatgtgttccccaaagttcatgtgttggaaactcaacccctaatgcaacagtgttgaccagtggaacctttaagaggtgattaggtcatgaaggctctgccctcatgaatggatgaagctagagtgggttagttatcttgggagggggttcctgataaaaggatgaggttggcttccttccctttctctttccccctcccccctctcacatgtggtcactctcttgcccttccaccttccaccataggacggcacagcgagaccttcaccagatgcaggcccctcactttcccagtgttcagaaccgtaaaccaagtgaactctgcttataaatcacccagtctgtggtattctgttatagcaacacaaacggactaagagagggacactcagtgggctcttctacttgatggagcactccctgcgtggtgccttgtatttgtagacatgatgctgtaaatgctctttgaatgtcttgaaggcttttatgtttgaggagtttacagagaagcacctacaggcttcaggtcccttcttctgttgcttctttgctccttagttcctcccctaacctggtgctaaattagatcatagtgtggtccttggaccaacagtatcaatagcacctgaaaatcatgctggaaatacagattcacaggctgctccctagaatactgaagaagaaactctaggagtgagacccaacaatctgtatttaacaagtccccaggtgagtctgatgcacacagaaatgtgagctgctgtattagatggtgttgagttcatgccaccgaatcactgacacacacgtctgctcactgcttgctctttgcacaggcccctggatcctcctggaatccccgatccctcttgctccctggcagagttttctagtccctcttacttgaagcatgtctttcagagcccggcaccacccatcttgagtatctgataccccatcagcctgagtctcttaaaggcctttatacacatatgtctacacatagggatttggatgatctcgggatcccacatcctcgctgtcccctgtccccccgcaacatcccccaccaatacctttctgaagttttctagtccctcctttttgtttgtgctccttaaagcccagccccatgcctgactttggttcccagtgagcattgtacatttgtggatattaaatctttggcaaagtcatttacctgggctggaatagggctcttggctgattctttttcctaaacacccacccaatgggagaggctgatactcaacatgcaaaccttgtgttttatttctccaggcgaagggatgttggaagacattctggaaggggtggggtgtgaagatttacaaataatctttgaatatctgcttcatgataggtcttggaggtgccttgtgggtgtggctttggggggatggttacgaggaaattgtggatattaaggaagtcaggaaaggaaaagatcagtcacaattcaacaattcagagaaagctcctaagggactttctggctgcttgatgcccagaggccaggccctcacttcgtattaaggctcaggactgtggatagagaatttaaaggggcaccaaaaaaaacattaaaatagataaacatatttttaatggaatacctttaaaaatgcaaatcaatgcacaaagaaaacgcccatgttgaacaaaatggtgacaattgtgccttctcttcaacaccaccccaccctccagaagtttccttcaagccgtacctgtaagagtaaa

SEQ ID NO: 368302 - DNA, 1390 bp, Homo sapiens
gccctcccatttccggaagcctggcgcaaggtacgacatttggaggccccagcgagaaacgtcaccgggagaaacgtcaccgggcgagagccgggcccgctgtgtgctcccccggaaggacagccagcttgtaggggggagtgccacctgaaaaaaaaatttccaggtccccaaagggtgaccgtcttccggaggacagcggatcgactaccatgtgggtgcccacaaaaattccacctctgagtcctcaactgctgaccccggggtcagtagacacggggtttcaccatgttggccaggccggtcttgaactcgtgacgtcaggtgatgcacccgccttggcctcccaaagtgctgggattacaggtccagattttgaacaaatctcgctagagattgaacagagctgcgcctggatcccgccacagtgaggagacctgaagaccagagaaaacacagcaagcccctggatcctcctggaatccccgatccctcttgctccctggcagagttttctagtccctcttacttgaagcatgtctttcagagcccggcaccacccatcttgagtatctgataccccatcagcctgagtctcttaaaggcctttatacacatatgtctacacatagggatttggatgatctcgggatcccacatcctcgctgtcccctgtccccccgcaacatcccccaccaatacctttctgaagttttctagtccctcctttttgtttgtgctccttaaagcccagccccatgcctgactttggttcccagtgagcattgtacatttgtggatattaaatctttggcaaagtcatttacctgggctggaatagggctcttggctgattctttttcctaaacacccacccaatgggagaggctgatactcaacatgcaaaccttgtgttttatttctccaggcgaagggatgttggaagacattctggaaggggtggggtgtgaagatttacaaataatctttgaatatctgcttcatgataggtcttggaggtgccttgtgggtgtggctttggggggatggttacgaggaaattgtggatattaaggaagtcaggaaaggaaaagatcagtcacaattcaacaattcagagaaagctcctaagggactttctggctgcttgatgcccagaggccaggccctcacttcgtattaaggctcaggactgtggatagagaatttaaaggggcaccaaaaaaaacattaaaatagataaacatatttttaatggaatacctttaaaaatgcaaatcaatgcacaaagaaaacgcccatgttgaacaaaatggtgacaattgtgccttctcttcaacaccaccccaccctccagaagtttccttcaagccgtacctgtaagagtaaa

SEQ ID NO: 368303 - DNA, 794 bp, Homo sapiens
gccctcccatttccggaagcctggcgcaaggttggtctgcaggtggcctccaggtgcaaagtgggaagtgtgagtcctcagtcttgggctattcggccacgtgcctgccggacatgggacgctggagggtcagcagcgtggagtcctggccttttgcgtccacgggtgggaaattggccattgccacggcgggaactgggactcaggctgccccccggccgtttctcatccgtccaccggactcgtgggcgctcgcactggcgctgatgtagtttcctgacctctgacccgtattgtctccagattaaaggtacgacatttggaggccccagcgagaaacgtcaccgggagaaacgtcaccgggcgagagccgggcccgctgtgtgctcccccggaaggacagccagcttgtaggggggagtgccacctgaaaaaaaaatttccaggtccccaaagggtgaccgtcttccggaggacagcggatcgactaccatgtgggtgcccacaaaaattccacctctgagtcctcaactgctgaccccggggtcaggtccagattttgaacaaatctcgctagagattgaacagagctgcgcctggatcccgccacagtgaggagacctgaagaccagagaaaacacagcaacctgggcgacagagggagactccatctcaaaaaaaaaaaaaaggttacaaagaaacaggtgaaattagttttatttcacctaaaatgttagcattatccaaaatatcacttcaacatcttatcaaaataaaaattattaatgagaaaa

SEQ ID NO: 368304 - DNA, 1870 bp, Homo sapiens
ggaccacctgaggtgaggggttcaaaaccagcctggccaacatggcaaaaccccatctctgctaaaaatacaaaattagctgggcatggtggcgcatgcctgtaatcccagctacttgggaggctgagggaggagaattgtttgaacctgggaggtggaggttgcagtgagccaaaatcacgccattgcactccagcctgggcaacaagagcaagactccatctcaaaaacaaacaaacaaacaaagggtggaaaagagggattccagagtgccaggcacacagattttctggaaggtttacatgaggactgctgtggtttgaatgtgttccccaaagttcatgtgttggaaactcaacccctaatgcaacagtgttgaccagtggaacctttaagaggtgattaggtcatgaaggctctgccctcatgaatggatgaagctagagtgggttagttatcttgggagggggttcctgataaaaggatgaggttggcttccttccctttctctttccccctcccccctctcacatgtggtcactctcttgcccttccaccttccaccataggacggcacagcgagaccttcaccagatgcaggcccctcactttcccagtgttcagaaccgtaaaccaagtgaactctgcttataaatcacccagtctgtggtattctgttatagcaacacaaacggactaagagagggacactcagtgggctcttctacttgatggagcactccctgcgtggtgccttgtatttgtagacatgatgctgtaaatgctctttgaatgtcttgaaggcttttatgtttgaggagtttacagagaagcacctacaggcttcaggtcccttcttctgttgcttctttgctccttagttcctcccctaacctggtgctaaattagatcatagtgtggtccttggaccaacagtatcaatagcacctgaaaatcatgctggaaatacagattcacaggctgctccctagaatactgaagaagaaactctaggagtgagacccaacaatctgtatttaacaagtccccaggtgagtctgatgcacacagaaatgtgagctgctgtattagatggtgttgagttcatgccaccgaatcactgacacacacgtctgctcactgcttgctctttgcacaggcccctggatcctcctggaatccccgatccctcttgctccctggcagagttttctagtccctcttacttgaagcatgtctttcagagcccggcaccacccatcttgagtatctggtgagttctgtggtctgcatgtccatgtttgggacattctgggaagggtggcccaggctgtgatttgccatctactgcaggctatggatggtattcagaagggaggggagatgctgtgtgcgtgttctgaagggtttcccactaaacagatcaaccctctccataactatttgatttttactttatctcctcgttgacttcacagtgtcagtgcagtttgtgtaaacatctctatggggtgatgcatgcagataaatgtttatgtgaacatataaagtctgcatgtgtgggtgaacactccacatcaggtcattgtccatcattacatatctgtggtgtctggctcattcgtctcgttttctgtcattttacctacttttacctgaagtacaatgactatttaataactattaaatgtttcatttcaactacacctctatggtatttttttcacctcatatcataccttcctccctcactggacttcagtgtgggacctgcaggtctcaggccttctgggaagtcccagcttttcttgaatgttttctctctctggccagctcaggctggagcagtgggtgttggtgccatcctgtg

SEQ ID NO: 368305 - DNA, 1215 bp, Homo sapiens
gcacggcgggtatagtggttccgcaaccttgggatgttcggctgagcgcctgcctaacatgggagcgcctgcctaaccctcctgactggagggtcagcggcggggagtcctggccttcaatcggccatcgccacggcagaaactggggcccgggctgcgtccaggcccttccccgtccgtccacaggtctcatgggcgcccggactggggctgatgtagtttcccgacctctgacacataggatctggagattaaagctgctctgctaataattaggttcccacctctcaagatcattaggagcttcttttccaattcctctgttttgcatgcattggaaggtggattttcacatctcaagccagctaagagtatgggaaataggactcgttaaagcacagataccccatcagcctgagtctcttaaaggcctttatacacatatgtctacacatagggatttggatgatctcgggatcccacatcctcgctgtcccctgtccccccgcaacatcccccaccaatacctttctgaagttttctagtccctcctttttgtttgtgctccttaaagcccagccccatgcctgactttggttcccagtgagcattgtacatttgtggatattaaatctttggcaaagtcatttacctgggctggaatagggctcttggctgattctttttcctaaacacccacccaatgggagaggctgatactcaacatgcaaaccttgtgttttatttctccaggcgaagggatgttggaagacattctggaaggggtggggtgtgaagatttacaaataatctttgaatatctgcttcatgataggtcttggaggtgccttgtgggtgtggctttggggggatggttacgaggaaattgtggatattaaggaagtcaggaaaggaaaagatcagtcacaattcaacaattcagagaaagctcctaagggactttctggctgcttgatgcccagaggccaggccctcacttcgtattaaggctcaggactgtggatagagaatttaaaggggcaccaaaaaaaacattaaaatagataaacatatttttaatggaatacctttaaaaatgcaaatcaatgcacaaagaaaacgcccatgttgaacaaaatggtgacaattgtgccttctcttcaacaccaccccaccctccagaagtttccttcaagccgtacctgtaagagtaaa

SEQ ID NO: 368306 - DNA, 1155 bp, Homo sapiens
gcacggcgggtatagtggttccgcaaccttgggatgttcggctgagcgcctgcctaacatgggagcgcctgcctaaccctcctgactggagggtcagcggcggggagtcctggccttcaatcggccatcgccacggcagaaactggggcccgggctgcgtccaggcccttccccgtccgtccacaggtctcatgggcgcccggactggggctgatgtagtttcccgacctctgacacataggatctggagattaaagctgctctgctaataattaggttcccacctctcaagatcattaggagcttcttttccaattcctctgttttgcatgcattggaagataccccatcagcctgagtctcttaaaggcctttatacacatatgtctacacatagggatttggatgatctcgggatcccacatcctcgctgtcccctgtccccccgcaacatcccccaccaatacctttctgaagttttctagtccctcctttttgtttgtgctccttaaagcccagccccatgcctgactttggttcccagtgagcattgtacatttgtggatattaaatctttggcaaagtcatttacctgggctggaatagggctcttggctgattctttttcctaaacacccacccaatgggagaggctgatactcaacatgcaaaccttgtgttttatttctccaggcgaagggatgttggaagacattctggaaggggtggggtgtgaagatttacaaataatctttgaatatctgcttcatgataggtcttggaggtgccttgtgggtgtggctttggggggatggttacgaggaaattgtggatattaaggaagtcaggaaaggaaaagatcagtcacaattcaacaattcagagaaagctcctaagggactttctggctgcttgatgcccagaggccaggccctcacttcgtattaaggctcaggactgtggatagagaatttaaaggggcaccaaaaaaaacattaaaatagataaacatatttttaatggaatacctttaaaaatgcaaatcaatgcacaaagaaaacgcccatgttgaacaaaatggtgacaattgtgccttctcttcaacaccaccccaccctccagaagtttccttcaagccgtacctgtaagagtaaa

SEQ ID NO: 368307 - DNA, 759 bp, Homo sapiens
gccctcccatttccggaagcctggcgcaaggttggtctgcaggtggcctccaggtgcaaagtgggaagtgtgagtccgtacgacatttggaggccccagcgagaaacgtcaccgggagaaacgtcaccgggcgagagccgggcccgctgtgtgctcccccggaaggacagccagcttgtaggggggagtgccacctgaaaaaaaaatttccaggtccccaaagggtgaccgtcttccggaggacagcggatcgactaccatgtgggtgcccacaaaaattccacctctgagtcctcaactgctgaccccggggtcagtagacacggggtttcaccatgttggccaggccggtcttgaactcgtgacgtcaggtgatgcacccgccttggcctcccaaagtgctgggattacaggtccagattttgaacaaatctcgctagagattgaacagagctgcgcctggatcccgccacagtgaggagacctgaagaccagagaaaacacagcaaacggagtcttgctctgttgtccaggctggagtgtagtgtggcgatctcggctccctgcaagaatctgcctcccggattcacgccattttcccacctcagcccctggagtagctggaagtgcaggctcccgccaccacgcctggctaattttgttttgtatttttggtagagacggggtttcactgtagtcccagcactttgagagtccaaggcgggcgcatcacctgaggtcaggggttcgagaccatcc

SEQ ID NO: 368308 - DNA, 563 bp, Homo sapiens
tcatatgtaatttacagagcaaatacctaccagaatggataacttgagagatgtggaaagtgagtttctttgcgcttatctagtgagggtgatttttagtcaataagcatttggtatatgcctgggaatccaacagctgctatttagattcagagccagcctttatttatcagctttctgatgctgaacccatcagtgaacttctctgtatatttgattcatcataaggaaaatggtgacgccgagggtgactgatttccaggtttacatcggttgccccaggggaagtgcctggcccccatctggtccttgctgctctaactttgccctgttaattgaagaaatgcaggtataaacacttcctgggttgttgctggcatttattgtcctcacagtttacagagaagcccatattttcagcctcttcctctgctttctgtcatttctgaaccatctcacccgacctggtgtaattttcattgtgtgtgagtttgcacagatgtaatttgggcctacatgtgtccaaagcctaatgcccacctcccacctccactaggatctgg

SEQ ID NO: 368309 - DNA, 745 bp, Homo sapiens
tcactcccgcatcaaaaaggccaacggagcccaactagaaacatgggtccccaggctgggtcaggccccttaaaactgcacctaagttgggtgaagccattagattaattctttttcttaattttgtaaaacaatgcatagcttctgtcaaacttatgtatcttaagactcaatataacccccttgttataactgaggaatcaatgatttgattccccaaaaacacaagtggggaatgtagtgtccaacctggtttttactaaccctgtttttagactctccctttcctttaatcactcagccttgtttccacctgaattgactctcccttagctaagagcgccagatggactccatcttggctctttcactggcagccgcttcctcaaggacttaacttgtgcaagctgactcccagcacatccaagaatgcaattaactgataagatactgtggcaagctatatccgcagttcccaggaattcgtccaattgattacacccaaaagccccgcgtctatcaccttgtaataatcttaaagcccctgcacctggaactattaacgttcctgtaaccatttatccttttaacttttttgcctactttatttctgtaaaattgttttaactagaccccccctctcctttctaaaccaaagtataaaagcaaatctagccccttcttcaggccgagagaatttcgagcgttagccgtctcttggccaccagctaaataaacggattct

SEQ ID NO: 368310 - DNA, 702 bp, Homo sapiens
gacagagtcttgctctgttgcccaggctggagtgcagtggcgcgatctcggctccctgcaagaatctgcctcccagattcacgccattttcccacctcagcccctggagtagctggaagtacaggctcccgccaccacgcccggctaatttttttatatttttagtagacacggggtttcaccatgttggccaggccggtcttgaactcgtgacgtcaggtgatgcacccgccttggcctcccaaagtgctgggattacaggtgggtgcctggccaaggggctgatatttcttaagggctttccccaagaaggaaaaagccaaacctactcaggcaaatcttgtttatttattcttctaggtccagattttgaacaaatctcgctagagattgaacagagctgcgcctggatcccgccacagtgaggagacctgaagaccagagaaaacacagcaaagtaggccctttaaactactcacctgtgttgtcttctaatttattctgttttattttgtttccatcattttaaggggttaaaatcatcttgttcagacctcagcatataaaatgacccatctgtagacctcaggctccaaccataccccaagagttgtctggttttgtttaaattactgccaggtttcagctgcagatatccctggaaggaatattccagattccctgagtagtttccaggttaaa

SEQ ID NO: 368311 - DNA, 1035 bp, Homo sapiens
gccctcccatttccggaagcctggcgcaaggttggtctgcaggtggcctccaggtgcaaagtgggaagtgtgagtcctcagtcttgggctattcggccacgtgcctgccggacatgggacgctggagggtcagcagcgtggagtcctggccttttgcgtccacgggtgggaaattggccattgccacggcgggaactgggactcaggctgccccccggccgtttctcatccgtccaccggactcgtgggcgctcgcactggcgctgatgtagtttcctgacctctgacccgtattgtctccagattaaaggtacgacatttggaggccccagcgagaaacgtcaccgggagaaacgtcaccgggcgagagccgggcccgctgtgtgctcccccggaaggacagccagcttgtaggggggagtgccacctgaaaaaaaaatttccaggtccccaaagggtgaccgtcttccggaggacagcggatcgactaccatgtgggtgcccacaaaaattccacctctgagtcctcaactgctgaccccggggtcagttccagagagaaggactccctcctgcttggaagagacctcacaccgtcatcacgatgccaacggctctgaaggtggatggcattcctgcgtggattcatcactcccgcatcaaaaaggccaacggagcccaactagaaacatgggtccccaggctgggtcaggccccttaaaactgcacctaagttgggtgaagccattagattaattctttttcttaattttgtaaaacaatgcatagcttctgtcaaacttatgtatcttaagactcaatataacccccttgttataactgaggaatcaatgattgttcccaaaccagtgggatgtttgcacgggttactaaccggttaacttccttcttataacacatgtcacctgatggtcctaataaagcgaagacaccggttaagggagccagaaatggggccacaccagatggaaggggttcgccggcgcacggctttatccgggtctctttttgccc

SEQ ID NO: 368312 - DNA, 1110 bp, Homo sapiens
gccctcccatttccggaagcctggcgcaaggttggtctgcaggtggcctccaggtgcaaagtgggaagtgtgagtcctcagtcttgggctattcggccacgtgcctgccggacatgggacgctggagggtcagcagcgtggagtcctggccttttgcgtccacgggtgggaaattggccattgccacggcgggaactgggactcaggctgccccccggccgtttctcatccgtccaccggactcgtgggcgctcgcactggcgctgatgtagtttcctgacctctgacccgtattgtctccagattaaaggtacgacatttggaggccccagcgagaaacgtcaccgggagaaacgtcaccgggcgagagccgggcccgctgtgtgctcccccggaaggacagccagcttgtaggggggagtgccacctgaaaaaaaaatttccaggtccccaaagggtgaccgtcttccggaggacagcggatcgactaccatgtgggtgcccacaaaaattccacctctgagtcctcaactgctgaccccggggtcagtagacacggggtttcaccatgttggccaggccggtcttgaactcgtgacgtcaggtgatgcacccgccttggcctcccaaagtgctgggattacaggtccagattttgaacaaatctcgctagagattgaacagagctgcgcctggatcccgccacagtgaggagacctgaagaccagagaaaacacagcaaacggagtcttgctctgttgtccaggctggagtgtagtgtggcgatctcggctccctgcaagaatctgcctccccccctctctactaaaaatacaaaaaattagctgggcgtggtggcaggcgcctgtggtcccagctactcgagaggctgaggcaggagaatggcgtgaacccggtgggcagagcttgcagtgagccgagatagcgccactgcactccagcctgggcgacagagggagactccatctcaaaaaaaaaaaaaaggttacaaagaaacaggtgaaattagttttatttcacctaaaatgttagcattatccaaaatatcacttcaacatcttatcaaaataaaaattattaatgagaaaa

SEQ ID NO: 368313 - DNA, 1453 bp, Homo sapiens
gccctcccatttccggaagcctggcgcaaggttggtctgcaggtggcctccaggtgcaaagtgggaagtgtgagtcctcagtcttgggctattcggccacgtgcctgccggacatgggacgctggagggtcagcagcgtggagtcctggccttttgcgtccacgggtgggaaattggccattgccacggcgggaactgggactcaggctgccccccggccgtttctcatccgtccaccggactcgtgggcgctcgcactggcgctgatgtagtttcctgacctctgacccgtattgtctccagattaaaggtacgacatttggaggccccagcgagaaacgtcaccgggagaaacgtcaccgggcgagagccgggcccgctgtgtgctcccccggaaggacagccagcttgtaggggggagtgccacctgaaaaaaaaatttccaggtccccaaagggtgaccgtcttccggaggacagcggatcgactaccatgtgggtgcccacaaaaattccacctctgagtcctcaactgctgaccccggggtcagtagacacggggtttcaccatgttggccaggccggtcttgaactcgtgacgtcaggtgatgcacccgccttggcctcccaaagtgctgggattacaggtccagattttgaacaaatctcgctagagattgaacagagctgcgcctggatcccgccacagtgaggagacctgaagaccagagaaaacacagcaagcccctggatcctcctggaatccccgatccctcttgctccctggcagagttttctagtccctcttacttgaagcatgtctttcagagcccggcaccacccatcttgagtatctggtgagttctgtggtctgcatgtccatgtttgggacattctgggaagggtggcccaggctgtgatttgccatctactgcaggctatggatggtattcagaagggaggggagatgctgtgtgcgtgttctgaagggtttcccactaaacagatcaaccctctccataactatttgatttttactttatctcctcgttgacttcacagtgtcagtgcagtttgtgtaaacatctctatggggtgatgcatgcagataaatgtttatgtgaacatataaagtctgcatgtgtgggtgaacactccacatcaggtcattgtccatcattacatatctgtggtgtctggctcattcgtctcgttttctgtcattttacctacttttacctgaagtacaatgactatttaataactattaaatgtttcatttcaactacacctctatggtatttttttcacctcatatcataccttcctccctcactggacttcagtgtgggacctgcaggtctcaggccttctgggaagtcccagcttttcttgaatgttttctctctctggccagctcaggctggagcagtgggtgttggtgccatcctgtg

SEQ ID NO: 368314 - DNA, 1159 bp, Homo sapiens
gccctcccatttccggaagcctggcgcaaggttggtctgcaggtggcctccaggtgcaaagtgggaagtgtgagtcctcagtcttgggctattcggccacgtgcctgccggacatgggacgctggagggtcagcagcgtggagtcctggccttttgcgtccacgggtgggaaattggccattgccacggcgggaactgggactcaggctgccccccggccgtttctcatccgtccaccggactcgtgggcgctcgcactggcgctgatgtagtttcctgacctctgacccgtattgtctccagattaaaggtacgacatttggaggccccagcgagaaacgtcaccgggagaaacgtcaccgggcgagagccgggcccgctgtgtgctcccccggaaggacagccagcttgtaggggggagtgccacctgaaaaaaaaatttccaggtccccaaagggtgaccgtcttccggaggacagcggatcgactaccatgtgggtgcccacaaaaattccacctctgagtcctcaactgctgaccccggggtcagtctccccaacaggtacaagatatcatcctgccacttgttcgaggaacccatcccaatccaattcctgaacagacagggccctgccattcattcccgccaggtgacctgttgtttgttaaaacagttccagagagaaggactccctcctgcttggaagagacctcacaccgtcatcacgatgccaacggctctgaaggtggatggcattcctgcgtggattcatcactcccgcatcaaaaaggccaacggagcccaactagaaacatgggtccccaggctgggtcaggccccttaaaactgcacctaagttgggtgaagccattagattaattctttttcttaattttgtaaaacaatgcatagcttctgtcaaacttatgtatcttaagactcaatataacccccttgttataactgaggaatcaatgattgttcccaaaccagtgggatgtttgcacgggttactaaccggttaacttccttcttataacacatgtcacctgatggtcctaataaagcgaagacaccggttaagggagccagaaatggggccacaccagatggaaggggttcgccggcgcacggctttatccgggtctctttttgccc

SEQ ID NO: 368315 - DNA, 845 bp, Homo sapiens
gccctcccatttccggaagcctggcgcaaggttggtctgcaggtggcctccaggtgcaaagtgggaagtgtgagtcctcagtcttgggctattcggccacgtgcctgccggacatgggacgctggagggtcagcagcgtggagtcctggccttttgcgtccacgggtgggaaattggccattgccacggcgggaactgggactcaggctgccccccggccgtttctcatccgtccaccggactcgtgggcgctcgcactggcgctgatgtagtttcctgacctctgacccgtattgtctccagattaaaggtacgacatttggaggccccagcgagaaacgtcaccgggagaaacgtcaccgggcgagagccgggcccgctgtgtgctcccccggaaggacagccagcttgtaggggggagtgccacctgaaaaaaaaatttccaggtccccaaagggtgaccgtcttccggaggacagcggatcgactaccatgtgggtgcccacaaaaattccacctctgagtcctcaactgctgaccccggggtcaggaactgttggaaactactgaaactggccgacctgatcttcaaaatgtgcccctaggaaaggtggatgccaccgtgttcacagacagtagcagcttcctcgagaagggactacgaaaggccggtgcagctgttaccatggagacagatgtgttgtgggctcaggctttaccagcaaacacctcagcacaaaaggctgaattgatcgccctcactcaggctctccgatggggtaaggatattaacgttaacactgacagcaggtacgcctttgctactgtgcatgtacgtggagcca

SEQ ID NO: 368316 - DNA, 1384 bp, Homo sapiens
gacagagtcttgctctgttgcccaggctggagtgcagtggcgcgatctcggctccctgcaagaatctgcctcccagattcacgccattttcccacctcagcccctggagtagctggaagtacaggctcccgccaccacgcccggctaatttttttatatttttagtagacacggggtttcaccatgttggccaggccggtcttgaactcgtgacgtcaggtgatgcacccgccttggcctcccaaagtgctgggattacaggtgggtgcctggccaaggggctgatatttcttaagggctttccccaagaaggaaaaagccaaacctactcaggcaaatcttgtttatttattcttctaggtccagattttgaacaaatctcgctagagattgaacagagctgcgcctggatcccgccacagtgaggagacctgaagaccagagaaaacacagcaagcccctggatcctcctggaatccccgatccctcttgctccctggcagagttttctagtccctcttacttgaagcatgtctttcagagcccggcaccacccatcttgagtatctgataccccatcagcctgagtctcttaaaggcctttatacacatatgtctacacatagggatttggatgatctcgggatcccacatcctcgctgtcccctgtccccccgcaacatcccccaccaatacctttctgaagttttctagtccctcctttttgtttgtgctccttaaagcccagccccatgcctgactttggttcccagtgagcattgtacatttgtggatattaaatctttggcaaagtcatttacctgggctggaatagggctcttggctgattctttttcctaaacacccacccaatgggagaggctgatactcaacatgcaaaccttgtgttttatttctccaggcgaagggatgttggaagacattctggaaggggtggggtgtgaagatttacaaataatctttgaatatctgcttcatgataggtcttggaggtgccttgtgggtgtggctttggggggatggttacgaggaaattgtggatattaaggaagtcaggaaaggaaaagatcagtcacaattcaacaattcagagaaagctcctaagggactttctggctgcttgatgcccagaggccaggccctcacttcgtattaaggctcaggactgtggatagagaatttaaaggggcaccaaaaaaaacattaaaatagataaacatatttttaatggaatacctttaaaaatgcaaatcaatgcacaaagaaaacgcccatgttgaacaaaatggtgacaattgtgccttctcttcaacaccaccccaccctccagaagtttccttcaagccgtacctgtaagagtaaa

SEQ ID NO: 368317 - DNA, 478 bp, Homo sapiens
ctatacacataaagtagtttcagaattgttagcctatatccctgtgggaaacactttctatgaaatagattacagcatttatgtacagttctttttatctttaggcatagagtatctaagcaagataatgtttcccacagttactgtttgtattcccttttaggcactctccccctaaatcttagttacttttgtttgtttatattttaggtatgtgaaacataatggatctaagagtcagagttacacaaaaagatatactcagagcagagaaatgcaaattaaaaccccaatgagatatcacctcatgcccattaggatggctactgttaaataaataaatagataaataactgaaaataaaaggtgttggcaaggatgtgaagatatagagaaattggaacccttgtacactgttggtgagattgtaaaatgatgtaactactgtggaaaacagcatggaggttcctaaaaaaat

SEQ ID NO: 368318 - DNA, 4664 bp, Homo sapiens
  misc_feature (3)..(5): n is a, c, g, or t
  misc_feature (7)..(7): n is a, c, g, or t
ggnnnangctccggctgggacagggcggcgggaggcccagggagaacggggaagggacatttagtttggtgagttacgggggcacaccttagctcagaacctgtttttacccagtaccctagggctttggttctttgtcgccgtccccgttggagttttttctttgcctttcagaagcccgtgcactctctttagagtgcagggctgacgggcggtccagccctggccaagtcatggagcgtgaatctcccaagtcagtgttcccgctgaggagggtcggaaccggggaggacgccctcccacccctgctgacctactaacattcatcagcgagccttctttttccccctcgcagagacggtgctgagataggatcatgaaggaagaggtgaagggaattcctgtaagagtggcgctgcgttgtcgccctctggtccccaaagagattagcgagggctgccagatgtgcctttccttcgtgcccggagagcctcaggtggtggttggtacagataaatccttcacctacgattttgtatttgatccctctactgaacaggaagaagtcttcaatacagcagtagcgccactcataaaaggtgtatttaaaggatataatgcaacggtcctggcctatgggcagactggctctggaaaaacctattcaatgggaggtgcatatactgcagagcaagagaatgaaccaacagttggggttattcctagggtaatacaactgctcttcaaagaaattgataaaaagagtgactttgaatttactctgaaagtgtcttacttagagatttacaatgaagaaattttggatcttctatgcccatctcgtgagaaagctcaaataaatatacgagaggatcctaaggaaggcataaagattgtgggactcactgagaagactgttttggttgccttggatactgtttcctgtttggaacagggcaacaactctaggactgtggcctccacggctatgaactcccagtcgtcccgatctcatgccatctttacaatctccttagagcaaagaaagaaaagtgacaagaatagcagctttcgctccaagctgcatcttgtagacctcgctggatcagaaagacagaagaaaaccaaggctgaaggggatcgtctaaaagagggtattaatattaaccgaggcctcctatgcttgggaaatgtaatcagtgctcttggagatgacaaaaagggtggctttgtgccctacagagattccaagttgactcgactgcttcaagattctctaggaggtaatagccatactcttatgatagcctgtgtgagtcctgctgactccaatctagaggaaacattaaatacccttcgctatgctgacagagcaagaaaaatcaagaacaaacctattgttaatattgatccccagacagctgaacttaatcatctaaagcaacaggtacaacagctacaagtcttgttgctacaggcccatggaggtaccctgcctggatctataactgtggaaccatcagagaatctacaatccctgatggagaagaatcagtccctggtagaggagaatgaaaaattaagtcgtggtctgagcgaggcagctggtcagacagcccagatgttggagaggatcattttgacagagcaagcgaatgaaaaaatgaacgccaagctagaagagctcaggcagcatgcggcctgcaaactggatcttcaaaagctagtggagactttggaagaccaggaattgaaagaaaatgtagagataatttgtaacctgcagcaattgattacccagttatcggatgaaactgttgcttgcatggctgcagccattgatactgcggtggagcaagaagcccaagtagaaaccagtccagagacgagcaggtcttctgacgcttttaccactcagcatgctctccgtcaagcgcagatgtctaaggagctggttgagttgaataaagcgcttgcactgaaagaggccctggctaggaagatgactcagaatgacagccaactgcagcccattcagtaccaataccaggataacataaaagagctagaattagaagtcatcaatctgcaaaaggaaaaggaagaattggttcttgaacttcagacagcaaagaaggatgccaaccaagccaagttgagtgagcgccgccgcaaacgtctccaggagctggagggtcaaattgctgatctgaagaagaaactgaatgagcagtccaaacttctgaaactaaaggaatccacagagcgtactgtctccaaactgaaccaggagatacggatgatgaaaaaccagcgggtacagttaatgcgtcaaatgaaagaagatgctgagaagtttagacagtggaagcagaaaaaagacaaagaagtaatacagttaaaagaacgagaccgtaagaggcaatatgagctgctgaaacttgaaagaaacttccagaaacaatccaatgtgctcagacgtaaaacggaggaggcagcagctgccaacaagcgtctcaaggatgctctccagaaacaacgggaggttgcagataagcggaaagagactcagagccgtggaatggaaggcactgcagctcgagtgaagaattggcttggaaacgaaattgaggttatggtcagtactgaggaagccaaacgccatctgaatgacctccttgaagatagaaagatcctggctcaagatgtggctcaactcaaagaaaaaaaggaatctggggagaatccacctcctaaactccggaggcgtacattctcccttactgaagtgcgtggtcaagtttcggagtcagaagattctattacaaagcagattgaaagcctagagactgaaatggaattcaggagtgctcagattgctgacctacagcagaagctgctggatgcagaaagtgaagacagaccaaaacaacgctgggagaatattgccaccattctggaagccaagtgtgccctgaaatatttgattggagagctggtctcctccaaaatacaggtcagcaaacttgaaagcagcctgaaacagagcaagaccagctgtgctgacatgcagaagatgctgtttgaggaacgaaatcattttgccgagatagagacagagttacaagctgagctggtcagaatggagcaacagcaccaagagaaggtgctgtaccttctcagccagctgcagcaaagccaaatggcagagaagcagttagaggaatcagtcagtgaaaaggaacagcagctgctgagcacactgaagtgtcaggatgaagaacttgagaaaatgcgagaagtgtgtgagcaaaatcagcagcttctccgagagaatgaaatcatcaagcagaaactgaccctcctccaggtagccagcagacagaaacatcttcctaaggatacccttctatctccagactcttcttttgaatatgtcccacctaagccaaaaccttctcgtgttaaagaaaagttcctggagcaaagcatggacatcgaggatctaaaatattgttcagagcattctgtgaatgagcatgaggatggtgatggtgatgatgatgagggggatgacgaggaatggaagccaacaaaattagttaaggtgtccaggaagaacatccaagggtgttcctgcaagggctggtgtggaaacaagcagtgtgggtgcaggaagcaaaagtcagactgtggtgtggactgttgctgtgaccccacaaagtgtcggaaccgccagcaaggcaaggatagcttgggcactgttgaacggacccaggattccgaaggctccttcaaactggaggatcctaccgaggtgaccccaggattgagcttctttaatcccgtctgtgccacccccaatagcaagatcctgaaagagatgtgcgatgtggagcaggtgctgtcaaagaagactcccccagctccctccccttttgacctcccagagttgaaacatgtagcaacagaataccaagaaaacaaggctccagggaagaaaaagaaacgggctctggccagcaacaccagcttcttctctggctgctcccctatcgaagaagaggcccactgaagttggagtcatcatctctacccccagtctggcttgggagatgctttcaggttgcagccagaaggggttttttaaatgacttctctggatttcaggtttcttgctgttgaaaaaaggaacaaagcgttactgaaaagaaggtaacctttgttggatgtgggccttagcctccaggtccagactactactctatgttctccagaagggtgctaagtcacctactgaagagagaaccaactgactttcctattgactcatcaggaaccagtcctcagtctggtcaagttgtttcttatttgtgagcagttcaggctatctcctgatggggatgaggccaaggctttcttatcttttggttgtctctgcttaatggaggagcctggcctaggatggaggcctggcttagatctttcattccacctcaggaatgaggttgtgatctttcctgtcctgaccctctctgaattatgtttcaatagtactcttgattgtctgccatgttgttgaagcaaatgaattatttttaaatgttaagtaagtaaataaaccttagcccgtctttttttttttttttttttttttttttttt

SEQ ID NO: 368319 - DNA, 4347 bp, Homo sapiens
  misc_feature (3)..(5): n is a, c, g, or t
  misc_feature (7)..(7): n is a, c, g, or t
ggnnnangctccggctgggacagggcggcgggaggcccagggagaacggggaagggacatttagtttgagacggtgctgagataggatcatgaaggaagaggtgaagggaattcctgtaagagtggcgctgcgttgtcgccctctggtccccaaagagattagcgagggctgccagatgtgcctttccttcgtgcccggagagcctcaggtggtggttggtacagataaatccttcacctacgattttgtatttgatccctctactgaacaggaagaagtcttcaatacagcagtagcgccactcataaaaggtgtatttaaaggatataatgcaacggtcctggcctatgggcagactggctctggaaaaacctattcaatgggaggtgcatatactgcagagcaagagaatgaaccaacagttggggttattcctagggtaatacaactgctcttcaaagaaattgataaaaagagtgactttgaatttactctgaaagtgtcttacttagagatttacaatgaagaaattttggatcttctatgcccatctcgtgagaaagctcaaataaatatacgagaggatcctaaggaaggcataaagattgtgggactcactgagaagactgttttggttgccttggatactgtttcctgtttggaacagggcaacaactctaggactgtggcctccacggctatgaactcccagtcgtcccgatctcatgccatctttacaatctccttagagcaaagaaagaaaagtgacaagaatagcagctttcgctccaagctgcatcttgtagacctcgctggatcagaaagacagaagaaaaccaaggctgaaggggatcgtctaaaagagggtattaatattaaccgaggcctcctatgcttgggaaatgtaatcagtgctcttggagatgacaaaaagggtggctttgtgccctacagagattccaagttgactcgactgcttcaagattctctaggaggtaatagccatactcttatgatagcctgtgtgagtcctgctgactccaatctagaggaaacattaaatacccttcgctatgctgacagagcaagaaaaatcaagaacaaacctattgttaatattgatccccagacagctgaacttaatcatctaaagcaacaggtacaacagctacaagtcttgttgctacaggcccatggaggtaccctgcctggatctataactgtggaaccatcagagaatctacaatccctgatggagaagaatcagtccctggtagaggagaatgaaaaattaagtcgtggtctgagcgaggcagctggtcagacagcccagatgttggagaggatcattttgacagagcaagcgaatgaaaaaatgaacgccaagctagaagagctcaggcagcatgcggcctgcaaactggatcttcaaaagctagtggagactttggaagaccaggaattgaaagaaaatgtagagataatttgtaacctgcagcaattgattacccagttatcggatgaaactgttgcttgcatggctgcagccattgatactgcggtggagcaagaagcccaagtagaaaccagtccagagacgagcaggtcttctgacgcttttaccactcagcatgctctccgtcaagcgcagatgtctaaggagctggttgagttgaataaagcgcttgcactgaaagaggccctggctaggaagatgactcagaatgacagccaactgcagcccattcagtaccaataccaggataacataaaagagctagaattagaagtcatcaatctgcaaaaggaaaaggaagaattggttcttgaacttcagacagcaaagaaggatgccaaccaagccaagttgagtgagcgccgccgcaaacgtctccaggagctggagggtcaaattgctgatctgaagaagaaactgaatgagcagtccaaacttctgaaactaaaggaatccacagagcgtactgtctccaaactgaaccaggagatacggatgatgaaaaaccagcgggtacagttaatgcgtcaaatgaaagaagatgctgagaagtttagacagtggaagcagaaaaaagacaaagaagtaatacagttaaaagaacgagaccgtaagaggcaatatgagctgctgaaacttgaaagaaacttccagaaacaatccaatgtgctcagacgtaaaacggaggaggcagcagctgccaacaagcgtctcaaggatgctctccagaaacaacgggaggttgcagataagcggaaagagactcagagccgtggaatggaaggcactgcagctcgagtgaagaattggcttggaaacgaaattgaggttatggtcagtactgaggaagccaaacgccatctgaatgacctccttgaagatagaaagatcctggctcaagatgtggctcaactcaaagaaaaaaaggaatctggggagaatccacctcctaaactccggaggcgtacattctcccttactgaagtgcgtggtcaagtttcggagtcagaagattctattacaaagcagattgaaagcctagagactgaaatggaattcaggagtgctcagattgctgacctacagcagaagctgctggatgcagaaagtgaagacagaccaaaacaacgctgggagaatattgccaccattctggaagccaagtgtgccctgaaatatttgattggagagctggtctcctccaaaatacaggtcagcaaacttgaaagcagcctgaaacagagcaagaccagctgtgctgacatgcagaagatgctgtttgaggaacgaaatcattttgccgagatagagacagagttacaagctgagctggtcagaatggagcaacagcaccaagagaaggtgctgtaccttctcagccagctgcagcaaagccaaatggcagagaagcagttagaggaatcagtcagtgaaaaggaacagcagctgctgagcacactgaagtgtcaggatgaagaacttgagaaaatgcgagaagtgtgtgagcaaaatcagcagcttctccgagagaatgaaatcatcaagcagaaactgaccctcctccaggtagccagcagacagaaacatcttcctaaggatacccttctatctccagactcttcttttgaatatgtcccacctaagccaaaaccttctcgtgttaaagaaaagttcctggagcaaagcatggacatcgaggatctaaaatattgttcagagcattctgtgaatgagcatgaggatggtgatggtgatgatgatgagggggatgacgaggaatggaagccaacaaaattagttaaggtgtccaggaagaacatccaagggtgttcctgcaagggctggtgtggaaacaagcagtgtgggtgcaggaagcaaaagtcagactgtggtgtggactgttgctgtgaccccacaaagtgtcggaaccgccagcaaggcaaggatagcttgggcactgttgaacggacccaggattccgaaggctccttcaaactggaggatcctaccgaggtgaccccaggattgagcttctttaatcccgtctgtgccacccccaatagcaagatcctgaaagagatgtgcgatgtggagcaggtgctgtcaaagaagactcccccagctccctccccttttgacctcccagagttgaaacatgtagcaacagaataccaagaaaacaaggctccagggaagaaaaagaaacgggctctggccagcaacaccagcttcttctctggctgctcccctatcgaagaagaggcccactgaagttggagtcatcatctctacccccagtctggcttgggagatgctttcaggttgcagccagaaggggttttttaaatgacttctctggatttcaggtttcttgctgttgaaaaaaggaacaaagcgttactgaaaagaaggtaacctttgttggatgtgggccttagcctccaggtccagactactactctatgttctccagaagggtgctaagtcacctactgaagagagaaccaactgactttcctattgactcatcaggaaccagtcctcagtctggtcaagttgtttcttatttgtgagcagttcaggctatctcctgatggggatgaggccaaggctttcttatcttttggttgtctctgcttaatggaggagcctggcctaggatggaggcctggcttagatctttcattccacctcaggaatgaggttgtgatctttcctgtcctgaccctctctgaattatgtttcaatagtactcttgattgtctgccatgttgttgaagcaaatgaattatttttaaatgttaagtaagtaaataaaccttagcccgtc

SEQ ID NO: 368320 - DNA, 4833 bp, Homo sapiens
  misc_feature (3)..(5): n is a, c, g, or t
  misc_feature (7)..(7): n is a, c, g, or t
  misc_feature (4833)..(4833): n is a, c, g, or t
ggnnnangctccggctgggacagggcggcgggaggcccagggagaacggggaagggacatttagtttgagacggtgctgagataggatcatgaaggaagaggtgaagggaattcctgtaagagtggcgctgcgttgtcgccctctggtccccaaagagattagcgagggctgccagatgtgcctttccttcgtgcccggagagcctcaggtggtggttggtacagataaatccttcacctacgattttgtatttgatccctctactgaacaggaagaagtcttcaatacagcagtagcgccactcataaaaggtgtatttaaaggatataatgcaacggtcctggcctatgggcagactggctctggaaaaacctattcaatgggaggtgcatatactgcagagcaagagaatgaaccaacagttggggttattcctagggtaatacaactgctcttcaaagaaattgataaaaagagtgactttgaatttactctgaaagtgtcttacttagagatttacaatgaagaaattttggatcttctatgcccatctcgtgagaaagctcaaataaatatacgagaggatcctaaggaaggcataaagattgtgggactcactgagaagactgttttggttgccttggatactgtttcctgtttggaacagggcaacaactctaggactgtggcctccacggctatgaactcccagtcgtcccgatctcatgccatctttacaatctccttagagcaaagaaagaaaagtgacaagaatagcagctttcgctccaagctgcatcttgtagacctcgctggatcagaaagacagaagaaaaccaaggctgaaggggatcgtctaaaagagggtattaatattaaccgaggcctcctatgcttgggaaatgtaatcagtgctcttggagatgacaaaaagggtggctttgtgccctacagagattccaagttgactcgactgcttcaagattctctaggaggtaatagccatactcttatgatagcctgtgtgagtcctgctgactccaatctagaggaaacattaaatacccttcgctatgctgacagagcaagaaaaatcaagaacaaacctattgttaatattgatccccagacagctgaacttaatcatctaaagcaacaggtacaacagctacaagtcttgttgctacaggcccatggaggtaccctgcctggatctataactgtggaaccatcagagaatctacaatccctgatggagaagaatcagtccctggtagaggagaatgaaaaattaagtcgtggtctgagcgaggcagctggtcagacagcccagatgttggagaggatcattttgacagagcaagcgaatgaaaaaatgaacgccaagctagaagagctcaggcagcatgcggcctgcaaactggatcttcaaaagctagtggagactttggaagaccaggaattgaaagaaaatgtagagataatttgtaacctgcagcaattgattacccagttatcggatgaaactgttgcttgcatggctgcagccattgatactgcggtggagcaagaagcccaagtagaaaccagtccagagacgagcaggtcttctgacgcttttaccactcagcatgctctccgtcaagcgcagatgtctaaggagctggttgagttgaataaagcgcttgcactgaaagaggccctggctaggaagatgactcagaatgacagccaactgcagcccattcagtaccaataccaggataacataaaagagctagaattagaagtcatcaatctgcaaaaggaaaaggaagaattggttcttgaacttcagacagcaaagaaggatgccaaccaagccaagttgagtgagcgccgccgcaaacgtctccaggagctggagggtcaaattgctgatctgaagaagaaactgaatgagcagtccaaacttctgaaactaaaggaatccacagagcgtactgtctccaaactgaaccaggagatacggatgatgaaaaaccagcgggtacagttaatgcgtcaaatgaaagaagatgctgagaagtttagacagtggaagcagaaaaaagacaaagaagtaatacagttaaaagaacgagaccgtaagaggcaatatgagctgctgaaacttgaaagaaacttccagaaacaatccaatgtgctcagacgtaaaacggaggaggcagcagctgccaacaagcgtctcaaggatgctctccagaaacaacgggaggttgcagataagcggaaagagactcagagccgtggaatggaaggcactgcagctcgagtgaagaattggcttggaaacgaaattgaggttatggtcagtactgaggaagccaaacgccatctgaatgacctccttgaagatagaaagatcctggctcaagatgtggctcaactcaaagaaaaaaaggaatctggggagaatccacctcctaaactccggaggcgtacattctcccttactgaagtgcgtggtcaagtttcggagtcagaagattctattacaaagcagattgaaagcctagagactgaaatggaattcaggagtgctcagattgctgacctacagcagaagctgctggatgcagaaagtgaagacagaccaaaacaacgctgggagaatattgccaccattctggaagccaagtgtgccctgaaatatttgattggagagctggtctcctccaaaatacaggtcagcaaacttgaaagcagcctgaaacagagcaagaccagctgtgctgacatgcagaagatgctgtttgaggaacgaaatcattttgccgagatagagacagagttacaagctgagctggtcagaatggagcaacagcaccaagagaaggtgctgtaccttctcagccagctgcagcaaagccaaatggcagagaagcagttagaggaatcagtcagtgaaaaggaacagcagctgctgagcacactgaagtgtcaggatgaagaacttgagaaaatgcgagaagtgtgtgagcaaaatcagcagcttctccgagagaatgaaatcatcaagcagaaactgaccctcctccaggtagccagcagacagaaacatcttcctaaggatacccttctatctccagactcttcttttgaatatgtcccacctaagccaaaaccttctcgtgttaaagaaaagttcctggagcaaagcatggacatcgaggatctaaaatattgttcagagcattctgtgaatgagcatgaggatggtgatggtgatgatgatgagggggatgacgaggaatggaagccaacaaaattagttaaggtgtccaggaagaacatccaagggtgttcctgcaagggctggtgtggaaacaagcagtgtgggtgcaggaagcaaaagtcagactgtggtgtggactgttgctgtgaccccacaaagtgtcggaaccgccagcaaggcaaggatagcttgggcactgttgaacggacccaggattccgaaggctccttcaaactggaggatcctaccgaggtgaccccaggattgagcttctttaatcccgtctgtgccacccccaatagcaagatcctgaaagagatgtgcgatgtggagcaggtgctgtcaaagaagactcccccagctccctccccttttgacctcccagagttgaaacatgtagcaacagaataccaagaaaacaaggctccagggaagaaaaagaaacgggctctggccagcaacaccagcttcttctctggctgctcccctatcgaagaagaggcccactgaagttggagtcatcatctctacccccagtctggcttgggagatgctttcaggttgcagccagaaggggttttttaaatgacttctctggatttcaggtttcttgctgttgaaaaaaggaacaaagcgttactgaaaagaaggtaacctttgttggatgtgggccttagcctccaggtccagactactactctatgttctccagaagggtgctaagtcacctactgaagagagaaccaactgactttcctattgactcatcaggaaccagtcctcagtctggtcaagttgtttcttatttgtgagcagttcaggctatctcctgatggggatgaggccaaggctttcttatcttttggttgtctctgcttaatggaggagcctggcctaggatggaggcctggcttagatctttcattccacctcaggaatgaggttgtgatctttcctgtcctgaccctctctgaattatgtttcaatagtactcttgattgtctgccatgttgttgaagcaaatgaattatttttaaatgttaagtaagtaaataaaccttagcccgtcaaaaaaaaaaaaaaaaaaaaaaaaaaaagaagaaaaaaaacagaaaagaaaaaaaaaagaaaaaagataaaaaaagaagaaaagacagccgccacgaagaaacagaaaagagacaacaacaacgatcaccaaaaacacaaaccaagaccgcaaaagcacacacaaacaacacacacacacacaaaaaaaccattattaaaaaacattgtagaaaaactaatcatgagacaaaatgtgacaaacatgagaaaataaaataagaaaacacgacacaaaccaagagaacatagattatgcataataaaggaaacggggacataagcagagaatcaaagacacagaacaagaacagcgccggcagcgcgcacagagcggacgaagagagaagagaaggtagagcgcggaaccaggacggacgagcgagcgacgcagacaccgacggaaaagacaaaaagcaagaaaccgcagaaggagaagcgacgctan

SEQ ID NO: 368321 - DNA, 3419 bp, Homo sapiens
cctgttgcaaccgtatctggctctgaattattacctttctccaaaccactgaagtacttcagagatgtgtttattgtacatccaatattctacctgactaggaggatagattgggttggacacacttttcccagacttttgtggtataattttgacctaatccccctacctatccaaaaggcctatgggatatatttttatccacctttgatataggtattatcaatcagatatttttctaatatgttatttactttgttttagtgtggaaccatcagagaatctacaatccctgatggagaagaatcagtccctggtagaggagaatgaaaaattaagtcgtggtctgagcgaggcagctggtcagacagcccagatgttggagaggatcattttgacagagcaagcgaatgaaaaaatgaacgccaagctagaagagctcaggcagcatgcggcctgcaaactggatcttcaaaagctagtggagactttggaagaccaggaattgaaagaaaatgtagagataatttgtaacctgcagcaattgattacccagttatcggatgaaactgttgcttgcatggctgcagccattgatactgcggtggagcaagaagcccaagtagaaaccagtccagagacgagcaggtcttctgacgcttttaccactcagcatgctctccgtcaagcgcagatgtctaaggagctggttgagttgaataaagcgcttgcactgaaagaggccctggctaggaagatgactcagaatgacagccaactgcagcccattcagtaccaataccaggataacataaaagagctagaattagaagtcatcaatctgcaaaaggaaaaggaagaattggttcttgaacttcagacagcaaagaaggatgccaaccaagccaagttgagtgagcgccgccgcaaacgtctccaggagctggagggtcaaattgctgatctgaagaagaaactgaatgagcagtccaaacttctgaaactaaaggaatccacagagcgtactgtctccaaactgaaccaggagatacggatgatgaaaaaccagcgggtacagttaatgcgtcaaatgaaagaagatgctgagaagtttagacagtggaagcagaaaaaagacaaagaagtaatacagttaaaagaacgagaccgtaagaggcaatatgagctgctgaaacttgaaagaaacttccagaaacaatccaatgtgctcagacgtaaaacggaggaggcagcagctgccaacaagcgtctcaaggatgctctccagaaacaacgggaggttgcagataagcggaaagagactcagagccgtggaatggaaggcactgcagctcgagtgaagaattggcttggaaacgaaattgaggttatggtcagtactgaggaagccaaacgccatctgaatgacctccttgaagatagaaagatcctggctcaagatgtggctcaactcaaagaaaaaaaggaatctggggagaatccacctcctaaactccggaggcgtacattctcccttactgaagtgcgtggtcaagtttcggagtcagaagattctattacaaagcagattgaaagcctagagactgaaatggaattcaggagtgctcagattgctgacctacagcagaagctgctggatgcagaaagtgaagacagaccaaaacaacgctgggagaatattgccaccattctggaagccaagtgtgccctgaaatatttgattggagagctggtctcctccaaaatacaggtcagcaaacttgaaagcagcctgaaacagagcaagaccagctgtgctgacatgcagaagatgctgtttgaggaacgaaatcattttgccgagatagagacagagttacaagctgagctggtcagaatggagcaacagcaccaagagaaggtgctgtaccttctcagccagctgcagcaaagccaaatggcagagaagcagttagaggaatcagtcagtgaaaaggaacagcagctgctgagcacactgaagtgtcaggatgaagaacttgagaaaatgcgagaagtgtgtgagcaaaatcagcagcttctccgagagaatgaaatcatcaagcagaaactgaccctcctccaggtagccagcagacagaaacatcttcctaaggatacccttctatctccagactcttcttttgaatatgtcccacctaagccaaaaccttctcgtgttaaagaaaagttcctggagcaaagcatggacatcgaggatctaaaatattgttcagagcattctgtgaatgagcatgaggatggtgatggtgatgatgatgagggggatgacgaggaatggaagccaacaaaattagttaaggtgtccaggaagaacatccaagggtgttcctgcaagggctggtgtggaaacaagcagtgtgggtgcaggaagcaaaagtcagactgtggtgtggactgttgctgtgaccccacaaagtgtcggaaccgccagcaaggcaaggatagcttgggcactgttgaacggacccaggattccgaaggctccttcaaactggaggatcctaccgaggtgaccccaggattgagcttctttaatcccgtctgtgccacccccaatagcaagatcctgaaagagatgtgcgatgtggagcaggtgctgtcaaagaagactcccccagctccctccccttttgacctcccagagttgaaacatgtagcaacagaataccaagaaaacaaggctccagggaagaaaaagaaacgggctctggccagcaacaccagcttcttctctggctgctcccctatcgaagaagaggcccactgaagttggagtcatcatctctacccccagtctggcttgggagatgctttcaggttgcagccagaaggggttttttaaatgacttctctggatttcaggtttcttgctgttgaaaaaaggaacaaagcgttactgaaaagaaggtaacctttgttggatgtgggccttagcctccaggtccagactactactctatgttctccagaagggtgctaagtcacctactgaagagagaaccaactgactttcctattgactcatcaggaaccagtcctcagtctggtcaagttgtttcttatttgtgagcagttcaggctatctcctgatggggatgaggccaaggctttcttatcttttggttgtctctgcttaatggaggagcctggcctaggatggaggcctggcttagatctttcattccacctcaggaatgaggttgtgatctttcctgtcctgaccctctctgaattatgtttcaatagtactcttgattgtctgccatgttgttgaagcaaatgaattatttttaaatgttaagtaagtaaataaaccttagcccgtctttttttttttttttttttttttttttttt

SEQ ID NO: 368322 - DNA, 1490 bp, Homo sapiens
  misc_feature (3)..(5): n is a, c, g, or t
  misc_feature (7)..(7): n is a, c, g, or t
ggnnnangctccggctgggacagggcggcgggaggcccagggagaacggggaagggacatttagtttgagacggtgctgagataggatcatgaaggaagaggtgaagggaattcctgtaagagtggcgctgcgttgtcgccctctggtccccaaagagattagcgagggctgccagatgtgcctttccttcgtgcccggagagcctcaggtggtggttggtacagataaatccttcacctacgattttgtatttgatccctctactgaacaggaagaagtcttcaatacagcagtagcgccactcataaaaggtgtatttaaaggatataatgcaacggtcctggcctatgggcagactggctctggaaaaacctattcaatgggaggtgcatatactgcagagcaagagaatgaaccaacagttggggttattcctagggtaatacaactgctcttcaaagaaattgataaaaagagtgactttgaatttactctgaaagtgtcttacttagagatttacaatgaagaaattttggatcttctatgcccatctcgtgagaaagctcaaataaatatacgagaggatcctaaggaaggcataaagattgtgggactcactgagaagactgttttggttgccttggatactgtttcctgtttggaacagggcaacaactctaggactgtggcctccacggctatgaactcccagtcgtcccgatctcatgccatctttacaatctccttagagcaaagaaagaaaagtgacaagaatagcagctttcgctccaagctgcatcttgtagacctcgctggatcagaaagacagaagaaaaccaaggctgaaggggatcgtctaaaagagggtattaatattaaccgaggcctcctatgcttgggaaatgtaatcagtgctcttggagatgacaaaaagggtggctttgtgccctacagagattccaagttgactcgactgcttcaagattctctaggaggtaatagccatactcttatgatagcctgtgtgagtcctgctgactccaatctagaggaaacattaaatacccttcgctatgctgacagagcaagaaaaatcaagaacaaacctattgttaatattgatccccagacagctgaacttaatcatctaaagcaacaggtacaacagctacaagtcttgttgctacaggcccatggaggtaccctgcctggatctataacgtatgtgaaacataatggatctaagagtcagagttacacaaaaagatatactcagagcagagaaatgcaaattaaaaccccaatgagatatcacctcatgcccattaggatggctactgttaaataaataaatagataaataactgaaaataaaaggtgttggcaaggatgtgaagatatagagaaattggaacccttgtacactgttggtgagattgtaaaatgatgtaactactgtggaaaacagcatggaggttcctaaaaaaat

SEQ ID NO: 368323 - DNA, 449 bp, Homo sapiens
ctcgctggatcagaaagacagaagaaaaccaaggctgaaggggatcgtctaaaagagggtaagagagtaattaaggtcacagttgtagattaaaaacttctagtactcttgttggtattgttggtgttttcgactgggatttgagatcacattctaacagtagctacgattcagatttgaggctgagttcagaaatagcgaaaaattgtttctttcccttgctctcattctctaattcaggtatgagatttggatctggcctttggtttgatttcatctggtccaggcaagttttagttttagttttgttttgttttgttttaccccaactatttataattaaaatcagtatcctgattctgtcattttaagtattcaccatcccttccagatgttgtcacatataaacctcagcccaatttccatgccttcattcaagttgttgaatt

SEQ ID NO: 368324 - DNA, 422 bp, Homo sapiens
gggaactaggctagctatttatttcagatacttaaaacaaatgtatgcagagccactgttgtaaaggaacagagatattgttaatggagaagtgcctgtgagacttgatgaaatagtgcctaaggaactccatttgcttgtttctcttataaatcattatcctgatttttttccagcaagtagaaaccagtccagagacgagcaggtcttctgacgcttttaccactcagcatgctctccgtcaagcgcagatgtctaaggagctggttgagttgaataaagcgcttgcactgaaagaggccctggctaggaagatgactcagaatgacagccaactgcagcccattcagtaccaataccaggtaaactatttcctagggcagtatttgttcatgtctacagtctcttaaactgaatgggaa

SEQ ID NO: 368325 - DNA, 4377 bp, Homo sapiens
  misc_feature (3)..(5): n is a, c, g, or t
  misc_feature (7)..(7): n is a, c, g, or t
ggnnnangctccggctgggacagggcggcgggaggcccagggagaacggggaagggacatttagtttgagacggtgctgagataggatcatgaaggaagaggtgaagggaattcctgtaagagtggcgctgcgttgtcgccctctggtccccaaagagattagcgagggctgccagatgtgcctttccttcgtgcccggagagcctcaggtggtggttggtacagataaatccttcacctacgattttgtatttgatccctctactgaacaggaagaagtcttcaatacagcagtagcgccactcataaaaggtgtatttaaaggatataatgcaacggtcctggcctatgggcagactggctctggaaaaacctattcaatgggaggtgcatatactgcagagcaagagaatgaaccaacagttggggttattcctagggtaatacaactgctcttcaaagaaattgataaaaagagtgactttgaatttactctgaaagtgtcttacttagagatttacaatgaagaaattttggatcttctatgcccatctcgtgagaaagctcaaataaatatacgagaggatcctaaggaaggcataaagattgtgggactcactgagaagactgttttggttgccttggatactgtttcctgtttggaacagggcaacaactctaggactgtggcctccacggctatgaactcccagtcgtcccgatctcatgccatctttacaatctccttagagcaaagaaagaaaagtgacaagaatagcagctttcgctccaagctgcatcttgtagacctcgctggatcagaaagacagaagaaaaccaaggctgaaggggatcgtctaaaagagggtattaatattaaccgaggcctcctatgcttgggaaatgtaatcagtgctcttggagatgacaaaaagggtggctttgtgccctacagagattccaagttgactcgactgcttcaagattctctaggaggtaatagccatactcttatgatagcctgtgtgagtcctgctgactccaatctagaggaaacattaaatacccttcgctatgctgacagagcaagaaaaatcaagaacaaacctattgttaatattgatccccagacagctgaacttaatcatctaaagcaacaggtacaacagctacaagtcttgttgctacaggcccatggaggtaccctgcctggatctataactgtggaaccatcagagaatctacaatccctgatggagaagaatcagtccctggtagaggagaatgaaaaattaagtcgtggtctgagcgaggcagctggtcagacagcccagatgttggagaggatcattttgacagagcaagcgaatgaaaaaatgaacgccaagctagaagagctcaggcagcatgcggcctgcaaactggatcttcaaaagctagtggagactttggaagaccaggaattgaaagaaaatgtagagataatttgtaacctgcagcaattgattacccagttatcggatgaaactgttgcttgcatggctgcagccattgatactgcggtggagcaagaagcccaagtagaaaccagtccagagacgagcaggtcttctgacgcttttaccactcagcatgctctccgtcaagcgcagatgtctaaggagctggttgagttgaataaagcgcttgcactgaaagaggccctggctaggaagatgactcagaatgacagccaactgcagcccattcagtaccaataccaggataacataaaagagctagaattagaagtcatcaatctgcaaaaggaaaaggaagaattggttcttgaacttcagacagcaaagaaggatgccaaccaagccaagttgagtgagcgccgccgcaaacgtctccaggagctggagggtcaaattgctgatctgaagaagaaactgaatgagcagtccaaacttctgaaactaaaggaatccacagagcgtactgtctccaaactgaaccaggagatacggatgatgaaaaaccagcgggtacagttaatgcgtcaaatgaaagaagatgctgagaagtttagacagtggaagcagaaaaaagacaaagaagtaatacagttaaaagaacgagaccgtaagaggcaatatgagctgctgaaacttgaaagaaacttccagaaacaatccaatgtgctcagacgtaaaacggaggaggcagcagctgccaacaagcgtctcaaggatgctctccagaaacaacgggaggttgcagataagcggaaagagactcagagccgtggaatggaaggcactgcagctcgagtgaagaattggcttggaaacgaaattgaggttatggtcagtactgaggaagccaaacgccatctgaatgacctccttgaagatagaaagatcctggctcaagatgtggctcaactcaaagaaaaaaaggaatctggggagaatccacctcctaaactccggaggcgtacattctcccttactgaagtgcgtggtcaagtttcggagtcagaagattctattacaaagcagattgaaagcctagagactgaaatggaattcaggagtgctcagattgctgacctacagcagaagctgctggatgcagaaagtgaagacagaccaaaacaacgctgggagaatattgccaccattctggaagccaagtgtgccctgaaatatttgattggagagctggtctcctccaaaatacaggtcagcaaacttgaaagcagcctgaaacagagcaagaccagctgtgctgacatgcagaagatgctgtttgaggaacgaaatcattttgccgagatagagacagagttacaagctgagctggtcagaatggagcaacagcaccaagagaaggtgctgtaccttctcagccagctgcagcaaagccaaatggcagagaagcagttagaggaatcagtcagtgaaaaggaacagcagctgctgagcacactgaagtgtcaggatgaagaacttgagaaaatgcgagaagtgtgtgagcaaaatcagcagcttctccgagagaatgaaatcatcaagcagaaactgaccctcctccaggtagccagcagacagaaacatcttcctaaggatacccttctatctccagactcttcttttgaatatgtcccacctaagccaaaaccttctcgtgttaaagaaaagttcctggagcaaagcatggacatcgaggatctaaaatattgttcagagcattctgtgaatgagcatgaggatggtgatggtgatgatgatgagggggatgacgaggaatggaagccaacaaaattagttaaggtgtccaggaagaacatccaagggtgttcctgcaagggctggtgtggaaacaagcagtgtgggtgcaggaagcaaaagtcagactgtggtgtggactgttgctgtgaccccacaaagtgtcggaaccgccagcaaggcaaggatagcttgggcactgttgaacggacccaggattccgaaggctccttcaaactggaggatcctaccgaggtgaccccaggattgagcttctttaatcccgtctgtgccacccccaatagcaagatcctgaaagagatgtgcgatgtggagcaggtgctgtcaaagaagactcccccagctccctccccttttgacctcccagagttgaaacatgtagcaacagaataccaagaaaacaaggctccagggaagaaaaagaaacgggctctggccagcaacaccagcttcttctctggctgctcccctatcgaagaagaggcccactgaagttggagtcatcatctctacccccagtctggcttgggagatgctttcaggttgcagccagaaggggttttttaaatgacttctctggatttcaggtttcttgctgttgaaaaaaggaacaaagcgttactgaaaagaaggtaacctttgttggatgtgggccttagcctccaggtccagactactactctatgttctccagaagggtgctaagtcacctactgaagagagaaccaactgactttcctattgactcatcaggaaccagtcctcagtctggtcaagttgtttcttatttgtgagcagttcaggctatctcctgatggggatgaggccaaggctttcttatcttttggttgtctctgcttaatggaggagcctggcctaggatggaggcctggcttagatctttcattccacctcaggaatgaggttgtgatctttcctgtcctgaccctctctgaattatgtttcaatagtactcttgattgtctgccatgttgttgaagcaaatgaattatttttaaatgttaagtaagtaaataaaccttagcccgtctttttttttttttttttttttttttttttt

SEQ ID NO: 368326 - DNA, 4562 bp, Homo sapiens
  misc_feature (3)..(5): n is a, c, g, or t
  misc_feature (7)..(7): n is a, c, g, or t
ggnnnangctccggctgggacagggcggcgggaggcccagggagaacggggaagggacatttagtttggtgagttacgggggcacaccttagctcagaacctgtttttacccagtaccctagggctttggttctttgtcgccgtccccgttggagttttttctttgcctttcagaagcccgtgcactctctttagagtgcagggctgacgggcggtccagccctggccaagtcatggagcgtgaatctcccaaagacggtgctgagataggatcatgaaggaagaggtgaagggaattcctgtaagagtggcgctgcgttgtcgccctctggtccccaaagagattagcgagggctgccagatgtgcctttccttcgtgcccggagagcctcaggtggtggttggtacagataaatccttcacctacgattttgtatttgatccctctactgaacaggaagaagtcttcaatacagcagtagcgccactcataaaaggtgtatttaaaggatataatgcaacggtcctggcctatgggcagactggctctggaaaaacctattcaatgggaggtgcatatactgcagagcaagagaatgaaccaacagttggggttattcctagggtaatacaactgctcttcaaagaaattgataaaaagagtgactttgaatttactctgaaagtgtcttacttagagatttacaatgaagaaattttggatcttctatgcccatctcgtgagaaagctcaaataaatatacgagaggatcctaaggaaggcataaagattgtgggactcactgagaagactgttttggttgccttggatactgtttcctgtttggaacagggcaacaactctaggactgtggcctccacggctatgaactcccagtcgtcccgatctcatgccatctttacaatctccttagagcaaagaaagaaaagtgacaagaatagcagctttcgctccaagctgcatcttgtagacctcgctggatcagaaagacagaagaaaaccaaggctgaaggggatcgtctaaaagagggtattaatattaaccgaggcctcctatgcttgggaaatgtaatcagtgctcttggagatgacaaaaagggtggctttgtgccctacagagattccaagttgactcgactgcttcaagattctctaggaggtaatagccatactcttatgatagcctgtgtgagtcctgctgactccaatctagaggaaacattaaatacccttcgctatgctgacagagcaagaaaaatcaagaacaaacctattgttaatattgatccccagacagctgaacttaatcatctaaagcaacaggtacaacagctacaagtcttgttgctacaggcccatggaggtaccctgcctggatctataactgtggaaccatcagagaatctacaatccctgatggagaagaatcagtccctggtagaggagaatgaaaaattaagtcgtggtctgagcgaggcagctggtcagacagcccagatgttggagaggatcattttgacagagcaagcgaatgaaaaaatgaacgccaagctagaagagctcaggcagcatgcggcctgcaaactggatcttcaaaagctagtggagactttggaagaccaggaattgaaagaaaatgtagagataatttgtaacctgcagcaattgattacccagttatcggatgaaactgttgcttgcatggctgcagccattgatactgcggtggagcaagaagcccaagtagaaaccagtccagagacgagcaggtcttctgacgcttttaccactcagcatgctctccgtcaagcgcagatgtctaaggagctggttgagttgaataaagcgcttgcactgaaagaggccctggctaggaagatgactcagaatgacagccaactgcagcccattcagtaccaataccaggataacataaaagagctagaattagaagtcatcaatctgcaaaaggaaaaggaagaattggttcttgaacttcagacagcaaagaaggatgccaaccaagccaagttgagtgagcgccgccgcaaacgtctccaggagctggagggtcaaattgctgatctgaagaagaaactgaatgagcagtccaaacttctgaaactaaaggaatccacagagcgtactgtctccaaactgaaccaggagatacggatgatgaaaaaccagcgggtacagttaatgcgtcaaatgaaagaagatgctgagaagtttagacagtggaagcagaaaaaagacaaagaagtaatacagttaaaagaacgagaccgtaagaggcaatatgagctgctgaaacttgaaagaaacttccagaaacaatccaatgtgctcagacgtaaaacggaggaggcagcagctgccaacaagcgtctcaaggatgctctccagaaacaacgggaggttgcagataagcggaaagagactcagagccgtggaatggaaggcactgcagctcgagtgaagaattggcttggaaacgaaattgaggttatggtcagtactgaggaagccaaacgccatctgaatgacctccttgaagatagaaagatcctggctcaagatgtggctcaactcaaagaaaaaaaggaatctggggagaatccacctcctaaactccggaggcgtacattctcccttactgaagtgcgtggtcaagtttcggagtcagaagattctattacaaagcagattgaaagcctagagactgaaatggaattcaggagtgctcagattgctgacctacagcagaagctgctggatgcagaaagtgaagacagaccaaaacaacgctgggagaatattgccaccattctggaagccaagtgtgccctgaaatatttgattggagagctggtctcctccaaaatacaggtcagcaaacttgaaagcagcctgaaacagagcaagaccagctgtgctgacatgcagaagatgctgtttgaggaacgaaatcattttgccgagatagagacagagttacaagctgagctggtcagaatggagcaacagcaccaagagaaggtgctgtaccttctcagccagctgcagcaaagccaaatggcagagaagcagttagaggaatcagtcagtgaaaaggaacagcagctgctgagcacactgaagtgtcaggatgaagaacttgagaaaatgcgagaagtgtgtgagcaaaatcagcagcttctccgagagaatgaaatcatcaagcagaaactgaccctcctccaggtagccagcagacagaaacatcttcctaaggatacccttctatctccagactcttcttttgaatatgtcccacctaagccaaaaccttctcgtgttaaagaaaagttcctggagcaaagcatggacatcgaggatctaaaatattgttcagagcattctgtgaatgagcatgaggatggtgatggtgatgatgatgagggggatgacgaggaatggaagccaacaaaattagttaaggtgtccaggaagaacatccaagggtgttcctgcaagggctggtgtggaaacaagcagtgtgggtgcaggaagcaaaagtcagactgtggtgtggactgttgctgtgaccccacaaagtgtcggaaccgccagcaaggcaaggatagcttgggcactgttgaacggacccaggattccgaaggctccttcaaactggaggatcctaccgaggtgaccccaggattgagcttctttaatcccgtctgtgccacccccaatagcaagatcctgaaagagatgtgcgatgtggagcaggtgctgtcaaagaagactcccccagctccctccccttttgacctcccagagttgaaacatgtagcaacagaataccaagaaaacaaggctccagggaagaaaaagaaacgggctctggccagcaacaccagcttcttctctggctgctcccctatcgaagaagaggcccactgaagttggagtcatcatctctacccccagtctggcttgggagatgctttcaggttgcagccagaaggggttttttaaatgacttctctggatttcaggtttcttgctgttgaaaaaaggaacaaagcgttactgaaaagaaggtaacctttgttggatgtgggccttagcctccaggtccagactactactctatgttctccagaagggtgctaagtcacctactgaagagagaaccaactgactttcctattgactcatcaggaaccagtcctcagtctggtcaagttgtttcttatttgtgagcagttcaggctatctcctgatggggatgaggccaaggctttcttatcttttggttgtctctgcttaatggaggagcctggcctaggatggaggcctggcttagatctttcattccacctcaggaatgaggttgtgatctttcctgtcctgaccctctctgaattatgtttcaatagtactcttgattgtctgccatgttgttgaagcaaatgaattatttttaaatgttaagtaagtaaataaaccttagcccgtctttttttttttttttttttttttttttttt

SEQ ID NO: 368327 - DNA, 4450 bp, Homo sapiens
  misc_feature (3)..(5): n is a, c, g, or t
  misc_feature (7)..(7): n is a, c, g, or t
ggnnnangctccggctgggacagggcggcgggaggcccagggagaacggggaagggacatttagtttgagacggtgctgagataggatcatgaaggaagaggtgaagggaattcctgtaagagtggcgctgcgttgtcgccctctggtccccaaagagattagcgagggctgccagatgtgcctttccttcgtgcccggagagcctcaggtggtggttggtacagataaatccttcacctacgattttgtatttgatccctctactgaacaggaagaagtcttcaatacagcagtagcgccactcataaaaggtgtatttaaaggatataatgcaacggtcctggcctatgggcagactggctctggaaaaacctattcaatgggaggtgcatatactgcagagcaagagaatgaaccaacagttggggttattcctagggtaatacaactgctcttcaaagaaattgataaaaagagtgactttgaatttactctgaaagtgtcttacttagagatttacaatgaagaaattttggatcttctatgcccatctcgtgagaaagctcaaataaatatacgagaggatcctaaggaaggcataaagattgtgggactcactgagaagactgttttggttgccttggatactgtttcctgtttggaacagggcaacaactctaggactgtggcctccacggctatgaactcccagtcgtcccgatctcatgccatctttacaatctccttagagcaaagaaagaaaagtgacaagaatagcagctttcgctccaagctgcatcttgtagacctcgctggatcagaaagacagaagaaaaccaaggctgaaggggatcgtctaaaagagggtattaatattaaccgaggcctcctatgcttgggaaatgtaatcagtgctcttggagatgacaaaaagggtggctttgtgccctacagagattccaagttgactcgactgcttcaagattctctaggaggtaatagccatactcttatgatagcctgtgtgagtcctgctgactccaatctagaggaaacattaaatacccttcgctatgctgacagagcaagaaaaatcaagaacaaacctattgttaatattgatccccagacagctgaacttaatcatctaaagcaacaggtacaacagctacaagtcttgttgctacaggcccatggaggtaccctgcctggatctataactgtggaaccatcagagaatctacaatccctgatggagaagaatcagtccctggtagaggagaatgaaaaattaagtcgtggtctgagcgaggcagctggtcagacagcccagatgttggagaggatcattttgacagagcaagcgaatgaaaaaatgaacgccaagctagaagagctcaggcagcatgcggcctgcaaactggatcttcaaaagctagtggagactttggaagaccaggaattgaaagaaaatgtagagataatttgtaacctgcagcaattgattacccagttatcggatgaaactgttgcttgcatggctgcagccattgatactgcggtggagcaagaagcccaagtagaaaccagtccagagacgagcaggtcttctgacgcttttaccactcagcatgctctccgtcaagcgcagatgtctaaggagctggttgagttgaataaagcgcttgcactgaaagaggccctggctaggaagatgactcagaatgacagccaactgcagcccattcagtaccaataccaggataacataaaagagctagaattagaagtcatcaatctgcaaaaggaaaaggaagaattggttcttgaacttcagacagcaaagaaggatgccaaccaagccaagttgagtgagcgccgccgcaaacgtctccaggagctggagggtcaaattgctgatctgaagaagaaactgaatgagcagtccaaacttctgaaactaaaggaatccacagagcgtactgtctccaaactgaaccaggagatacggatgatgaaaaaccagcgggtacagttaatgcgtcaaatgaaagaagatgctgagaagtttagacagtggaagcagaaaaaagacaaagaagtaatacagttaaaagaacgagaccgtaagaggcaatatgagctgctgaaacttgaaagaaacttccagaaacaatccaatgtgctcagacgtaaaacggaggaggcagcagctgccaacaagcgtctcaaggatgctctccagaaacaacgggaggttgcagataagcggaaagagactcagagccgtggaatggaaggcactgcagctcgagtgaagaattggcttggaaacgaaattgaggttatggtcagtactgaggaagccaaacgccatctgaatgacctccttgaagatagaaagatcctggctcaagatgtggctcaactcaaagaaaaaaaggaatctggggagaatccacctcctaaactccggaggcgtacattctcccttactgaagtgcgtggtcaagtttcggagtcagaagattctattacaaagcagattgaaagcctagagactgaaatggaattcaggagtgctcagattgctgacctacagcagaagctgctggatgcagaaagtgaagacagaccaaaacaacgctgggagaatattgccaccattctggaagccaagtgtgccctgaaatatttgattggagagctggtctcctccaaaatacaggtcagcaaacttgaaagcagcctgaaacagagcaagaccagctgtgctgacatgcagaagatgctgtttgaggaacgaaatcattttgccgagatagagacagagttacaagctgagctggtcagaatggagcaacagcaccaagagaaggtgctgtaccttctcagccagctgcagcaaagccaaatggcagagaagcagttagaggaatcagtcagtgaaaaggaacagcagctgctgagcacactgaagtgtcaggatgaagaacttgagaaaatgcgagaagtgtgtgagcaaaatcagcagcttctccgagagaatgaaatcatcaagcagaaactgaccctcctccaggtagccagcagacagaaacatcttcctaaggatacccttctatctccagactcttcttttgaatatgtcccacctaagccaaaaccttctcgtgttaaagaaaagttcctggagcaaagcatggacatcgaggatctaaaatattgttcagagcattctgtgaatgagcatgaggatggtgatggtgatgatgatgagggggatgacgaggaatggaagccaacaaaattagttaaggtgtccaggaagaacatccaagggtgttcctgcaagggctggtgtggaaacaagcagtgtgggtgcaggaagcaaaagtcagactgtggtgtggactgttgctgtgaccccacaaagtgtcggaaccgccagcaaggcaaggatagcttgggcactgttgaacggacccaggattccgaaggctccttcaaactggaggatcctaccgaggtgaccccaggattgagcttctttaatcccgtctgtgccacccccaatagcaagatcctgaaagagatgtgcgatgtggagcaggtgctgtcaaagaagactcccccagctccctccccttttgacctcccagagttgaaacatgtagcaacagaataccaagaaaacaaggctccagggaagaaaaagaaacgggctctggccagcaacaccagcttcttctctggctgctcccctatcgaagaagaggcccactgaagttggagtcatcatctctacccccagtctggcttgggagatgctttcaggttgcagccagaaggggttttttaaatgacttctctggatttcaggtttcttgctgttgaaaaaaggaacaaagcgttactgaaaagaaggtaacctttgttggatgtgggccttagcctccaggtccagactactactctatgttctccagaagggtgctaagtcacctactgaagagagaaccaactgactttcctattgactcatcaggaaccagtcctcagtctggtcaagttgtttcttatttgtgagcagttcaggctatctcctgatggggatgaggccaaggctttcttatcttttggttgtctctgcttaatggaggagcctggcctaggatggaggcctggcttagatctttcattccacctcaggaatgaggttgtgatctttcctgtcctgaccctctctgaattatgtttcaatagtactcttgattgtctgccatgttgttgaagcaaatgaattatttttaaatgttaagtaagtaaataaaccttagcccgtctactgtttgggaagatccttctgtgctagagggagaaataaaatttcaacctgtgttcctcagcccctgaggaagctattaaggggattcattacaagtacct

SEQ ID NO: 368328 - DNA, 1959 bp, Homo sapiens
  misc_feature (3)..(5): n is a, c, g, or t
  misc_feature (7)..(7): n is a, c, g, or t
  misc_feature (1885)..(1885): n is a, c, g, or t
  misc_feature (1891)..(1891): n is a, c, g, or t
  misc_feature (1951)..(1951): n is a, c, g, or t
ggnnnangctccggctgggacagggcggcgggaggcccagggagaacggggaagggacatttagtttgagacggtgctgagataggatcatgaaggaagaggtgaagggaattcctgtaagagtggcgctgcgttgtcgccctctggtccccaaagagattagcgagggctgccagatgtgcctttccttcgtgcccggagagcctcaggtggtggttggtacagataaatccttcacctacgattttgtatttgatccctctactgaacaggaagaagtcttcaatacagcagtagcgccactcataaaaggtgtatttaaaggatataatgcaacggtcctggcctatgggcagactggctctggaaaaacctattcaatgggaggtgcatatactgcagagcaagagaatgaaccaacagttggggttattcctagggtaatacaactgctcttcaaagaaattgataaaaagagtgactttgaatttactctgaaagtgtcttacttagagatttacaatgaagaaattttggatcttctatgcccatctcgtgagaaagctcaaataaatatacgagaggatcctaaggaaggcataaagattgtgggactcactgagaagactgttttggttgccttggatactgtttcctgtttggaacagggcaacaactctaggactgtggcctccacggctatgaactcccagtcgtcccgatctcatgccatctttacaatctccttagagcaaagaaagaaaagtgacaagaatagcagctttcgctccaagctgcatcttgtagacctcgctggatcagaaagacagaagaaaaccaaggctgaaggggatcgtctaaaagagggtattaatattaaccgaggcctcctatgcttgggaaatgtaatcagtgctcttggagatgacaaaaagggtggctttgtgccctacagagattccaagttgactcgactgcttcaagattctctaggaggtaatagccatactcttatgatagcctgtgtgagtcctgctgactccaatctagaggaaacattaaatacccttcgctatgctgacagagcaagaaaaatcaagaacaaacctattgttaatattgatccccagacagctgaacttaatcatctaaagcaacaggtacaacagctacaagtcttgttgctacaggcccatggaggtaccctgcctggatctataactgtggaaccatcagagaatctacaatccctgatggagaagaatcagtccctggtagaggagaatgaaaaattaagtcgtggtctgagcgaggcagctggtcagacagcccagatgttggagaggatcattttgacagagcaagcgaatgaaaaaatgaacgccaagctagaagagctcaggcagcatgcggcctgcaaactggatcttcaaaagctagtggagactttggaagaccaggaattgaaagaaaatgtagagataatttgtaacctgcagcaattgattacccagttatcggatgaaactgttgcttgcatggctgcagccattgatactgcggtggagcaagaagcccaagtagaaaccagtccagagacgagcaggtcttctgacgcttttaccactcagcatgctctccgtcaagcgcagatgtctaaggagctggttgagttgaataaagcgcttgcactgaaagaggccctggctaggaagatgactcagaatgacagccaactgcagcccattcagtaccaataccaggataacataaaagagctagaattagaagtcatcaatctgcaaaaggaaaaggaagaattggttcttgaacttcagacagcaaagaaggatgccaaccaagccaagttgagtgagcccgccgnaacgtntcagaactgaggcaatgctgtctgaaaaaactgatgacagccaactttgaactaagatcncgacgctg

SEQ ID NO: 368329 - DNA, 701 bp, Homo sapiens
atttggccctcgaaggccaagatttcggcacaagggggcaccgaggatttgaagatgctgttaaagtacagaattttgtgtacaggtagatttttccgtccctcattaatagtgccttcttaattaatacagactggtgttagctataacaaaactccagtaaggccaaagaatcccaagttctttgtggaaaaaaaaaaaaaaatcttttagggtcagattttcccttctaatatcattgaagatgatgttgcattgatttattcataaagtattttaactataggaactctagaagataatggttaggcaagtgattttttttttaaatatggttggcgtaagttgtattttgaaattcacttattttaaaatcgaagaggattgtaatcatggaaatagaatgtttgtatctacctgcccacattttcttaaaaagatatttcatatacagataatgaagaccaagctagtggctgcactgtaggtctgctgcttatttgtatttgttgtgcttctgtttatgttgtagaagctgaaattctagcaacatgcttcaattctgttattttgatacttatgaaaatgtattaggttttactatattgtgcttttgaaagccataactcttaagaactttgtttttgcatattgtttgctaattctttactttaataaacctcaaaacctgaaaaaaaagt

SEQ ID NO: 368330 - DNA, 404 bp, Homo sapiens
ccacaaagaacttgggattctttggccttactggagttttgttatagctaacaccagtctgtattaattaagaaggcactattaatgagggacggaaaaatctacctgtacacaaaattctgtactttaacagcatcttcaaataaacctttaaaggataatgaagaccaagctagtggctgcactgtaggtctgctgcttatttgtatttgttgtgcttctgtttatgttgtagaagctgaaattctagcaacatgcttcaattctgttattttgatacttatgaaaatgtattaggttttactatattgtgcttttgaaagccataactcttaagaactttgtttttgcatattgtttgctaattctttactttaataaacctcaaaacctgaaaaaaaagt

SEQ ID NO: 368331 - DNA, 3859 bp, Homo sapiens
tctacaaaaaatacaaaaattagctgggcatggtggtgcgtgcctgaagtcccagctactcgggaagctgaggcagaagaatcacttgaacctgggaggcggaggttgtggtgagccgagatcgcaccactgcactccagcctgggcgacagagcgagactctgcctcaaaaaacaaaacaaaacaaaacactcacccatcaacgaatatagactcttctctcatttatcgatgatcctctttttccattttttaagtacttatgtggaagctagtctcccaaaacacaatctttagagagaaaagacatgaacgaactccaaaatatccatttaatcaatcatgtttttggctttggataaagaactttgaaccagtttttttctcaggagctgtcaaatggacacttaattatgacatgagaatgaagaaattattttggaaaaaaaaaatgacctaatttacctatcagtgaaagctttattttctggtgccttttgaaagtatatggagtcatatcattcttctgtttaaaatgttagtttggtttgactttccactttgtcctttctgctcttgtgaagaaaaaaaaaagcattttcgaggaaagaattatgcaatttcttttgttttctgtgtcattatttattgctttttcaatgtgcagccagtggatggttttagttctttcagatgaactgccatttgtgtttcagctcacagttctttgctgggtaaaagaaatactttctgacagtcacctgagccttaaatgtaagtattacatgacatgcattctgtttcttccagagttctgtctgccacacgaaagagaatatttgcttacttgatagaactttggcattttcatcattcttttacttaaccaggcttatggcatgatctctggaacaaatttgtaggaaaaattactccaattgaatgactgatgtatgtaatcaacttcattgggctgcagtaaactagtggaaattagagagttgttttattggtgttttctactgtgagttaattaaaaattgtttttatttggggtcattatgtcacagtcttgagttaacaagatcttacgtgattggccttttctttgttttctcttaggagttgtgtctcatgaatgacagtactaaagctattaacaactaagagtttgacagagaactataagcctgttgtatctcctaaaagttgtcaactccccacccttggactttaaatgaaaattttattcagtccagctattcttacagtccctaaggattttcatatatctatgtataggagataaaatttgctagtaagatttttaaaaactggctagtgaaaggaaagtacctctgaaagaaaccattttagcaaattatggttatatgttttaatttaatctacagaatgttttatagtaaaattctagcaccactagaataatcacatagcatgtacaatatatttatgctggctgaaaagacagaatctgggaataataaaattgcaaccagtttggtaatgcaaacagcagaatagaatgaaatctcagtaatgaattaaagcaacaaaaagatattgattggcaaaaagcaagatataagagattcatttgcttaacatttctacataatatttatggtctggtcagtattggtctggtcagtattgcctggctgacgtgaaatgtaaactagtaggcgtgttattgatctgctaaaactaaccctctttttaagaggagatttaaggaagacgtcaatcaaaatgtcaaatatgtgtgtcagaatataaataatttttcacattgtattgttgctatataaaaaaaataatagaattggttgggtttctgaggtgaaatccagagtaagagtactagacagttcaacaagccacatctaatggcacagatagaggatgtagctattttatacctttcataacatttgagagtaagatatccttcaggatgtgaagtgattattaagtactcatacctgaaatctgttgtcaagattagaactggggttcatgttaaaaaccttccatattacctgagggtacctgtggggaacagttccttcccctgtgtggtagtattttgttggaagagaatgtttatacaaaaaatgaaattcttccaacagcagagaaactctaaaaagtttgatagtacctatcaaagtgctgtacttctgtgatagagaacatctgatgtaccaatttagatctatttctttatactttttctaatcaattgcttaatagtactttggatgattatcacctttgccacttaaaatatataaatatcctttttacttcatgaggaaggaagaattttttgataattactgagttcagccttttgtgatgacttatattttggacttacattttaactttaaagaatgtcagatcccttctttgtcttactagttaaatcctcacctaatctcttgggtatgaatataaatgtgtgtcatcgttatattgttcagctagatgagcaagtatcttagggtagtaggtagcctggtggttttagaagtgtttggtgatttttatggagagagttttcctaagtggtggtttataggtggtatcagatattattagggcagctttttggggagtaatctcaggtctcccagagcagcagcatttttctcattgatataagtaagattcttaggagcttttcttatcacacaagatgcctgaatcgaatgtgagaattgaaggcatttcttctgcataaacaaagaattctacctgctggacagaaacctggaaagttctttggaattcgctgaattacagtttagtatgtcctgattacagagtgacaatatttatcaagcctttgttatattggattatcttctctcttaaaatacaactgtattataattgaaatgacagcccaaaattggatggtttaccaaaaccaatgaaagggatttcacacatcaatttttatttctgttttgaagagcacatgctatataataattgctagtagcaactgcagtaaaacaggtgataagttattttctctgaaaagatccagtcctagagcaggattcttcgatcattcatggcagagtgaaaaaggtttgtatggttcttgtccaaataactcagttcttaaaattcttaaaatgatcgtaaaccattatcctttaaaggtttatttgaagatgctgttaaagtacagaattttgtgtacaggtagatttttccgtccctcattaatagtgccttcttaattaatacagactggtgttagctataacaaaactccagtaaggccaaagaatcccaagttctttgtggaaaaaaaaaaaaaaatcttttagggtcagattttcccttctaatatcattgaagatgatgttgcattgatttattcataaagtattttaactataggaactctagaagataatggttaggcaagtgattttttttttaaatatggttggcgtaagttgtattttgaaattcacttattttaaaatcgaagaggattgtaatcatggaaatagaatgtttgtatctacctgcccacattttcttaaaaagatatttcatatacagataatgaagaccaagctagtggctgcactgtaggtctgctgcttatttgtatttgttgtgcttctgtttatgttgtagaagctgaaattctagcaacatgcttcaattctgttattttgatacttatgaaaatgtattaggttttactatattgtgcttttgaaagccataactcttaagaactttgtttttgcatattgtttgctaattctttactttaataaacctcaaaacctgaaaaaaaagt

SEQ ID NO: 368332 - DNA, 3806 bp, Homo sapiens
tctacaaaaaatacaaaaattagctgggcatggtggtgcgtgcctgaagtcccagctactcgggaagctgaggcagaagaatcacttgaacctgggaggcggaggttgtggtgagccgagatcgcaccactgcactccagcctgggcgacagagcgagactctgcctcaaaaaacaaaacaaaacaaaacactcacccatcaacgaatatagactcttctctcatttatcgatgatcctctttttccattttttaagtacttatgtggaagctagtctcccaaaacacaatctttagagagaaaagacatgaacgaactccaaaatatccatttaatcaatcatgtttttggctttggataaagaactttgaaccagtttttttctcaggagctgtcaaatggacacttaattatgacatgagaatgaagaaattattttggaaaaaaaaaatgacctaatttacctatcagtgaaagctttattttctggtgccttttgaaagtatatggagtcatatcattcttctgtttaaaatgttagtttggtttgactttccactttgtcctttctgctcttgtgaagaaaaaaatttattgctttttcaatgtgcagccagtggatggttttagttctttcagatgaactgccatttgtgtttcagctcacagttctttgctgggtaaaagaaatactttctgacagtcacctgagccttaaatgtaagtattacatgacatgcattctgtttcttccagagttctgtctgccacacgaaagagaatatttgcttacttgatagaactttggcattttcatcattcttttacttaaccaggcttatggcatgatctctggaacaaatttgtaggaaaaattactccaattgaatgactgatgtatgtaatcaacttcattgggctgcagtaaactagtggaaattagagagttgttttattggtgttttctactgtgagttaattaaaaattgtttttatttggggtcattatgtcacagtcttgagttaacaagatcttacgtgattggccttttctttgttttctcttaggagttgtgtctcatgaatgacagtactaaagctattaacaactaagagtttgacagagaactataagcctgttgtatctcctaaaagttgtcaactccccacccttggactttaaatgaaaattttattcagtccagctattcttacagtccctaaggattttcatatatctatgtataggagataaaatttgctagtaagatttttaaaaactggctagtgaaaggaaagtacctctgaaagaaaccattttagcaaattatggttatatgttttaatttaatctacagaatgttttatagtaaaattctagcaccactagaataatcacatagcatgtacaatatatttatgctggctgaaaagacagaatctgggaataataaaattgcaaccagtttggtaatgcaaacagcagaatagaatgaaatctcagtaatgaattaaagcaacaaaaagatattgattggcaaaaagcaagatataagagattcatttgcttaacatttctacataatatttatggtctggtcagtattggtctggtcagtattgcctggctgacgtgaaatgtaaactagtaggcgtgttattgatctgctaaaactaaccctctttttaagaggagatttaaggaagacgtcaatcaaaatgtcaaatatgtgtgtcagaatataaataatttttcacattgtattgttgctatataaaaaaaataatagaattggttgggtttctgaggtgaaatccagagtaagagtactagacagttcaacaagccacatctaatggcacagatagaggatgtagctattttatacctttcataacatttgagagtaagatatccttcaggatgtgaagtgattattaagtactcatacctgaaatctgttgtcaagattagaactggggttcatgttaaaaaccttccatattacctgagggtacctgtggggaacagttccttcccctgtgtggtagtattttgttggaagagaatgtttatacaaaaaatgaaattcttccaacagcagagaaactctaaaaagtttgatagtacctatcaaagtgctgtacttctgtgatagagaacatctgatgtaccaatttagatctatttctttatactttttctaatcaattgcttaatagtactttggatgattatcacctttgccacttaaaatatataaatatcctttttacttcatgaggaaggaagaattttttgataattactgagttcagccttttgtgatgacttatattttggacttacattttaactttaaagaatgtcagatcccttctttgtcttactagttaaatcctcacctaatctcttgggtatgaatataaatgtgtgtcatcgttatattgttcagctagatgagcaagtatcttagggtagtaggtagcctggtggttttagaagtgtttggtgatttttatggagagagttttcctaagtggtggtttataggtggtatcagatattattagggcagctttttggggagtaatctcaggtctcccagagcagcagcatttttctcattgatataagtaagattcttaggagcttttcttatcacacaagatgcctgaatcgaatgtgagaattgaaggcatttcttctgcataaacaaagaattctacctgctggacagaaacctggaaagttctttggaattcgctgaattacagtttagtatgtcctgattacagagtgacaatatttatcaagcctttgttatattggattatcttctctcttaaaatacaactgtattataattgaaatgacagcccaaaattggatggtttaccaaaaccaatgaaagggatttcacacatcaatttttatttctgttttgaagagcacatgctatataataattgctagtagcaactgcagtaaaacaggtgataagttattttctctgaaaagatccagtcctagagcaggattcttcgatcattcatggcagagtgaaaaaggtttgtatggttcttgtccaaataactcagttcttaaaattcttaaaatgatcgtaaaccattatcctttaaaggtttatttgaagatgctgttaaagtacagaattttgtgtacaggtagatttttccgtccctcattaatagtgccttcttaattaatacagactggtgttagctataacaaaactccagtaaggccaaagaatcccaagttctttgtggaaaaaaaaaaaaaaatcttttagggtcagattttcccttctaatatcattgaagatgatgttgcattgatttattcataaagtattttaactataggaactctagaagataatggttaggcaagtgattttttttttaaatatggttggcgtaagttgtattttgaaattcacttattttaaaatcgaagaggattgtaatcatggaaatagaatgtttgtatctacctgcccacattttcttaaaaagatatttcatatacagataatgaagaccaagctagtggctgcactgtaggtctgctgcttatttgtatttgttgtgcttctgtttatgttgtagaagctgaaattctagcaacatgcttcaattctgttattttgatacttatgaaaatgtattaggttttactatattgtgcttttgaaagccataactcttaagaactttgtttttgcatattgtttgctaattctttactttaataaacctcaaaacctgaaaaaaaagt

SEQ ID NO: 368333 - DNA, 3805 bp, Homo sapiens
tctacaaaaaatacaaaaattagctgggcatggtggtgcgtgcctgaagtcccagctactcgggaagctgaggcagaagaatcacttgaacctgggaggcggaggttgtggtgagccgagatcgcaccactgcactccagcctgggcgacagagcgagactctgcctcaaaaaacaaaacaaaacaaaacactcacccatcaacgaatatagactcttctctcatttatcgatgatcctctttttccattttttaagtacttatgtggaagctagtctcccaaaacacaatctttagagagaaaagacatgaacgaactccaaaatatccatttaatcaatcatgtttttggctttggataaagaactttgaaccagtttttttctcaggagctgtcaaatggacacttaattatgacatgagaatgaagaaattattttggaaaaaaaaaatgacctaatttacctatcagtgaaagctttattttctggtgccttttgaaagtatatggagtcatatcattcttctgtttaaaatgttagtttggtttgactttccactttgtcctttctgctcttgtgaagaaaaaaaaaagcattttcgaggaaagaattatgcaatttcttttgttttctgtgtcattatttattgctttttcaatgtgcagccagtggatggttttagttctttcagatgaactgccatttgtgtttcagctcacagttctttgctgggtaaaagaaatactttctgacagtcacctgagccttaaatgtaagtattacatgacatgcattctgtttcttccagagttctgtctgccacacgaaagagaatatttgcttacttgatagaactttggcattttcatcattcttttacttaaccaggcttatggcatgatctctggaacaaatttgtaggaaaaattactccaattgaatgactgatgtatgtaatcaacttcattgggctgcagtaaactagtggaaattagagagttgttttattggtgttttctactgtgagttaattaaaaattgtttttatttggggtcattatgtcacagtcttgagttaacaagatcttacgtgattggccttttctttgttttctcttaggagttgtgtctcatgaatgacagtactaaagctattaacaactaagagtttgacagagaactataagcctgttgtatctcctaaaagttgtcaactccccacccttggactttaaatgaaaattttattcagtccagctattcttacagtccctaaggattttcatatatctatgtataggagataaaatttgctagtaagatttttaaaaactggctagtgaaaggaaagtacctctgaaagaaaccattttagcaaattatggttatatgttttaatttaatctacagaatgttttatagtaaaattctagcaccactagaataatcacatagcatgtacaatatatttatgctggctgaaaagacagaatctgggaataataaaattgcaaccagtttggtaatgcaaacagcagaatagaatgaaatctcagtaatgaattaaagcaacaaaaagatattgattggcaaaaagcaagatataagagattcatttgcttaacatttctacataatatttatggtctggtcagtattggtctggtcagtattgcctggctgacgtgaaatgtaaactagtaggcgtgttattgatctgctaaaactaaccctctttttaagaggagatttaaggaagacgtcaatcaaaatgtcaaatatgtgtgtcagaatataaataatttttcacattgtattgttgctatataaaaaaaataatagaattggttgggtttctgaggtgaaatccagagtaagagtactagacagttcaacaagccacatctaatggcacagatagaggatgtagctattttatacctttcataacatttgagagtaagatatccttcaggatgtgaagtgattattaagtactcatacctgaaatctgttgtcaagattagaactggggttcatgttaaaaaccttccatattacctgagggtacctgtggggaacagttccttcccctgtgtggtagtattttgttggaagagaatgtttatacaaaaaatgaaattcttccaacagcagagaaactctaaaaagtttgatagtacctatcaaagtgctgtacttctgtgatagagaacatctgatgtaccaatttagatctatttctttatactttttctaatcaattgcttaatagtactttggatgattatcacctttgccactttactgagttcagccttttgtgatgacttatattttggacttacattttaactttaaagaatgtcagatcccttctttgtcttactagttaaatcctcacctaatctcttgggtatgaatataaatgtgtgtcatcgttatattgttcagctagatgagcaagtatcttagggtagtaggtagcctggtggttttagaagtgtttggtgatttttatggagagagttttcctaagtggtggtttataggtggtatcagatattattagggcagctttttggggagtaatctcaggtctcccagagcagcagcatttttctcattgatataagtaagattcttaggagcttttcttatcacacaagatgcctgaatcgaatgtgagaattgaaggcatttcttctgcataaacaaagaattctacctgctggacagaaacctggaaagttctttggaattcgctgaattacagtttagtatgtcctgattacagagtgacaatatttatcaagcctttgttatattggattatcttctctcttaaaatacaactgtattataattgaaatgacagcccaaaattggatggtttaccaaaaccaatgaaagggatttcacacatcaatttttatttctgttttgaagagcacatgctatataataattgctagtagcaactgcagtaaaacaggtgataagttattttctctgaaaagatccagtcctagagcaggattcttcgatcattcatggcagagtgaaaaaggtttgtatggttcttgtccaaataactcagttcttaaaattcttaaaatgatcgtaaaccattatcctttaaaggtttatttgaagatgctgttaaagtacagaattttgtgtacaggtagatttttccgtccctcattaatagtgccttcttaattaatacagactggtgttagctataacaaaactccagtaaggccaaagaatcccaagttctttgtggaaaaaaaaaaaaaaatcttttagggtcagattttcccttctaatatcattgaagatgatgttgcattgatttattcataaagtattttaactataggaactctagaagataatggttaggcaagtgattttttttttaaatatggttggcgtaagttgtattttgaaattcacttattttaaaatcgaagaggattgtaatcatggaaatagaatgtttgtatctacctgcccacattttcttaaaaagatatttcatatacagataatgaagaccaagctagtggctgcactgtaggtctgctgcttatttgtatttgttgtgcttctgtttatgttgtagaagctgaaattctagcaacatgcttcaattctgttattttgatacttatgaaaatgtattaggttttactatattgtgcttttgaaagccataactcttaagaactttgtttttgcatattgtttgctaattctttactttaataaacctcaaaacctgaaaaaaaagt

SEQ ID NO: 368334 - DNA, 3411 bp, Homo sapiens
tctacaaaaaatacaaaaattagctgggcatggtggtgcgtgcctgaagtcccagctactcgggaagctgaggcagaagaatcacttgaacctgggaggcggaggttgtggtgagccgagatcgcaccactgcactccagcctgggcgacagagcgagactctgcctcaaaaaacaaaacaaaacaaaacactcacccatcaacgaatatagactcttctctcatttatcgatgatcctctttttccattttttaagtacttatgtggaagctagtctcccaaaacacaatctttagagagaaaagacatgaacgaactccaaaatatccatttaatcaatcatgtttttggctttggataaagaactttgaaccagtttttttctcaggagctgtcaaatggacacttaattatgacatgagaatgaagaaattattttggaaaaaaaaaatgacctaatttacctatcagtgaaagctttattttctggtgccttttgaaagtatatggagtcatatcattcttctgtttaaaatgttagtttggtttgactttccactttgtcctttctgctcttgtgaagaaaaaaaaaagcattttcgaggaaagaattatgcaatttcttttgttttctgtgtcattatttattgctttttcaatgtgcagccagtggatggttttagttctttcagatgaactgccatttgtgtttcagctcacagttctttgctgggtaaaagaaatactttctgacagtcacctgagccttaaatgtaagtattacatgacatgcattctgtttcttccagagttctgtctgccacacgaaagagaatatttgcttacttgatagaactttggcattttcatcattcttttacttaaccaggcttatggcatgatctctggaacaaatttgtaggaaaaattactccaattgaatgactgatgtatgtaatcaacttcattgggctgcagtaaactagtggaaattagagagttgttttattggtgttttctactgtgagttaattaaaaattgtttttatttggggtcattatgtcacagtcttgagttaacaagatcttacgtgattggccttttctttgttttctcttaggagttgtgtctcatgaatgacagtactaaagctattaacaactaagagtttgacagagaactataagcctgttgtatctcctaaaagttgtcaactccccacccttggactttaaatgaaaattttattcagtccagctattcttacagtccctaaggattttcatatatctatgtataggagataaaatttgctagtaagatttttaaaaactggctagtgaaaggaaagtacctctgaaagaaaccattttagcaaattatggttatatgttttaatttaatctacagaatgttttatagtaaaattctagcaccactagaataatcacatagcatgtacaatatatttatgctggctgaaaagacagaatctgggaataataaaattgcaaccagtttggtaatgcaaacagcagaatagaatgaaatctcagtaatgaattaaagcaacaaaaagatattgattggcaaaaagcaagatataagagattcatttgcttaacatttctacataatatttatggtctggtcagtattggtctggtcagtattgcctggctgacgtgaaatgtaaactagtaggcgtgttattgatctgctaaaactaaccctctttttaagaggagatttaaggaagacgtcaatcaaaatgtcaaatatgtgtgtcagaatataaataatttttcacattgtattgttgctatataaaaaaaataatagaattggttgggtttctgaggtgaaatccagagtaagagtactagacagttcaacaagccacatctaatggcacagatagaggatgtagctattttatacctttcataacatttgagagtaagatatccttcaggatgtgaagtgattattaagtactcatacctgaaatctgttgtcaagattagaactggggttcatgttaaaaaccttccatattacctgagggtacctgtggggaacagttccttcccctgtgtggtagtattttgttggaagagaatgtttatacaaaaaatgaaattcttccaacagcagagaaactctaaaaagtttgatagtacctatcaaagtgctgtacttctgtgatagagaacatctgatgtaccaatttagatctatttctttatactttttctaatcaattgcttaatagtactttggatgattatcacctttgccacttaaaatatataaatatcctttttacttcatgaggaaggaagaattttttgataattactgagttcagccttttgtgatgacttatattttggacttacattttaactttaaagaatgtcagatcccttctttgtcttactagttaaatcctcacctaatctcttgggtatgaatataaatgtgtgtcatcgttatattgttcagctagatgagcaagtatcttagggtagtaggtagcctggtggttttagaagtgtttggtgatttttatggagagagttttcctaagtggtggtttataggtggtatcagatattattagggcagctttttggggagtaatctcaggtctcccagagcagcagcatttttctcattgatataagtaagattcttaggagcttttcttatcacacaagatgcctgaatcgaatgtgagaattgaaggcatttcttctgcataaacaaagaattctacctgctggacagaaacctggaaagttctttggaattcgctgaattacagtttagtatgtcctgattacagagtgacaatatttatcaagcctttgttatattggattatcttctctcttaaaatacaactgtattataattgaaatgacagcccaaaattggatggtttaccaaaaccaatgaaagggatttcacacatcaatttttatttctgttttgaagagcacatgctatataataattgctagtagcaactgcagtaaaacaggtgataagttattttctctgaaaagatccagtcctagagcaggattcttcgatcattcatggcagagtgaaaaaggtttgtatggttcttgtccaaataactcagttcttaaaattcttaaaatgatcgtaaaccattatcctttaaaggtttatttgaagatgctgttaaagtacagaattttgtgtacaggtagatttttccgtccctcattaatagtttatgctgtacagcataaactatttgtaagtggtcaaaaccagaagcaaccagagcccctcagcagaatgggaaaatatgaaatatacagtaataagaacaatgaacttcaatttacacatgtatacgttcacatcataa

SEQ ID NO: 368335 - DNA, 1258 bp, Homo sapiens
tctacaaaaaatacaaaaattagctgggcatggtggtgcgtgcctgaagtcccagctactcgggaagctgaggcagaagaatcacttgaacctgggaggcggaggttgtggtgagccgagatcgcaccactgcactccagcctgggcgacagagcgagactctgcctcaaaaaacaaaacaaaacaaaacactcacccatcaacgaatatagactcttctctcatttatcgatgatcctctttttccattttttaagtacttatgtggaagctagtctcccaaaacacaatctttagagagaaaagacatgaacgaactccaaaatatccatttaatcaatcatgtttttggctttggataaagaactttgaaccagtttttttctcaggagctgtcaaatggacacttaattatgacatgagaatgaagaaattattttggaaaaaaaaaatgacctaatttacctatcagtgaaagctttattttctggtgccttttgaaagtatatggagtcatatcattcttctgtttaaaatgttagtttggtttgactttccactttgtcctttctgctcttgtgaagaaaaaaaaaagcattttcgaggaaagaattatgcaatttcttttgttttctgtgtcattatttattgctttttcaatgtgcagccagtggatggttttagttctttcagatgaactgccatttgtgtttcagctcacagttctttgctgggtaaaagaaatactttctgacagtcacctgagccttaaatgtaagtattacatgacatgcattctgtttcttccagagttctgtctgccacacgaaagagaatatttgcttacttgatagaactttggcattttcatcattcttttacttaaccaggcttatggcatgatctctggaacaaatttgtaggaaaaattactccaattgaatgactgatgtatgtaatcaacttcattgggctgcagtaaactagtggaaattagagagttgttttattggtgttttctactgtgagttaattaaaaattgtttttatttggggtcattatgtcacagtcttgagttaacaagatcttacgtgattggccttttctttgttttctcttaggagttgtgtctcatgaatgacagtactaaagctattaacaactaagagtttgacagagaactataagcctgttgtatctcctaaaagttgtcaactccccacccttggactttaaatgaaaattttattcagtcca

SEQ ID NO: 368336 - DNA, 377 bp, Homo sapiens
agagatcatctagagaaacctcccaaaaataaggcataccatccctctgatggttgaaacacacttagttctgggcagaataaatgaaaacaaattcatacctcgatatattgcagtgaattttctgaacttcaaaaacaatgagaaaatcttaaaagtcactgagataaatgacagattgaggaaaggaagcaggcgggcagctggtggtcttccaagcactatagctgatcagcaaccagagattccagagaaacatggaatgataccttaaagtgctgaggctaactaactgctgagcacaaaggatattttttcaggcacacacagggattctgaaagtgtaaagacgagtcccaggccctcatttgaatatt

SEQ ID NO: 368337 - DNA, 389 bp, Homo sapiens
gcttaaaagaacaatcacttgattgtatctcgtggtcctaggggtggatgaggctcagctgcatgactgtcacttggggtctttcatgtggttgtagtcagatggcggctgagtcaggagtcacctgaagatttcatccatgcctcttacctgggctgcaatggcgaggacagatggaggctggtccattgtgtctctctccatgcagcctccttgtgtggccagcctgaattcctcagtggtgatggccttccccacagcaagtggtccaaagtggaagctgccagtcctcttctaggaactggcccggtgtctccttcatcattttctattggttaaaacagtcacaggtggccagacgcggtggctcatgcctgtaatcccagcac

SEQ ID NO: 368338 - DNA, 2011 bp, Homo sapiens
tttctcaacagcccacctctttggactaacactaaactggaagataaaacctacacccagatttaaacacctggatccaccgatctggaacccaagttaagactgtgcagggcattcagccagcactgcacacccctcagaagttcactgactttcgttttgcacctccaggtctgatacgtggcgcctggtgaacccaccagcacggccccaccttgaaaattctctcagacgtccctcggcagcccacaatgggcagaaggtgacagccatggcaacgaggatcacagcccgggtggaaggtggttaccacagcaaccgcagtgtcttctgcaccatcctgtgaggacacagacctgcttcagggccaagcctggatgggtgctcagaggagctaaggtggaaatactgcctgaaaagactccgcccctccccctccccctcgaacaaatgggtcccgggcctccaaaacacggtacctccagaacacttcagctccacagcccatagcaagaagaaagtgggcaatgtttttcagggagaagggatagaagctggtgggtttccagtcactcgaagtctataaagattgtgaagagcgggggaagctcaaatgctgaagcttttggtcaggattttctctgagttctaaggaactgtgttttacacacaccaaacccagactcttctcaggaaagagcagatttacttctgatggcgggaagtgattctagtgaggtggagagagacaactgctccagaattttcccctttgctagagctgtctccctctcaatccctccagggaccccaccacaccctcccagctgtctctggaggctggaggagttgagtttggttgacttgaggacttggacatggacctgggaggaaggaaggacctgggagcaacaggagaccccatggaaaggctgccccagggatgacaagagggacatgctgaaacaggtggggctgcagcgtgcaggcagatgctaggctgggtgggcagggatgcacaaggctctactccatccccagagagctcccaaatgcagaaggattcaaaccccatgtgagcgtgcccacaccagccgcccctcctgagcatcagcctgttcagatgagggtacctgggcctctcgttcgcatctgtgttctcatggatgagcgctggtctttactgaccctcccaagcctccccactctgtgccttggctcatgctctttcctcctcccggcatgcccttctcccccatctccgtgtcctcgttcctcaaggtttagccgagacactgccacctccacatagctctccctgccctctttccccctctgggcctcagtggcctttctctgctccctctcagggtactgagcactttctgccttgtcctggagctatctgggtccattgcctgaccccccactcacctgtgtgctccccgtaggtagggccacttctgactgtgtgtccccagatccagcctggggttggggtaggattagtggcctgagtgaggagaggaaggccagctcccagaggactttactgaaccgtactgtgaatatgtccaagtcccaaagccaggtgaggtcagaccccactgcctgaggaagagggctggatgcagggccagctcaacctgaacaatcccctcccactcggcctttcctgtggggccttcaccagcctgctggggtcactgtcgtgcacttggctgcgtggctggttctattggccctaggtgctgctctgttgggtgggatgggagggggtagagggagccaggagcactgggttctccctgagaacactgggcacaagagtactggcctcttctatccctggcactgtcctttgcacttgtttggtggccccaatgtgagtcgctgtaaaaaatgctgccgttactattttctaagaaatgacttttctgtgaaccaacagtaacaaaaacctcagtaaccaaaataaagttctatattttaaaaaaggcaaaaaaaaaag

SEQ ID NO: 368339 - DNA, 2207 bp, Homo sapiens
tggccaacaacagcatctcctgcaaccggcaaagtggggtcaaggttgaggcccagtgcaaagtggagctccggggcaatggtatctatgacaacagaggccacggcattatcaccaagggcgacagcaccatcgtcattgaaaacgatatcattggcaaccggggcagcgggctgcagctgctgcccaggtccgacactaaagtaataaagaaccggatccactcgttccgggcctacggcatcgccgtgcggggccgtgccaaggccctggtgcaggaaaacatcatcttccagggcaaaaccagtaagaccatctttcagcagatctcaaacaaccgagaatgcatcatgcaaaacaacaagttcctggtcttcaagaaaaagtctgatacgtggcgcctggtgaacccaccagcacggccccaccttgaaaattctctcagacgtccctcggcagcccacaatgggcagaaggtgacagccatggcaacgaggatcacagcccgggtggaaggtggttaccacagcaaccgcagtgtcttctgcaccatcctgtgaggacacagacctgcttcagggccaagcctggatgggtgctcagaggagctaaggtggaaatactgcctgaaaagactccgcccctccccctccccctcgaacaaatgggtcccgggcctccaaaacacggtacctccagaacacttcagctccacagcccatagcaagaagaaagtgggcaatgtttttcagggagaagggatagaagctggtgggtttccagtcactcgaagtctataaagattgtgaagagcgggggaagctcaaatgctgaagcttttggtcaggattttctctgagttctaaggaactgtgttttacacacaccaaacccagactcttctcaggaaagagcagatttacttctgatggcgggaagtgattctagtgaggtggagagagacaactgctccagaattttcccctttgctagagctgtctccctctcaatccctccagggaccccaccacaccctcccagctgtctctggaggctggaggagttgagtttggttgacttgaggacttggacatggacctgggaggaaggaaggacctgggagcaacaggagaccccatggaaaggctgccccagggatgacaagagggacatgctgaaacaggtggggctgcagcgtgcaggcagatgctaggctgggtgggcagggatgcacaaggctctactccatccccagagagctcccaaatgcagaaggattcaaaccccatgtgagcgtgcccacaccagccgcccctcctgagcatcagcctgttcagatgagggtacctgggcctctcgttcgcatctgtgttctcatggatgagcgctggtctttactgaccctcccaagcctccccactctgtgccttggctcatgctctttcctcctcccggcatgcccttctcccccatctccgtgtcctcgttcctcaaggtttagccgagacactgccacctccacatagctctccctgccctctttccccctctgggcctcagtggcctttctctgctccctctcagggtactgagcactttctgccttgtcctggagctatctgggtccattgcctgaccccccactcacctgtgtgctccccgtaggtagggccacttctgactgtgtgtccccagatccagcctggggttggggtaggattagtggcctgagtgaggagaggactttactgaaccgtactgtgaatatgtccaagtcccaaagccaggtgaggtcagaccccactgcctgaggaagagggctggatgcagggccagctcaacctgaacaatcccctcccactcggcctttcctgtggggccttcaccagcctgctggggtcactgtcgtgcacttggctgcgtggctggttctattggccctaggtgctgctctgttgggtgggatgggagggggtagagggagccaggagcactgggttctccctgagaacactgggcacaagagtactggcctcttctatccctggcactgtcctttgcacttgtttggtggccccaatgtgagtcgctgtaaaaaatgctgccgttactattttctaagaaatgacttttctgtgaaccaacagtaacaaaaacctcagtaaccaaaataaagttctatattttaaaaaaggcaaaaaaaaaag

SEQ ID NO: 368340 - DNA, 689 bp, Homo sapiens
tggccaacaacagcatctcctgcaaccggcaaagtggggtcaaggttgaggcccagtgcaaagtggagctccggggcaatggtatctatgacaacagaggccacggcattatcaccaagggcgacagcaccatcgtcattgaaaacgatatcattggcaaccggggcagcgggctgcagctgctgcccaggtccgacactaaagtaataaagaaccggatccactcgttccgggcctacggcatcgccgtgcggggccgtgccaaggccctggtgcaggaaaacatcatcttccagggcaaaaccagtaagaccatctttcagcagatctcaaacaaccgagaatgcatcatgcaaaacaacaagttcctggtcttcaagaaaaagtgagtgcttggggttgcctgaacgagtcctctagagccacagtaagctccctgaagaagccaggcccacacccagggattgtggctgcccgggctccctgcaaccctgccagctgtcgactccagtcagaaaaaggcctgtgcctggctctatgtcaggcccgggctgaggactccccaggagggaacaagctttttaagagtcaggggtatgtggtttcagatctcagctctgcaggttactggctgtgtgaccttgggcaacttacttcacatcttcgagccttagtaaaatccatttaat

SEQ ID NO: 368341 - DNA, 2225 bp, Homo sapiens
tggccaacaacagcatctcctgcaaccggcaaagtggggtcaaggttgaggcccagtgcaaagtggagctccggggcaatggtatctatgacaacagaggccacggcattatcaccaagggcgacagcaccatcgtcattgaaaacgatatcattggcaaccggggcagcgggctgcagctgctgcccaggtccgacactaaagtaataaagaaccggatccactcgttccgggcctacggcatcgccgtgcggggccgtgccaaggccctggtgcaggaaaacatcatcttccagggcaaaaccagtaagaccatctttcagcagatctcaaacaaccgagaatgcatcatgcaaaacaacaagttcctggtcttcaagaaaaagtctgatacgtggcgcctggtgaacccaccagcacggccccaccttgaaaattctctcagacgtccctcggcagcccacaatgggcagaaggtgacagccatggcaacgaggatcacagcccgggtggaaggtggttaccacagcaaccgcagtgtcttctgcaccatcctgtgaggacacagacctgcttcagggccaagcctggatgggtgctcagaggagctaaggtggaaatactgcctgaaaagactccgcccctccccctccccctcgaacaaatgggtcccgggcctccaaaacacggtacctccagaacacttcagctccacagcccatagcaagaagaaagtgggcaatgtttttcagggagaagggatagaagctggtgggtttccagtcactcgaagtctataaagattgtgaagagcgggggaagctcaaatgctgaagcttttggtcaggattttctctgagttctaaggaactgtgttttacacacaccaaacccagactcttctcaggaaagagcagatttacttctgatggcgggaagtgattctagtgaggtggagagagacaactgctccagaattttcccctttgctagagctgtctccctctcaatccctccagggaccccaccacaccctcccagctgtctctggaggctggaggagttgagtttggttgacttgaggacttggacatggacctgggaggaaggaaggacctgggagcaacaggagaccccatggaaaggctgccccagggatgacaagagggacatgctgaaacaggtggggctgcagcgtgcaggcagatgctaggctgggtgggcagggatgcacaaggctctactccatccccagagagctcccaaatgcagaaggattcaaaccccatgtgagcgtgcccacaccagccgcccctcctgagcatcagcctgttcagatgagggtacctgggcctctcgttcgcatctgtgttctcatggatgagcgctggtctttactgaccctcccaagcctccccactctgtgccttggctcatgctctttcctcctcccggcatgcccttctcccccatctccgtgtcctcgttcctcaaggtttagccgagacactgccacctccacatagctctccctgccctctttccccctctgggcctcagtggcctttctctgctccctctcagggtactgagcactttctgccttgtcctggagctatctgggtccattgcctgaccccccactcacctgtgtgctccccgtaggtagggccacttctgactgtgtgtccccagatccagcctggggttggggtaggattagtggcctgagtgaggagaggaaggccagctcccagaggactttactgaaccgtactgtgaatatgtccaagtcccaaagccaggtgaggtcagaccccactgcctgaggaagagggctggatgcagggccagctcaacctgaacaatcccctcccactcggcctttcctgtggggccttcaccagcctgctggggtcactgtcgtgcacttggctgcgtggctggttctattggccctaggtgctgctctgttgggtgggatgggagggggtagagggagccaggagcactgggttctccctgagaacactgggcacaagagtactggcctcttctatccctggcactgtcctttgcacttgtttggtggccccaatgtgagtcgctgtaaaaaatgctgccgttactattttctaagaaatgacttttctgtgaaccaacagtaacaaaaacctcagtaaccaaaataaagttctatattttaaaaaaggcaaaaaaaaaag

SEQ ID NO: 368342 - DNA, 2074 bp, Homo sapiens
tggccaacaacagcatctcctgcaaccggcaaagtggggtcaaggttgaggcccagtgcaaagtggagctccggggcaatggtatctatgacaacagaggccacggcattatcaccaagggcgacagcaccatcgtcattgaaaacgatatcattggcaaccggggcagcgggctgcagctgctgcccaggtccgacactaaagtaataaagaaccggatccactcgttccgggcctacggcatcgccgtgcggggccgtgccaaggccctggtgcaggaaaacatcatcttccagggcaaaaccagtaagaccatctttcagcagatctcaaacaaccgagaatgcatcatgcaaaacaacaagttcctggtcttcaagaaaaagtctgatacgtggcgcctggtgaacccaccagcacggccccaccttgaaaattctctcagacgtccctcggcagcccacaatgggcagaaggtgacagccatggcaacgaggatcacagcccgggtggaaggtggttaccacagcaaccgcagtgtcttctgcaccatcctgtgaggacacagacctgcttcagggccaagcctggatgggtgctcagaggagctaaggtggaaatactgcctgaaaagactccgcccctccccctccccctcgaacaaatgggtcccgggcctccaaaacacggtacctccagaacacttcagctccacagcccatagcaagaagaaagtgggcaatgtttttcagggagaagggatagaagctggtgggtttccagtcactcgaagtctataaagattgtgaagagcgggggaagctcaaatgctgaagcttttggtcaggattttctctgagttctaaggaactgtgttttacacacaccaaacccagactcttctcaggaaagagcagatttacttctgatggcgggaagtgattctagtgaggtggagagagacaactgctccagaattttcccctttgctagagctgtctccctctcaatccctccagggaccccaccacaccctcccagctgtctctggaggctggaggagttgagtttggttgacttgaggacttggacatggacctgggaggaaggaaggacctgggagcaacaggagaccccatggaaaggctgccccagggatgacaagagggacatgctgaaacaggtggggctgcagcgtgcaggcagatgctaggctgggtgggcagggatgcacaaggctctactccatccccagagagctcccaaatgcagaaggattcaaaccccatgtgagcgtgcccacaccagccgcccctcctgagcatcagcctgttcagatgagggtacctgggcctctcgttcgcatctgtgttctcatggatgagcgctggtctttactgaccctcccaagcctccccactctgtgccttggctcatgctctttcctcctcccggcatgcccttctcccccatctccgtgtcctcgttcctcaaggtttagccgagacactgccacctccacatagctctccctgccctctttccccctctgggcctcagtggcctttctctgctccctctcagggtactgagcactttctgccttgtcctggagctatctgggtccattgcctgaccccccactcacctgtgtgctccccgtaggtagggccacttctgactgtgtgtccccagatccagcctggggttggggtaggattagtggcctgagtgaggagaggaaggccagctcccagaggactttactgaaccgtactgtgaatatgtccaagtcccaaagccaggtgaggtcagaccccactgcctgaggaagagggctggatgcagggccagctcaacctgaacaatcccctcccactcggcctttcctgtggggccttcaccagcctgctggggtcactgtcgtgcattgtttggtggccccaatgtgagtcgctgtaaaaaatgctgccgttactattttctaagaaatgacttttctgtgaaccaacagtaacaaaaacctcagtaaccaaaataaagttctatattttaaaaaaggcaaaaaaaaaag

SEQ ID NO: 368343 - DNA, 1961 bp, Homo sapiens
ctcatcttcacgttttctgcatctattgaagtgcgccactgagatcgtggagttcttccctgtttgtccatatgatgaacaacactgattttctgatgttgaacaatccctggaataaactctgtttggtttccatggatttctgtttccctttagattttgttagtaatttattttggatttttgcatccaagttcataattgtaactggacaaataaaggcagattttaaaaggacaagttgggaggctaaggcggaaggatcacttgagcctgggagattgaagctgcagctagcttcgattgttccactgtactccagcctggtgacagcaggacctgcctctaaaataataatacttaaaaggacgagtttacctacagtctcaccaagcaatgaaagagcttatcttcttcctgtttcctttacggatcttgctcatgtattttatcttagttactttagcataaatgctaaatcaaattctttttcactagacatcataatagctctaggcataccacataatacccaagcacattttaatcattaaaattgtttcctttttttgtggctactgtaaccacttcagcgaaccatttagtgtgtagtgggtttaaattttttctccttcctgggataaatttcccaggagagggataattgggtcaaaagttacgaacatatttatgggttcttttccacaagagatcgatcagtttgcaagtgccatctgcactgtgggggaaccaatcttcaacttgcctgcatttggtattagtatttcattaacctttcattgatctaattacggctctttgacacaattttcatcagtgatggactaagtgtgatccggcctgacccgcctccggccggcgtgagaaggggcatgtgtcgggctaccctcgggcttcccctgccgcccattgtgatccagcccgctaggcgctccctgccgcccattgtgacgcctgccagccgcaggctgggtccccgaggcgggcggcatttaggctcggtctccacagccatggccgcgacgcaggagctgctgctgcagttgcagaaggataaccgagatggtcgccagcggaagcaggagctagagaagctgatgcgcgggctcgaggccgagagcgagagcctgcctcaaccagcgcctgcaggacctgagcgagcgggagcggaggctgctgcggaggcgaagccaggaagcgctgcttctgcaaggggaggtgcgcgaggcggcgcgggagcgcgcgcagcgggtgcgcagaagactggaggaggcggagcgccacaaggaggacttgaagcccggtaaaccccgtccttacgagccccgcccctagctcttctactacggaggggaactgcagagccagaagagcacggagcagcaactcgcagcccaattggtgacgctgcagaatgaactggagctggcggagaccaaatgcgccttgcaggaggagaagctgcagcaggacgcgctgcagacagcggaggcctgggccatattccaggagcagaccgtagtcctgcaggtgtgacgggcagcttcgcagagtgcagtacagcaccgagtcgctcatggaggagatggccagggcggaccgagagacgcggctgttcggcggtcctcgcgcgctggccatcaggcgctgctgacgctgccgctcctcttcctggggctgtcgctgctctggacggtgctgttggaccccggcgccgtctccgcgtggctctggagcctcacctcggagacgacgctgcgccgcctgcgctacacgctgtccccgctgctggagctgcgcgctaacgggctgctgccaacctaagtgcagcgccccgcgcctggctccaggtggactccagggcaccggctttatttctggtgcactcctctcctgagagtgtagaccaaggtcgcctaataaactcctcaagggatgaa

SEQ ID NO: 368344 - DNA, 2204 bp, Homo sapiens
ctcatcttcacgttttctgcatctattgaagtgcgccactgagatcgtggagttcttccctgtttgtccatatgatgaacaacactgattttctgatgttgaacaatccctggaataaactctgtttggtttccatggatttctgtttccctttagattttgttagtaatttattttggatttttgcatccaagttcataattgtaactggacaaataaaggcagattttaaaaggacaagttgggaggctaaggcggaaggatcacttgagcctgggagattgaagctgcagctagcttcgattgttccactgtactccagcctggtgacagcaggacctgcctctaaaataataatacttaaaaggacgagtttacctacagtctcaccaagcaatgaaagagcttatcttcttcctgtttcctttacggatcttgctcatgtattttatcttagttactttagcataaatgctaaatcaaattctttttcactagacatcataatagctctaggcataccacataatacccaagcacattttaatcattaaaattgtttcctttttttgtggctactgtaaccacttcagcgaaccatttagtgtgtagtgggtttaaattttttctccttcctgggataaatttcccaggagagggataattgggtcaaaagttacgaacatatttatgggttcttttccacaagagatcgatcagtttgcaagtgccatctgcactgtgggggaaccaatcttcaacttgcctgcatttggtattagtatttcattaacctttcattgatctaattacggctctttgacacaattttcatcagtgatggactaagtgtgatccggcctgacccgcctccggccggcgtgagaaggggcatgtgtcgggctaccctcgggcttcccctgccgcccattgtgatccagcccgctaggcgctccctgccgcccattgtgacgcctgccagccgcaggctgggtccccgaggcgggcggcatttaggctcggtctccacagccatggccgcgacgcaggagctgctgctgcagttgcagaaggataaccgagatggtcgccagcggaagcaggagctagagaagctgatgcgcgggctcgaggccgagagcgagagcctgcctcaaccagcgcctgcaggacctgagcgagcgggagcggaggctgctgcggaggcgaagccaggaagcgctgcttctgcaaggggaggtgcgcgaggcggcgcgggagcgcgcgcagcgggtgcgcagaagactggaggaggcggagcgccacaaggaggacttggtgaggaagagtcctggaatggggctggacccagggtggggtggggcagggcgggcggaagggggcaggatccgggggtggggtgaggtaggaccggcggtgaggccggcaccgccccaggaccctgtccgcaggagcagcacagcaggcagctgcagggcagtgggaggagctgtcgagtcagaagcccggtaaaccccgtccttacgagccccgcccctagctcttctactacggaggggaactgcagagccagaagagcacggagcagcaactcgcagcccaattggtgacgctgcagaatgaactggagctggcggagaccaaatgcgccttgcaggaggagaagctgcagcaggacgcgctgcagacagcggaggcctgggccatattccaggagcagaccgtagtcctgcaggtgcggccccactcagacgccaaggtgcctcccgcctctcctcccccagacctggggcggtgtgacgggcagcttcgcagagtgcagtacagcaccgagtcgctcatggaggagatggccagggcggaccgagagacgcggctgttcggcggtcctcgcgcgctggccatcaggcgctgctgacgctgccgctcctcttcctggggctgtcgctgctctggacggtgctgttggaccccggcgccgtctccgcgtggctctggagcctcacctcggagacgacgctgcgccgcctgcgctacacgctgtccccgctgctggagctgcgcgctaacgggctgctgccaacctaagtgcagcgccccgcgcctggctccaggtggactccagggcaccggctttatttctggtgcactcctctcctgagagtgtagaccaaggtcgcctaataaactcctcaagggatgaa

SEQ ID NO: 368345 - DNA, 1795 bp, Homo sapiens
gtcgtctcaggaaactttttaatgaaagtgttggccacggtggtgtgtaggtggctgagctcagattgcagctgctgagacaccagccacttaccaagagaaagccaggctgcttcaaacccagggcccgcggcaaaaaagcatcacttccggccggggagtctggaagccacgccttgtgggaggtcacactggcatctaggccttcgcctgcactgcagaaggagagccgggtccccctcctggagaacgctgcgttccccagccccacaccggctttgccaccacacaggctgttgaggcaggaggcgggtaagacgtagctgtagacccaaagcaaccaccagccctgggaccctgcatttggtattagtatttcattaacctttcattgatctaattacggctctttgacacaattttcatcagtgatggactaagtgtgatccggcctgacccgcctccggccggcgtgagaaggggcatgtgtcgggctaccctcgggcttcccctgccgcccattgtgatccagcccgctaggcgctccctgccgcccattgtgacgcctgccagccgcaggctgggtccccgaggcgggcggcatttaggctcggtctccacagccatggccgcgacgcaggagctgctgctgcagttgcagaaggataaccgagatggtcgccagcggaagcaggagctagagaagctgatgcgcgggctcgaggccgagagcgagagcctgcctcaaccagcgcctgcaggacctgagcgagcgggagcggaggctgctgcggaggcgaagccaggaagcgctgcttctgcaaggggaggtgcgcgaggcggcgcgggagcgcgcgcagcgggtgcgcagaagactggaggaggcggagcgccacaaggaggacttggtgaggaagagtcctggaatggggctggacccagggtggggtggggcagggcgggcggaagggggcaggatccgggggtggggtgaggtaggaccggcggtgaggccggcaccgccccaggaccctgtccgcaggagcagcacagcaggcagctgcagggcagtgggaggagctgtcgagtcagaagcccggtaaaccccgtccttacgagccccgcccctagctcttctactacggaggggaactgcagagccagaagagcacggagcagcaactcgcagcccaattggtgacgctgcagaatgaactggagctggcggagaccaaatgcgccttgcaggaggagaagctgcagcaggacgcgctgcagacagcggaggcctgggccatattccaggagcagaccgtagtcctgcaggtgcggccccactcagacgccaaggtgcctcccgcctctcctcccccagacctggggcggtgtgacgggcagcttcgcagagtgcagtacagcaccgagtcgctcatggaggagatggccagggcggaccgagagacgcggctgttcggcggtcctcgcgcgctggccatcaggcgctgctgacgctgccgctcctcttcctggggctgtcgctgctctggacggtgctgttggaccccggcgccgtctccgcgtggctctggagcctcacctcggagacgacgctgcgccgcctgcgctacacgctgtccccgctgctggagctgcgcgctaacgggctgctgccaacctaagtgcagcgccccgcgcctggctccaggtggactccagggcaccggctttatttctggtgcactcctctcctgagagtgtagaccaaggtcgcctaataaactcctcaagggatgaa

SEQ ID NO: 368346 - DNA, 2236 bp, Homo sapiens
ctcatcttcacgttttctgcatctattgaagtgcgccactgagatcgtggagttcttccctgtttgtccatatgatgaacaacactgattttctgatgttgaacaatccctggaataaactctgtttggtttccatggatttctgtttccctttagattttgttagtaatttattttggatttttgcatccaagttcataattgtaactggacaaataaaggcagattttaaaaggacaagttgggaggctaaggcggaaggatcacttgagcctgggagattgaagctgcagctagcttcgattgttccactgtactccagcctggtgacagcaggacctgcctctaaaataataatacttaaaaggacgagtttacctacagtctcaccaagcaatgaaagagcttatcttcttcctgtttcctttacggatcttgctcatgtattttatcttagttactttagcataaatgctaaatcaaattctttttcactagacatcataatagctctaggcataccacataatacccaagcacattttaatcattaaaattgtttcctttttttgtggctactgtaaccacttcagcgaaccatttagtgtgtagtgggtttaaattttttctccttcctgggataaatttcccaggagagggataattgggtcaaaagttacgaacatatttatgggttcttttccacaagagatcgatcagtttgcaagtgccatctgcactgtgggggaaccaatcttcaacttgcctgcatttggtattagtatttcattaacctttcattgatctaattacggctctttgacacaattttcatcagtgatggactaagtgtgatccggcctgacccgcctccggccggcgtgagaaggggcatgtgtcgggctaccctcgggcttcccctgccgcccattgtgatccagcccgctaggcgctccctgccgcccattgtgacgcctgccagccgcaggctgggtccccgaggcgggcggcatttaggctcggtctccacagccatggccgcgacgcaggagctgctgctgcagttgcagaaggataaccgagatggtcgccagcggaagcaggagctagagaagctgatgcgcgggctcgaggccgagagcgagagcctgcctcaaccagcgcctgcaggacctgagcgagcgggagcggaggctgctgcggaggcgaagccaggaagcgctgcttctgcaaggggaggtgcgcgaggcggcgcgggagcgcgcgcagcgggtgcgcagaagactggaggaggcggagcgccacaaggaggacttgaagcccggtaaaccccgtccttacgagccccgcccctagctcttctactacggaggggaactgcagagccagaagagcacggagcagcaactcgcagcccaattggtgacgctgcagaatgaactggagctggcggagaccaaatgcgccttgcaggaggagaagctgcagcaggacgcgctgcagacagcggaggcctgggccatattccaggagcagaccgtagtcctgcaggtgcggccccactcagacgccaaggtgcctcccgcctctcctcccccagacctggggcggtaagtctcccaacccaccgccaggacgcctccccgaggcctcagtccgcactctcacccgctccaggaggtgcaggtgaaggtgatggaggctgcggaggagctggacgcctggcagagtggccgggaactgtaagggagttgggcttgcgggcgcggcggggcactgtggggccgggccgggctgggctcccacctgcatgcctgtccccgcaggtgtgacgggcagcttcgcagagtgcagtacagcaccgagtcgctcatggaggagatggccagggcggaccgagagacgcggctgttcggcggtcctcgcgcgctggccatcaggcgctgctgacgctgccgctcctcttcctggggctgtcgctgctctggacggtgctgttggaccccggcgccgtctccgcgtggctctggagcctcacctcggagacgacgctgcgccgcctgcgctacacgctgtccccgctgctggagctgcgcgctaacgggctgctgccaacctaagtgcagcgccccgcgcctggctccaggtggactccagggcaccggctttatttctggtgcactcctctcctgagagtgtagaccaaggtcgcctaataaactcctcaagggatgaa

SEQ ID NO: 368347 - DNA, 1192 bp, Homo sapiens
cggggaacgcccctctacctggcgggcgcgcgagggtcggtcccgcaggcagcgccgcgaggtgcttcgcagagtaccaggctgatccgcccgggcccgcatctctgctctaggcccttgggaacgggtgatccacccagcggacccaggctgctgcggaggcgaagccaggaagcgctgcttctgcaaggggaggtgcgcgaggcggcgcgggagcgcgcgcagcgggtgcgcagaagactggaggaggcggagcgccacaaggaggacttgaagcccggtaaaccccgtccttacgagccccgcccctagctcttctactacggaggggaactgcagagccagaagagcacggagcagcaactcgcagcccaattggtgacgctgcagaatgaactggagctggcggagaccaaatgcgccttgcaggaggagaagctgcagcaggacgcgctgcagacagcggaggcctgggccatattccaggagcagaccgtagtcctgcaggtgcggccccactcagacgccaaggtgcctcccgcctctcctcccccagacctggggcggtaagtctcccaacccaccgccaggacgcctccccgaggcctcagtccgcactctcacccgctccaggaggtgcaggtgaaggtgatggaggctgcggaggagctggacgcctggcagagtggccgggaactgtaagggagttgggcttgcgggcgcggcggggcactgtggggccgggccgggctgggctcccacctgcatgcctgtccccgcaggtgtgacgggcagcttcgcagagtgcagtacagcaccgagtcgctcatggaggagatggccagggcggaccgagagacgcggctgttcggcggtcctcgcgcgctggccatcaggcgctgctgacgctgccgctcctcttcctggggctgtcgctgctctggacggtgctgttggaccccggcgccgtctccgcgtggctctggagcctcacctcggagacgacgctgcgccgcctgcgctacacgctgtccccgctgctggagctgcgcgctaacgggctgctgccaacctaagtgcagcgccccgcgcctggctccaggtggactccagggcaccggctttatttctggtgcactcctctcctgagagtgtagaccaaggtcgcctaataaactcctcaagggatgaa

SEQ ID NO: 368348 - DNA, 2459 bp, Homo sapiens
ctcatcttcacgttttctgcatctattgaagtgcgccactgagatcgtggagttcttccctgtttgtccatatgatgaacaacactgattttctgatgttgaacaatccctggaataaactctgtttggtttccatggatttctgtttccctttagattttgttagtaatttattttggatttttgcatccaagttcataattgtaactggacaaataaaggcagattttaaaaggacaagttgggaggctaaggcggaaggatcacttgagcctgggagattgaagctgcagctagcttcgattgttccactgtactccagcctggtgacagcaggacctgcctctaaaataataatacttaaaaggacgagtttacctacagtctcaccaagcaatgaaagagcttatcttcttcctgtttcctttacggatcttgctcatgtattttatcttagttactttagcataaatgctaaatcaaattctttttcactagacatcataatagctctaggcataccacataatacccaagcacattttaatcattaaaattgtttcctttttttgtggctactgtaaccacttcagcgaaccatttagtgtgtagtgggtttaaattttttctccttcctgggataaatttcccaggagagggataattgggtcaaaagttacgaacatatttatgggttcttttccacaagagatcgatcagtttgcaagtgccatctgcactgtgggggaaccaatcttcaacttgcctgcatttggtattagtatttcattaacctttcattgatctaattacggctctttgacacaattttcatcagtgatggactaagtgtgatccggcctgacccgcctccggccggcgtgagaaggggcatgtgtcgggctaccctcgggcttcccctgccgcccattgtgatccagcccgctaggcgctccctgccgcccattgtgacgcctgccagccgcaggctgggtccccgaggcgggcggcatttaggctcggtctccacagccatggccgcgacgcaggagctgctgctgcagttgcagaaggataaccgagatggtcgccagcggaagcaggagctagagaagctgatgcgcgggctcgaggccgagagcgagagcctgcctcaaccagcgcctgcaggacctgagcgagcgggagcggaggctgctgcggaggcgaagccaggaagcgctgcttctgcaaggggaggtgcgcgaggcggcgcgggagcgcgcgcagcgggtgcgcagaagactggaggaggcggagcgccacaaggaggacttggtgaggaagagtcctggaatggggctggacccagggtggggtggggcagggcgggcggaagggggcaggatccgggggtggggtgaggtaggaccggcggtgaggccggcaccgccccaggaccctgtccgcaggagcagcacagcaggcagctgcagggcagtgggaggagctgtcgagtcagaagcccggtaaaccccgtccttacgagccccgcccctagctcttctactacggaggggaactgcagagccagaagagcacggagcagcaactcgcagcccaattggtgacgctgcagaatgaactggagctggcggagaccaaatgcgccttgcaggaggagaagctgcagcaggtgagggcagaagcgggttctgttggaggagggtaggctttcgagtgtggatggggaagggcctgtcgccccgcccccgccgagtctaacccgggtgtccacacccaggacgcgctgcagacagcggaggcctgggccatattccaggagcagaccgtagtcctgcaggtgcggccccactcagacgccaaggtgcctcccgcctctcctcccccagacctggggcggtgtgacgggcagcttcgcagagtgcagtacagcaccgagtcgctcatggaggagatggccagggcggaccgagtgagcgcctgcgcgggtccgggcggggtgggctggagcgggacacccctccccatcccccccgcggtaccgcctccccctcctcctggaaaccgggccggcgccgcgggcgcggaggtagctggatgcggccctctctccccgcaggagacgcggctgttcggcggtcctcgcgcgctggccatcaggcgctgctgacgctgccgctcctcttcctggggctgtcgctgctctggacggtgctgttggaccccggcgccgtctccgcgtggctctggagcctcacctcggagacgacgctgcgccgcctgcgctacacgctgtccccgctgctggagctgcgcgctaacgggctgctgccaacctaagtgcagcgccccgcgcctggctccaggtggactccagggcaccggctttatttctggtgcactcctctcctgagagtgtagaccaaggtcgcctaataaactcctcaagggatgaa

SEQ ID NO: 368349 - DNA, 2318 bp, Homo sapiens
ctcatcttcacgttttctgcatctattgaagtgcgccactgagatcgtggagttcttccctgtttgtccatatgatgaacaacactgattttctgatgttgaacaatccctggaataaactctgtttggtttccatggatttctgtttccctttagattttgttagtaatttattttggatttttgcatccaagttcataattgtaactggacaaataaaggcagattttaaaaggacaagttgggaggctaaggcggaaggatcacttgagcctgggagattgaagctgcagctagcttcgattgttccactgtactccagcctggtgacagcaggacctgcctctaaaataataatacttaaaaggacgagtttacctacagtctcaccaagcaatgaaagagcttatcttcttcctgtttcctttacggatcttgctcatgtattttatcttagttactttagcataaatgctaaatcaaattctttttcactagacatcataatagctctaggcataccacataatacccaagcacattttaatcattaaaattgtttcctttttttgtggctactgtaaccacttcagcgaaccatttagtgtgtagtgggtttaaattttttctccttcctgggataaatttcccaggagagggataattgggtcaaaagttacgaacatatttatgggttcttttccacaagagatcgatcagtttgcaagtgccatctgcactgtgggggaaccaatcttcaacttgcctgcatttggtattagtatttcattaacctttcattgatctaattacggctctttgacacaattttcatcagtgatggactaagtgtgatccggcctgacccgcctccggccggcgtgagaaggggcatgtgtcgggctaccctcgggcttcccctgccgcccattgtgatccagcccgctaggcgctccctgccgcccattgtgacgcctgccagccgcaggctgggtccccgaggcgggcggcatttaggctcggtctccacagccatggccgcgacgcaggagctgctgctgcagttgcagaaggataaccgagatggtcgccagcggaagcaggagctagagaagctgatgcgcgggctcgaggccgagagcgagagcctgcctcaaccagcgcctgcaggacctgagcgagcgggagcggaggctgctgcggaggcgaagccaggaagcgctgcttctgcaaggggaggtgcgcgaggcggcgcgggagcgcgcgcagcgggtgcgcagaagactggaggaggcggagcgccacaaggaggacttgaagcccggtaaaccccgtccttacgagccccgcccctagctcttctactacggaggggaactgcagagccagaagagcacggagcagcaactcgcagcccaattggtgacgctgcagaatgaactggagctggcggagaccaaatgcgccttgcaggaggagaagctgcagcaggacgcgctgcagacagcggaggcctgggccatattccaggagcagaccgtagtcctgcaggtgcggccccactcagacgccaaggtgcctcccgcctctcctcccccagacctggggcggtaagtctcccaacccaccgccaggacgcctccccgaggcctcagtccgcactctcacccgctccaggaggtgcaggtgaaggtgatggaggctgcggaggagctggacgcctggcagagtggccgggaactgtaagggagttgggcttgcgggcgcggcggggcactgtggggccgggccgggctgggctcccacctgcatgcctgtccccgcaggtgtgacgggcagcttcgcagagtgcagtacagcaccgagtcgctcatggaggagatggccagggcggaccgagagacgcggctgttcggcggtcctcgcgcgctggccatcaggtgagcagggcggtgggcgcggccgcggtcccccacgtgcccgcccgagccgccgcccacctgcccgcctttcgccctgcaggcgctgctgacgctgccgctcctcttcctggggctgtcgctgctctggacggtgctgttggaccccggcgccgtctccgcgtggctctggagcctcacctcggagacgacgctgcgccgcctgcgctacacgctgtccccgctgctggagctgcgcgctaacgggctgctgccaacctaagtgcagcgccccgcgcctggctccaggtggactccagggcaccggctttatttctggtgcactcctctcctgagagtgtagaccaaggtcgcctaataaactcctcaagggatgaa

SEQ ID NO: 368350 - DNA, 675 bp, Homo sapiens
tccctgtctcccctgacactcgttcctccagaagcccggtaaaccccgtccttacgagccccgcccctagctcttctactacggaggggaactgcagagccagaagagcacggagcagcaactcgcagcccaattggtgacgctgcagaatgaactggagctggcggagaccaaatgcgccttgcaggaggagaagctgcagcaggacgcgctgcagacagcggaggcctgggccatattccaggagcagaccgtagtcctgcaggtgtgacgggcagcttcgcagagtgcagtacagcaccgagtcgctcatggaggagatggccagggcggaccgagagacgcggctgttcggcggtcctcgcgcgctggccatcaggcgctgctgacgctgccgctcctcttcctggggctgtcgctgctctggacggtgctgttggaccccggcgccgtctccgcgtggctctggagcctcacctcggagacgacgctgcgccgcctgcgctacacgctgtccccgctgctggagctgcgcgctaacgggctgctgccaacctaagtgcagcgccccgcgcctggctccaggtggactccagggcaccggctttatttctggtgcactcctctcctgagagtgtagaccaaggtcgcctaataaactcctcaagggatgaa

SEQ ID NO: 368351 - DNA, 2312 bp, Homo sapiens
ctcatcttcacgttttctgcatctattgaagtgcgccactgagatcgtggagttcttccctgtttgtccatatgatgaacaacactgattttctgatgttgaacaatccctggaataaactctgtttggtttccatggatttctgtttccctttagattttgttagtaatttattttggatttttgcatccaagttcataattgtaactggacaaataaaggcagattttaaaaggacaagttgggaggctaaggcggaaggatcacttgagcctgggagattgaagctgcagctagcttcgattgttccactgtactccagcctggtgacagcaggacctgcctctaaaataataatacttaaaaggacgagtttacctacagtctcaccaagcaatgaaagagcttatcttcttcctgtttcctttacggatcttgctcatgtattttatcttagttactttagcataaatgctaaatcaaattctttttcactagacatcataatagctctaggcataccacataatacccaagcacattttaatcattaaaattgtttcctttttttgtggctactgtaaccacttcagcgaaccatttagtgtgtagtgggtttaaattttttctccttcctgggataaatttcccaggagagggataattgggtcaaaagttacgaacatatttatgggttcttttccacaagagatcgatcagtttgcaagtgccatctgcactgtgggggaaccaatcttcaacttgcctgcatttggtattagtatttcattaacctttcattgatctaattacggctctttgacacaattttcatcagtgatggactaagtgtgatccggcctgacccgcctccggccggcgtgagaaggggcatgtgtcgggctaccctcgggcttcccctgccgcccattgtgatccagcccgctaggcgctccctgccgcccattgtgacgcctgccagccgcaggctgggtccccgaggcgggcggcatttaggctcggtctccacagccatggccgcgacgcaggagctgctgctgcagttgcagaaggataaccgagatggtcgccagcggaagcaggagctagagaagctgatgcgcgggctcgaggccgagagcgagagcctgcctcaaccagcgcctgcaggacctgagcgagcgggagcggaggctgctgcggaggcgaagccaggaagcgctgcttctgcaaggggaggtgcgcgaggcggcgcgggagcgcgcgcagcgggtgcgcagaagactggaggaggcggagcgccacaaggaggacttggtgaggaagagtcctggaatggggctggacccagggtggggtggggcagggcgggcggaagggggcaggatccgggggtggggtgaggtaggaccggcggtgaggccggcaccgccccaggaccctgtccgcaggagcagcacagcaggcagctgcagggcagtgggaggagctgtcgagtcagaagcccggtaaaccccgtccttacgagccccgcccctagctcttctactacggaggggaactgcagagccagaagagcacggagcagcaactcgcagcccaattggtgacgctgcagaatgaactggagctggcggagaccaaatgcgccttgcaggaggagaagctgcagcaggtgagggcagaagcgggttctgttggaggagggtaggctttcgagtgtggatggggaagggcctgtcgccccgcccccgccgagtctaacccgggtgtccacacccaggacgcgctgcagacagcggaggcctgggccatattccaggagcagaccgtagtcctgcaggtgcggccccactcagacgccaaggtgcctcccgcctctcctcccccagacctggggcggtgtgacgggcagcttcgcagagtgcagtacagcaccgagtcgctcatggaggagatggccagggcggaccgagagacgcggctgttcggcggtcctcgcgcgctggccatcaggcgctgctgacgctgccgctcctcttcctggggctgtcgctgctctggacggtgctgttggaccccggcgccgtctccgcgtggctctggagcctcacctcggagacgacgctgcgccgcctgcgctacacgctgtccccgctgctggagctgcgcgctaacgggctgctgccaacctaagtgcagcgccccgcgcctggctccaggtggactccagggcaccggctttatttctggtgcactcctctcctgagagtgtagaccaaggtcgcctaataaactcctcaagggatgaa

SEQ ID NO: 368352 - DNA, 842 bp, Homo sapiens
tccctgtctcccctgacactcgttcctccagaagcccggtaaaccccgtccttacgagccccgcccctagctcttctactacggaggggaactgcagagccagaagagcacggagcagcaactcgcagcccaattggtgacgctgcagaatgaactggagctggcggagaccaaatgcgccttgcaggaggagaagctgcagcaggtgagggcagaagcgggttctgttggaggagggtaggctttcgagtgtggatggggaagggcctgtcgccccgcccccgccgagtctaacccgggtgtccacacccaggacgcgctgcagacagcggaggcctgggccatattccaggagcagaccgtagtcctgcaggtgcggccccactcagacgccaaggtgcctcccgcctctcctcccccagacctggggcggtgtgacgggcagcttcgcagagtgcagtacagcaccgagtcgctcatggaggagatggccagggcggaccgagagacgcggctgttcggcggtcctcgcgcgctggccatcaggcgctgctgacgctgccgctcctcttcctggggctgtcgctgctctggacggtgctgttggaccccggcgccgtctccgcgtggctctggagcctcacctcggagacgacgctgcgccgcctgcgctacacgctgtccccgctgctggagctgcgcgctaacgggctgctgccaacctaagtgcagcgccccgcgcctggctccaggtggactccagggcaccggctttatttctggtgcactcctctcctgagagtgtagaccaaggtcgcctaataaactcctcaagggatgaa

SEQ ID NO: 368353 - DNA, 2383 bp, Homo sapiens
ctcatcttcacgttttctgcatctattgaagtgcgccactgagatcgtggagttcttccctgtttgtccatatgatgaacaacactgattttctgatgttgaacaatccctggaataaactctgtttggtttccatggatttctgtttccctttagattttgttagtaatttattttggatttttgcatccaagttcataattgtaactggacaaataaaggcagattttaaaaggacaagttgggaggctaaggcggaaggatcacttgagcctgggagattgaagctgcagctagcttcgattgttccactgtactccagcctggtgacagcaggacctgcctctaaaataataatacttaaaaggacgagtttacctacagtctcaccaagcaatgaaagagcttatcttcttcctgtttcctttacggatcttgctcatgtattttatcttagttactttagcataaatgctaaatcaaattctttttcactagacatcataatagctctaggcataccacataatacccaagcacattttaatcattaaaattgtttcctttttttgtggctactgtaaccacttcagcgaaccatttagtgtgtagtgggtttaaattttttctccttcctgggataaatttcccaggagagggataattgggtcaaaagttacgaacatatttatgggttcttttccacaagagatcgatcagtttgcaagtgccatctgcactgtgggggaaccaatcttcaacttgcctgcatttggtattagtatttcattaacctttcattgatctaattacggctctttgacacaattttcatcagtgatggactaagtgtgatccggcctgacccgcctccggccggcgtgagaaggggcatgtgtcgggctaccctcgggcttcccctgccgcccattgtgatccagcccgctaggcgctccctgccgcccattgtgacgcctgccagccgcaggctgggtccccgaggcgggcggcatttaggctcggtctccacagccatggccgcgacgcaggagctgctgctgcagttgcagaaggataaccgagatggtcgccagcggaagcaggagctagagaagctgatgcgcgggctcgaggccgagagcgagagcctgcctcaaccagcgcctgcaggacctgagcgagcgggagcggaggctgctgcggaggcgaagccaggaagcgctgcttctgcaaggggaggtgcgcgaggcggcgcgggagcgcgcgcagcgggtgcgcagaagactggaggaggcggagcgccacaaggaggacttgaagcccggtaaaccccgtccttacgagccccgcccctagctcttctactacggaggggaactgcagagccagaagagcacggagcagcaactcgcagcccaattggtgacgctgcagaatgaactggagctggcggagaccaaatgcgccttgcaggaggagaagctgcagcaggacgcgctgcagacagcggaggcctgggccatattccaggagcagaccgtagtcctgcaggtgcggccccactcagacgccaaggtgcctcccgcctctcctcccccagacctggggcggtaagtctcccaacccaccgccaggacgcctccccgaggcctcagtccgcactctcacccgctccaggaggtgcaggtgaaggtgatggaggctgcggaggagctggacgcctggcagagtggccgggaactgtaagggagttgggcttgcgggcgcggcggggcactgtggggccgggccgggctgggctcccacctgcatgcctgtccccgcaggtgtgacgggcagcttcgcagagtgcagtacagcaccgagtcgctcatggaggagatggccagggcggaccgagtgagcgcctgcgcgggtccgggcggggtgggctggagcgggacacccctccccatcccccccgcggtaccgcctccccctcctcctggaaaccgggccggcgccgcgggcgcggaggtagctggatgcggccctctctccccgcaggagacgcggctgttcggcggtcctcgcgcgctggccatcaggcgctgctgacgctgccgctcctcttcctggggctgtcgctgctctggacggtgctgttggaccccggcgccgtctccgcgtggctctggagcctcacctcggagacgacgctgcgccgcctgcgctacacgctgtccccgctgctggagctgcgcgctaacgggctgctgccaacctaagtgcagcgccccgcgcctggctccaggtggactccagggcaccggctttatttctggtgcactcctctcctgagagtgtagaccaaggtcgcctaataaactcctcaagggatgaa

SEQ ID NO: 368354 - DNA, 824 bp, Homo sapiens
tccctgtctcccctgacactcgttcctccagaagcccggtaaaccccgtccttacgagccccgcccctagctcttctactacggaggggaactgcagagccagaagagcacggagcagcaactcgcagcccaattggtgacgctgcaggacgcgctgcagacagcggaggcctgggccatattccaggagcagaccgtagtcctgcaggtgcggccccactcagacgccaaggtgcctcccgcctctcctcccccagacctggggcggtgtgacgggcagcttcgcagagtgcagtacagcaccgagtcgctcatggaggagatggccagggcggaccgagtgagcgcctgcgcgggtccgggcggggtgggctggagcgggacacccctccccatcccccccgcggtaccgcctccccctcctcctggaaaccgggccggcgccgcgggcgcggaggtagctggatgcggccctctctccccgcaggagacgcggctgttcggcggtcctcgcgcgctggccatcaggcgctgctgacgctgccgctcctcttcctggggctgtcgctgctctggacggtgctgttggaccccggcgccgtctccgcgtggctctggagcctcacctcggagacgacgctgcgccgcctgcgctacacgctgtccccgctgctggagctgcgcgctaacgggctgctgccaacctaagtgcagcgccccgcgcctggctccaggtggactccagggcaccggctttatttctggtgcactcctctcctgagagtgtagaccaaggtcgcctaataaactcctcaagggatgaa

SEQ ID NO: 368355 - DNA, 1532 bp, Homo sapiens
cttttttttaaggacgaatatctcatttatttccctgcagctctcatcccctgctcatccaagcctccctccttccagatgaataggaacaggttacagctgacccagtttcactcccagcttcagaagatgaatcacggtgggttggcggacaaggaatggggcaagctggggcagcgcggaaggcagtgctgttttcaggaggcctgacctctgtggccagagtcccgtcagcaccgcttactgcaggccaagatgcctccctcctccagaatccgaccgcggagggagcttccagtccaggagcctgctctcacactggcaggacggtgttcatcgcattctcttctgtgaccagcctctaggctagcggctgcattcgtggtctgtgcaaacacttcgtggttctatatatcagcagcaagtgtgcaaaataaaggacctgttaactcagatttctggatattttggtggtagcttctagtcccagaatctgtgtttttaaaatactacatgacattctgtctattcaatcacctggtggtcatctttcttgtactaattaactgttgatgagcattttggatattctaggagaaagcctataatttcacatagtttctctttttcatgtaactgtaacctaaatgtattacttctgataaaactatatatcaaatgtcactgcaaattagttttatatctgtcatgtgagatttgtcttacttatttttcttttggttgccatggaagttatggccctgaaaatcgtctccctccccttctcttgctgtacagcatgcgttctctttttgtggttgctggctgggtactgtatttaatgaagtagagaatagcacttgcaaaaatacagtcttggtacctagagactgtcatgcagatagtataatttggtatatgtgctaatgcattgagtagaggattattttaacacactattttgcttttgtattttagttaaaataatcgatggggatgtgtagcccccccgtgtgaggatgacatcaccacatttctagtttcatggagctcaagatgtcttgtgtctgtgtggctagatggcctctgcttggtaatcttatttttaggcctaaaattcccacttaaatccaaagtaaaaatggttatactgaagcataaaccttgcctgtgtaattttaaaaaattaatagagctgtgcaaaccctgttatttttgtaaaaaaaaaaaaaatacatatctatatataatatgtgtgtgtgtgtgacatatgcacacgtctctgtgtatgtgaagtaggggaggccctgggggatgacctcccagcctttatgatgcttttctctatgctgctggacttcattcttactggtccacgcagatgcaggcggcctgaggccagtgctgtaccaagtagaagacggttcctaaggacagagtttgtctgttttctaacaaagaaaaattctacaaaggagaggttgggcgttacaaaggcattgtgaatctaataaaaggaaagtgtcgctttc

SEQ ID NO: 368356 - DNA, 2238 bp, Homo sapiens
aaaaaccataaagaaaagcaaaagaatgatttgtagttaattctggggatggagggtacacaggaggacttggaaaagcctggtaacattctgtttcctaagctggtgttttctttaaactatttctaatactctagtatgtatatttcttaatttaaaaaaagtttcaaatcagacaaaactctctaagccaaaaaaaagtccaccacaagtcattaaataaagcaaataataaaacagtatgtaagttattaatttttgttaagaaattacatatgcatctacatttttgtgtttaaatggacatacaagtagtttgagaggataaacacgaaaatgtggttttggggaagtaggatttcaggaaaatttctgcatcacctgtattttttttaaaattttgaaatccatgagcatttatcagtcagactcacattatgagattatacttcttaaaatttttattgatgtaaaagaattgtacatatttatagggttatacttcttttatctttactgttgaataaggagcctaaaggtagggtccatgttttgtacatacttctctgtattcttataataagaattggaaaaaaaataaaccaaaacaactaaaaccaaaaaatgtgtgggaagtcactaacaatgtttagaaatattaagtgagaaaagcaggttaaaaggcagtattttacatatttaatattagtgcccttagtacgtgtattctgcgtcttaaaatgaaaatgctccactgtcaatggttgttttctcttggtattgtaatcagtcggtagtttttattttctttgtattttccttatttgtgtgtattacataagaaagcagaaaaaaatagaatatttataattattaaagattgaagttcttaggtgctttcagtaacattatcctcacctttggggtcgtggctgcctatctggagtgctgtcttgttaaggattaagatgagtggctgaggatttgcacttctgtaagtggctgcttcatcctttgacacctgcgctgatcatttgtgtgcgctgcacctccttcaggtgctgcactatctggcaatccagaaacctgcagaccttgctcggcacctgttaccttgtgtgattcatgcagctgtactcaaggtaaaggaagaagaaagtctcgaaaacatttcttcagttaagaagatcataaagcagataatatcccattccagtaaagttttgcacttccccaatccagaagacaagaaattggaagaaatcattcaccagattactaatgtggaagctctcattgccagagctcggtcactaaaagccaagtttggaactgagaaatgtgaacaggaggaggaaaaggaagatcttgaaaggtttgtgagttgcctgctggagcagcctgaagtgttagtcaccggtgcaggaagaggacatgctggcaggatcattcacaagctgtttgtgaatgcccagagggctgcagctatgactccaccagaggaggaattgaagagaatgggctccccagaggaaagaaggcagaactccgtgtcagacttcccaccccctgctggccgggaattcattttgcgcaccactgtgccgcgccctgctccctactccaaagctctgcctcagcggatgtacagtgttctcaccaaagaggactttagacttgcaggttaaaataatcgatggggatgtgtagcccccccgtgtgaggatgacatcaccacatttctagtttcatggagctcaagatgtcttgtgtctgtgtggctagatggcctctgcttggtaatcttatttttaggcctaaaattcccacttaaatccaaagtaaaaatggttatactgaagcataaaccttgcctgtgtaattttaaaaaattaatagagctgtgcaaaccctgttatttttgtaaaaaaaaaaaaaatacatatctatatataatatgtgtgtgtgtgtgacatatgcacacgtctctgtgtatgtgaagtaggggaggccctgggggatgacctcccagcctttatgatgcttttctctatgctgctggacttcattcttactggtccacgcagatgcaggcggcctgaggccagtgctgtaccaagtagaagacggttcctaaggacagagtttgtctgttttctaacaaagaaaaattctacaaaggagaggttgggcgttacaaaggcattgtgaatctaataaaaggaaagtgtcgctttc

SEQ ID NO: 368357 - DNA, 642 bp, Homo sapiens
atttcaaagtttggaaaggccaaggttcggccctttggaattccaatgccaacgttgtaaaccccggcaaggaattgaaaccccttcctaaagggcgaattgggaccgggccccccctcgagttttatttttcttttggttgccatggaagttatggccctgaaaatcgtctccctccccttctcttgctgtacagcatgcgttctctttttgtggttgctggctgggtactgtatttaatgaagtagagaatagcacttgcaaaaatacagtcttggtacctagagactgtcatgcagatagtataatttggtatatgtgctaatgcattgagtagaggattattttaacacactattttgcttttgtattttagttaaaataatcgatggggatgtgtagcccccccgtgtgaggatgacatcaccacatttctagtttcatggagctcaagatgtcttgtgtctgtgtggctagatggcctctgcttggtaatcttatttttaggcctaaaattcccacttaaatccaaagtaaaaatggttatactgaagcataaaccttgcctgtgtaattttaaaaaattaatagagctgtgcaaaccctgttatttttgtaaaaaaaaaaaaaatacatatctat

SEQ ID NO: 368358 - DNA, 946 bp, Homo sapiens
caaaaacaaatatggatcattgcttttattggataaatataacttggtttatattatacaatttttttttcatcttttattaactgtagcattttctaagcttctagtctgaaaaaaatagactgaatattttttcttacactttgacagagataggctttaaacattttttatgagcacaggtgaaaaagcaggaagattgtcagttaagtcgataataattccaaatgtcaatcttatcttgctgtaaaatttcactccaaccttgttgggtttagccagtatcagcttgaggatttgtccacaaaactcctgtgggaggatggacgcccagtggcctggacagctcactttccaccctttcattgcctgtctctgtctcctaggtttgtgagttgcctgctggagcagcctgaagtgttagtcaccggtgcaggaagaggacatgctggcaggatcattcacaagctgtttgtgaatgcccagagggtatgtgagagtcattattgactccatcataatctctccaaacctctacttgggaagaggctgttttagttcccacacgtggctgatcacactcatgtcacctgagtgtaagtctgggcattgggtttgaacactgaagaaacaatgacttctgagtcttcgaaatccatttgatttcttacatgttgaattaaaatgataagtatattctaggacctaaattttaaaaattagaagagtccaaaatccattgttatagaagctggcagggagtcagttagcaatggccagtgctgtgctgtgggaaaaaatgtttactcacaggtactttcaaatgagaatggagttcagttttaccatctttaaaccccatgtagggcaaagtggagtcacaactcagcttgaattataaatataattgttcttgtaatggtgaggagatctacctttgaggttt

SEQ ID NO: 368359 - DNA, 847 bp, Homo sapiens
  misc_feature (8)..(8): n is a, c, g, or t
  misc_feature (667)..(667): n is a, c, g, or t
gcacgagnaagatggctgccgacagtgagcccgaatccgaggtatttgagatcacggacttcaccactgcctcggaatgggaaaggtttatttccaaagttgaagaagtcttgaatgactggaaactgattggaaactctttgggaaagccactcgaaaaggtcagatctatttgctggtgtctctaaatgactatttactttgaaacctctattttccagccctttgctgcatttggcacatttgaattaaatgttttttaaagttacgtataatctataaacatcaaatagcatttggaagaatttggatttaaatctgtggcaaatgatatatgtaagacatttgtgaaatgtttaataaagttatatatatgtgtgtgtgtatatatatatatataaaatgtcattcttgtgagtgattctttgtgagtgaagttgcttctcttttgccttctcccttggaatgttaaaacatgtttttaaaagttttttatttggtcagagaaacattgcagtgaccatcttctttggtagcatattttgcttactaatgaggaaattctagtacttaccattgacttactgtagttaacaactatttcactcagtttttgtattttataatatcactaataacatcccccttcccttttaagctttaactntggcggttgaggggtgttttgaaggggaattccttgggagggggggaccctcttctcccgatgggggttgttctccccgccctttttttgttctgcgcccggtccggggggcgccaccttttttgtctgggctcgcaaagggggggcccacaatcgatatatcttgtcattggtgggcca

SEQ ID NO: 368360 - DNA, 655 bp, Homo sapiens
cccgggctgcaggattcggcacgagctagtcccagaatctgtgtttttaaaatactacatgacattctgtctattcaatcacctggtggtcatctttcttgtactaattaactgttgatgagcattttggatattctaggagaaagcctataatttcacatagtttctctttttcatgtaactgtaacctaaatgtattacttctgataaaactatatatcaaatgtcactgcaaattagttttatatctgtcatgtgagatttgtcttacttatttttcttttggttgccatggaagttatggccctgaaaatcgtctccctccccttctcttgctgtacagcatgcgttctctttttgtggttgctggctgggtactgtatttaatgaagtagagaatagcacttgcaaaaatacagtcttggtacctagagactgtcatgcagatagtataatttggtatatgtgctaatgcattgagtagaggattattttaacacactattttgcttttgtattttaatttctagtttcatggagctcaagatgtcttgtgtctgtgtggctagatggcctctgcttggtaatcttatttttagagctattccccatataattcacaggttgggtatactggagatatcttgtctgtgtg

SEQ ID NO: 368361 - DNA, 4477 bp, Homo sapiens
agcgccaggcccggcgctcctcaagatggctgccgacagtgagcccgaatccgaggtatttgagatcacggacttcaccactgcctcggaatgggaaaggtttatttccaaagttgaagaagtcttgaatgactggaaactgattggaaactctttgggaaagccactcgaaaagggtatatttacttctggcacatgggaagagaaatcagatgaaatttcctttgctgacttcaagttctcagtcactcatcattatcttgtacaagagtccactgataaagaaggaaaggatgagttattagaggatgttgttccacaatctatgcaagatttgctgggtatgaataatgactttcctccaagagcacattgcctggtaagatggtatgggctacgtgagttcgtggtgattgcccctgctgcacacagtgacgctgttctcagcgaatctaagtgcaaccttcttctgagttctgtttctattgccttgggaaacactggctgtcaggtgccactctttgtgcaaattcaccacaaatggcgaagaatgtatgtaggagaatgtcaaggtcctggtgtacgaactgatttcgaaatggttcatcttagaaaagtgccaaatcagtacactcacttatcaggtctgctggatatcttcaaatcaaagattggatgtcctttaactccattgcctccagttagtattgctattcgatttacctatgtacttcaagattggcagcagtatttttggcctcagcaacctccagacatagatgcccttgtaggaggagaagttggaggcttggagtttggcaagttaccatttggtgcctgcgaagatcctattagtgaactccatttagctactacatggcctcatctgaccgaagggatcattgtggataatgatgtttattctgatttggatcctattcaagctccacattggtctgttagagttcgaaaagctgagaatcctcagtgtttgctaggtgattttgtcactgaattttttaaaatttgccgtcgaaaggagtcaactgatgagattcttggacgatctgcatttgaggaagaaggcaaagaaactgctgatataactcatgctttgtcaaaattgacagagccggcatcagttccaattcataaattatcagtttcaaatatggtacacactgcaaagaagaaaatccgaaaacacagaggtgtagaggagtcaccgctaaataatgatgttcttaatactattctcctgttcttattccctgatgctgtttctgagaaaccattagatggaactacttcaacagataataataatcctccatcagagagtgaagactataatctctacaatcagttcaagtctgcaccatctgacagtttaacatacaaactggctttgtgtctctgtatgatcaatttttaccatggagggttgaaaggagtggcacacctctggcaggaatttgttcttgaaatgcgtttccgatgggaaaacaactttctgattccaggattagcaagtggacccccagatctgaggtgttgtttactgcatcagaaactacagatgttaaattgttgtattgaaagaaagaaggcacgtgatgaggggaaaaagacaagtgcttcagatgtcactaatatatatccaggggatgctggaaaagcaggagaccagttggtgccagataatctaaaagaaacagataaggaaaagggagaggtaggaaaatcttgggattcctggagtgacagcgaagaagaattttttgaatgcctaagtgatactgaagaacttaaaggaaatggacaagagagtggcaagaaaggaggacctaaggagatggcaaatttaaggccggaaggacggctctatcagcatgggaaacttacactgctgcataatggagaacctctctacattccagtaacccaggaaccagcacctatgacagaagatctgctagaagagcagtctgaagttttagctaaattaggtacatcggcagagggggctcaccttcgagcacgcatgcagagtgcctgtctgctctcagatatggagtcttttaaggcagctaatccaggttgctccctggaagattttgtgaggtggtattcaccccgggattatattgaagaggaggtgattgatgaaaagggcaatgtggtgctgaaaggagaactgagtgcccggatgaagattccaagcaatatgtgggtagaagcctgggaaacagctaagccaattcctgctagaaggcaaaggagactcttcgatgatacacgggaagcagaaaaggtgctgcactatctggcaatccagaaacctgcagaccttgctcggcacctgttaccttgtgtgattcatgcagctgtactcaaggtaaaggaagaagaaagtctcgaaaacatttcttcagttaagaagatcataaagcagataatatcccattccagtaaagttttgcacttccccaatccagaagacaagaaattggaagaaatcattcaccagattactaatgtggaagctctcattgccagagctcggtcactaaaagccaagtttggaactgagaaatgtgaacaggaggaggaaaaggaagatcttgaaaggtttgtgagttgcctgctggagcagcctgaagtgttagtcaccggtgcaggaagaggacatgctggcaggatcattcacaagctgtttgtgaatgcccagagggctgcagctatgactccaccagaggaggaattgaagagaatgggctccccagaggaaagaaggcagaactccgtgtcagacttcccaccccctgctggccgggaattcattttgcgcaccactgtgccgcgccctgctccctactccaaagctctgcctcagcggatgtacagtgttctcaccaaagaggactttagacttgcaggtgccttttcatcagatacttccttcttctgattcttctagcattactcgttggtggcttcagagacagtgctgcctcctcctgagggagggaaggtaccagggagaacctgggaggtcctggagagggccctgtccagttgggtgatcaggaatcaaaccagcatcggaaagacttcccagcaccaagcttgagctgtgtcgtttcgtggagggggcagcgaggatgggcttgagctgttgagagatttctgccctagagatggcctttgtatatgggggggtggtggggggacacaaacacatcagacactccgtcctcacactggcaggacggtgttcatcgcattctcttctgtgaccagcctctaggctagcggctgcattcgtggtctgtgcaaacacttcgtggttctatatatcagcagcaagtgtgcaaaataaaggacctgttaactcagatttctggatattttggtggtagcttctagtcccagaatctgtgtttttaaaatactacatgacattctgtctattcaatcacctggtggtcatctttcttgtactaattaactgttgatgagcattttggatattctaggagaaagcctataatttcacatagtttctctttttcatgtaactgtaacctaaatgtattacttctgataaaactatatatcaaatgtcactgcaaattagttttatatctgtcatgtgagatttgtcttacttatttttcttttggttgccatggaagttatggccctgaaaatcgtctccctccccttctcttgctgtacagcatgcgttctctttttgtggttgctggctgggtactgtatttaatgaagtagagaatagcacttgcaaaaatacagtcttggtacctagagactgtcatgcagatagtataatttggtatatgtgctaatgcattgagtagaggattattttaacacactattttgcttttgtattttagttaaaataatcgatggggatgtgtagcccccccgtgtgaggatgacatcaccacatttctagtttcatggagctcaagatgtcttgtgtctgtgtggctagatggcctctgcttggtaatcttatttttaggcctaaaattcccacttaaatccaaagtaaaaatggttatactgaagcataaaccttgcctgtgtaattttaaaaaattaatagagctgtgcaaaccctgttatttttgtaaaaaaaaaaaaaatacatatctatatataatatgtgtgtgtgtgtgacatatgcacacgtctctgtgtatgtgaagtaggggaggccctgggggatgacctcccagcctttatgatgcttttctctatgctgctggacttcattcttactggtccacgcagatgcaggcggcctgaggccagtgctgtaccaagtagaagacggttcctaaggacagagtttgtctgttttctaacaaagaaaaattctacaaaggagaggttgggcgttacaaaggcattgtgaatctaataaaaggaaagtgtcgctttc

SEQ ID NO: 368362 - DNA, 4216 bp, Homo sapiens
agcgccaggcccggcgctcctcaagatggctgccgacagtgagcccgaatccgaggtatttgagatcacggacttcaccactgcctcggaatgggaaaggtttatttccaaagttgaagaagtcttgaatgactggaaactgattggaaactctttgggaaagccactcgaaaagggtatatttacttctggcacatgggaagagaaatcagatgaaatttcctttgctgacttcaagttctcagtcactcatcattatcttgtacaagagtccactgataaagaaggaaaggatgagttattagaggatgttgttccacaatctatgcaagatttgctgggtatgaataatgactttcctccaagagcacattgcctggtaagatggtatgggctacgtgagttcgtggtgattgcccctgctgcacacagtgacgctgttctcagcgaatctaagtgcaaccttcttctgagttctgtttctattgccttgggaaacactggctgtcaggtgccactctttgtgcaaattcaccacaaatggcgaagaatgtatgtaggagaatgtcaaggtcctggtgtacgaactgatttcgaaatggttcatcttagaaaagtgccaaatcagtacactcacttatcaggtctgctggatatcttcaaatcaaagattggatgtcctttaactccattgcctccagttagtattgctattcgatttacctatgtacttcaagattggcagcagtatttttggcctcagcaacctccagacatagatgcccttgtaggaggagaagttggaggcttggagtttggcaagttaccatttggtgcctgcgaagatcctattagtgaactccatttagctactacatggcctcatctgaccgaagggatcattgtggataatgatgtttattctgatttggatcctattcaagctccacattggtctgttagagttcgaaaagctgagaatcctcagtgtttgctaggtgattttgtcactgaattttttaaaatttgccgtcgaaaggagtcaactgatgagattcttggacgatctgcatttgaggaagaaggcaaagaaactgctgatataactcatgctttgtcaaaattgacagagccggcatcagttccaattcataaattatcagtttcaaatatggtacacactgcaaagaagaaaatccgaaaacacagaggtgtagaggagtcaccgctaaataatgatgttcttaatactattctcctgttcttattccctgatgctgtttctgagaaaccattagatggaactacttcaacagataataataatcctccatcagagagtgaagactataatctctacaatcagttcaagtctgcaccatctgacagtttaacatacaaactggctttgtgtctctgtatgatcaatttttaccatggagggttgaaaggagtggcacacctctggcaggaatttgttcttgaaatgcgtttccgatgggaaaacaactttctgattccaggattagcaagtggacccccagatctgaggtgttgtttactgcatcagaaactacagatgttaaactttgctctggggtttaggttttttttcgggcaaaacgcacaacgaaaggcacgtgatgaggggaaaaagacaagtgcttcagatgtcactaatatatatccaggggatgctggaaaagcaggagaccagttggtgccagataatctaaaagaaacagataaggaaaagggagaggtaggaaaatcttgggattcctggagtgacagcgaagaagaattttttgaatgcctaagtgatactgaagaacttaaaggaaatggacaagagagtggcaagaaaggaggacctaaggagatggcaaatttaaggccggaaggacggctctatcagcatgggaaacttacactgctgcataatggagaacctctctacattccagtaacccaggaaccagcacctatgacagaagatctgctagaagagcagtctgaagttttagctaaattaggtacatcggcagagggggctcaccttcgagcacgcatgcagagtgcctgtctgctctcagatatggagtcttttaaggcagctaatccaggttgctccctggaagattttgtgaggtggtattcaccccgggattatattgaagaggaggtgattgatgaaaagggcaatgtggtgctgaaaggagaactgagtgcccggatgaagattccaagcaatatgtgggtagaagcctgggaaacagctaagccaattcctgctagaaggcaaaggagactcttcgatgatacacgggaagcagaaaaggtgctgcactatctggcaatccagaaacctgcagaccttgctcggcacctgttaccttgtgtgattcatgcagctgtactcaaggtaaaggaagaagaaagtctcgaaaacatttcttcagttaagaagatcataaagcagataatatcccattccagtaaagttttgcacttccccaatccagaagacaagaaattggaagaaatcattcaccagattactaatgtggaagctctcattgccagagctcggtcactaaaagccaagtttggaactgagaaatgtgaacaggaggaggaaaaggaagatcttgaaaggtttgtgagttgcctgctggagcagcctgaagtgttagtcaccggtgcaggaagaggacatgctggcaggatcattcacaagctgtttgtgaatgcccagagggctgcagctatgactccaccagaggaggaattgaagagaatgggctccccagaggaaagaaggcagaactccgtgtcagacttcccaccccctgctggccgggaattcattttgcgcaccactgtgccgcgccctgctccctactccaaagctctgcctcagcggatgtacagtgttctcaccaaagaggactttagacttgcaggtgccttttcatcagatacttccttcttctgattcttctagcattactcgttggtggcttcagagacagtgctgcctcctcctgagggagggaaggtaccagggagaacctgggaggtcctggagagggccctgtccagttgggtgatcaggaatcaaaccagcatcggaaagacttcccagcaccaagcttgagctgtgtcgtttcgtggagggggcagcgaggatgggcttgagctgttgagagatttctgccctagagatggcctttgtatatgggggggtggtggggggacacaaacacatcagacactccgtcctcacactggcaggacggtgttcatcgcattctcttctgtgaccagcctctaggctagcggctgcattcgtggtctgtgcaaacacttcgtggttctatatatcagcagcaagtgtgcaaaataaaggacctgttaactcagatttctggatattttggtggtagcttctagtcccagaatctgtgtttttaaaatactacatgacattctgtctattcaatcacctggtggtcatctttcttgtactaattaactgttgatgagcattttggatattctaggagaaagcctataatttcacatagtttctctttttcatgtaactgtaacctaaatgtattacttctgataaaactatatatcaaatgtcactgcaaattagttttatatctgtcatgtgagatttgtcttacttatttttcttttggttgccatggaagttatggccctgaaaatcgtctccctccccttctcttgctgtacagcatgcgttctctttttgtggttgctggctgggtactgtatttaatgaagtagagaatagcacttgcaaaaatacagtcttggtacctagagactgtcatgcagatagtataatttggtatatgtgctaatgcattgagtagaggattattttaacacactattttgcttttgtattttagttaaaataatcgatggggatgtgtagcccccccgtgtgaggatgacatcaccacatttctagtttcatggagctcaagatgtcttgtgtctgtgtggctagatggcctctgcttggtaatcttatttttaggcctaaaattcccacttaaatccaaagtaaaaatggttatactgaagcataaaccttgcctgtgtaattttaaaaaattaatagagctgtgcaaaccctgttatttttgtaaaaaaaaaaaaaatacatatctat

SEQ ID NO: 368363 - DNA, 4269 bp, Homo sapiens
agcgccaggcccggcgctcctcaagatggctgccgacagtgagcccgaatccgaggtatttgagatcacggacttcaccactgcctcggaatgggaaaggtttatttccaaagttgaagaagtcttgaatgactggaaactgattggaaactctttgggaaagccactcgaaaagggtatatttacttctggcacatgggaagagaaatcagatgaaatttcctttgctgacttcaagttctcagtcactcatcattatcttgtacaagagtccactgataaagaaggaaaggatgagttattagaggatgttgttccacaatctatgcaagatttgctgggtatgaataatgactttcctccaagagcacattgcctggtaagatggtatgggctacgtgagttcgtggtgattgcccctgctgcacacagtgacgctgttctcagcgaatctaagtgcaaccttcttctgagttctgtttctattgccttgggaaacactggctgtcaggtgccactctttgtgcaaattcaccacaaatggcgaagaatgtatgtaggagaatgtcaaggtcctggtgtacgaactgatttcgaaatggttcatcttagaaaagtgccaaatcagtacactcacttatcaggtctgctggatatcttcaaatcaaagattggatgtcctttaactccattgcctccagttagtattgctattcgatttacctatgtacttcaagattggcagcagtatttttggcctcagcaacctccagacatagatgcccttgtaggaggagaagttggaggcttggagtttggcaagttaccatttggtgcctgcgaagatcctattagtgaactccatttagctactacatggcctcatctgaccgaagggatcattgtggataatgatgtttattctgatttggatcctattcaagctccacattggtctgttagagttcgaaaagctgagaatcctcagtgtttgctaggtgattttgtcactgaattttttaaaatttgccgtcgaaaggagtcaactgatgagattcttggacgatctgcatttgaggaagaaggcaaagaaactgctgatataactcatgctttgtcaaaattgacagagccggcatcagttccaattcataaattatcagtttcaaatatggtacacactgcaaagaagaaaatccgaaaacacagaggtgtagaggagtcaccgctaaataatgatgttcttaatactattctcctgttcttattccctgatgctgtttctgagaaaccattagatggaactacttcaacagataataataatcctccatcagagagtgaagactataatctctacaatcagttcaagtctgcaccatctgacagtttaacatacaaactggctttgtgtctctgtatgatcaatttttaccatggagggttgaaaggagtggcacacctctggcaggaatttgttcttgaaatgcgtttccgatgggaaaacaactttctgattccaggattagcaagtggacccccagatctgaggtgttgtttactgcatcagaaactacagatgttaaattgttgtattgaaagaaagaaggcacgtgatgaggggaaaaagacaagtgcttcagatgtcactaatatatatccaggggatgctggaaaagcaggagaccagttggtgccagataatctaaaagaaacagataaggaaaagggagaggtaggaaaatcttgggattcctggagtgacagcgaagaagaattttttgaatgcctaagtgatactgaagaacttaaaggaaatggacaagagagtggcaagaaaggaggacctaaggagatggcaaatttaaggccggaaggacggctctatcagcatgggaaacttacactgctgcataatggagaacctctctacattccagtaacccaggaaccagcacctatgacagaagatctgctagaagagcagtctgaagttttagctaaattaggtacatcggcagagggggctcaccttcgagcacgcatgcagagtgcctgtctgctctcagatatggagtcttttaaggcagctaatccaggttgctccctggaagattttgtgaggtggtattcaccccgggattatattgaagaggaggtgattgatgaaaagggcaatgtggtgctgaaaggagaactgagtgcccggatgaagattccaagcaatatgtgggtagaagcctgggaaacagctaagccaattcctgctagaaggcaaaggagactcttcgatgatacacgggaagcagaaaaggtgctgcactatctggcaatccagaaacctgcagaccttgctcggcacctgttaccttgtgtgattcatgcagctgtactcaaggtaaaggaagaagaaagtctcgaaaacatttcttcagttaagaagatcataaagcagataatatcccattccagtaaagttttgcacttccccaatccagaagacaagaaattggaagtaagtttgatgtagtgtcagaatcttgccaagtgttctcctcagttggcaaaaataatttttaagatgcgttttcaaagggctttgcttttttgccatctcgcaatgtatgcctcttccttttctaccgccaggaaatcattcaccagattactaatgtggaagctctcattgccagagctcggtcactaaaagccaagtttggaactgagaaatgtgaacaggaggaggtagtcaccggtgcaggaagaggacatgctggcaggatcattcacaagctgtttgtgaatgcccagagggctgcagctatgactccaccagaggaggaattgaagagaatgggctccccagaggaaagaaggcagaactccgtgtcagacttcccaccccctgctggccgggaattcattttgcgcaccactgtgccgcgccctgctccctactccaaagctctgcctcagcggatgtacagtgttctcaccaaagaggactttagacttgcaggtgccttttcatcagatacttccttcttctgattcttctagcattactcgttggtggcttcagagacagtgctgcctcctcctgagggagggaaggtaccagggagaacctgggaggtcctggagagggccctgtccagttgggtgatcaggaatcaaaccagcatcggaaagacttcccagcaccaagcttgagctgtgtcgtttcgtggagggggcagcgaggatgggcttgagctgttgagagatttctgccctagagatggcctttgtatatgggggggtggtggggggacacaaacacatcagacactccgtcctcacactggcaggacggtgttcatcgcattctcttctgtgaccagcctctaggctagcggctgcattcgtggtctgtgcaaacacttcgtggttctatatatcagcagcaagtgtgcaaaataaaggacctgttaactcagatttctggatattttggtggtagcttctagtcccagaatctgtgtttttaaaatactacatgacattctgtctattcaatcacctggtggtcatctttcttgtactaattaactgttgatgagcattttggatattctaggagaaagcctataatttcacatagtttctctttttcatgtaactgtaacctaaatgtattacttctgataaaactatatatcaaatgtcactgcaaattagttttatatctgtcatgtgagatttgtcttacttatttttcttttggttgccatggaagttatggccctgaaaatcgtctccctccccttctcttgctgtacagcatgcgttctctttttgtggttgctggctgggtactgtatttaatgaagtagagaatagcacttgcaaaaatacagtcttggtacctagagactgtcatgcagatagtataatttggtatatgtgctaatgcattgagtagaggattattttaacacactattttgcttttgtattttagttaaaataatcgatggggatgtgtagcccccccgtgtgaggatgacatcaccacatttctagtttcatggagctcaagatgtcttgtgtctgtgtggctagatggcctctgcttggtaatcttatttttaggcctaaaattcccacttaaatccaaagtaaaaatggttatactgaagcataaaccttgcctgtgtaattttaaaaaattaatagagctgtgcaaaccctgttatttttgtaaaaaaaaaaaaaatacatatctat

SEQ ID NO: 368364 - DNA, 2933 bp, Homo sapiens
aaaaaccataaagaaaagcaaaagaatgatttgtagttaattctggggatggagggtacacaggaggacttggaaaagcctggtaacattctgtttcctaagctggtgttttctttaaactatttctaatactctagtatgtatatttcttaatttaaaaaaagtttcaaatcagacaaaactctctaagccaaaaaaaagtccaccacaagtcattaaataaagcaaataataaaacagtatgtaagttattaatttttgttaagaaattacatatgcatctacatttttgtgtttaaatggacatacaagtagtttgagaggataaacacgaaaatgtggttttggggaagtaggatttcaggaaaatttctgcatcacctgtattttttttaaaattttgaaatccatgagcatttatcagtcagactcacattatgagattatacttcttaaaatttttattgatgtaaaagaattgtacatatttatagggttatacttcttttatctttactgttgaataaggagcctaaaggtagggtccatgttttgtacatacttctctgtattcttataataagaattggaaaaaaaataaaccaaaacaactaaaaccaaaaaatgtgtgggaagtcactaacaatgtttagaaatattaagtgagaaaagcaggttaaaaggcagtattttacatatttaatattagtgcccttagtacgtgtattctgcgtcttaaaatgaaaatgctccactgtcaatggttgttttctcttggtattgtaatcagtcggtagtttttattttctttgtattttccttatttgtgtgtattacataagaaagcagaaaaaaatagaatatttataattattaaagattgaagttcttaggtgctttcagtaacattatcctcacctttggggtcgtggctgcctatctggagtgctgtcttgttaaggattaagatgagtggctgaggatttgcacttctgtaagtggctgcttcatcctttgacacctgcgctgatcatttgtgtgcgctgcacctccttcaggtgctgcactatctggcaatccagaaacctgcagaccttgctcggcacctgttaccttgtgtgattcatgcagctgtactcaaggtaaaggaagaagaaagtctcgaaaacatttcttcagttaagaagatcataaagcagataatatcccattccagtaaagttttgcacttccccaatccagaagacaagaaattggaagaaatcattcaccagattactaatgtggaagctctcattgccagagctcggtcactaaaagccaagtttggaactgagaaatgtgaacaggaggaggaaaaggaagatcttgaaaggtttgtgagttgcctgctggagcagcctgaagtgttagtcaccggtgcaggaagaggacatgctggcaggatcattcacaagctgtttgtgaatgcccagagggctgcagctatgactccaccagaggaggaattgaagagaatgggctccccagaggaaagaaggcagaactccgtgtcagacttcccaccccctgctggccgggaattcattttgcgcaccactgtgccgcgccctgctccctactccaaagctctgcctcagcggatgtacagtgttctcaccaaagaggactttagacttgcaggtgccttttcatcagatacttccttcttctgattcttctagcattactcgttggtggcttcagagacagtgctgcctcctcctgagggagggaaggtaccagggagaacctgggaggtcctggagagggccctgtccagttgggtgatcaggaatcaaaccagcatcggaaagacttcccagcaccaagcttgagctgtgtcgtttcgtggagggggcagcgaggatgggcttgagctgttgagagatttctgccctagagatggcctttgtatatgggggggtggtggggggacacaaacacatcagacactccgtcctcacactggcaggacggtgttcatcgcattctcttctgtgaccagcctctaggctagcggctgcattcgtggtctgtgcaaacacttcgtggttctatatatcagcagcaagtgtgcaaaataaaggacctgttaactcagatttctggatattttggtggtagcttctagtcccagaatctgtgtttttaaaatactacatgacattctgtctattcaatcacctggtggtcatctttcttgtactaattaactgttgatgagcattttggatattctaggagaaagcctataatttcacatagtttctctttttcatgtaactgtaacctaaatgtattacttctgataaaactatatatcaaatgtcactgcaaattagttttatatctgtcatgtgagatttgtcttacttatttttcttttggttgccatggaagttatggccctgaaaatcgtctccctccccttctcttgctgtacagcatgcgttctctttttgtggttgctggctgggtactgtatttaatgaagtagagaatagcacttgcaaaaatacagtcttggtacctagagactgtcatgcagatagtataatttggtatatgtgctaatgcattgagtagaggattattttaacacactattttgcttttgtattttagttaaaataatcgatggggatgtgtagcccccccgtgtgaggatgacatcaccacatttctagtttcatggagctcaagatgtcttgtgtctgtgtggctagatggcctctgcttggtaatcttatttttaggcctaaaattcccacttaaatccaaagtaaaaatggttatactgaagcataaaccttgcctgtgtaattttaaaaaattaatagagctgtgcaaaccctgttatttttgtaaaaaaaaaaaaaatacatatctat

SEQ ID NO: 368365 - DNA, 1944 bp, Homo sapiens
caaaaacaaatatggatcattgcttttattggataaatataacttggtttatattatacaatttttttttcatcttttattaactgtagcattttctaagcttctagtctgaaaaaaatagactgaatattttttcttacactttgacagagataggctttaaacattttttatgagcacaggtgaaaaagcaggaagattgtcagttaagtcgataataattccaaatgtcaatcttatcttgctgtaaaatttcactccaaccttgttgggtttagccagtatcagcttgaggatttgtccacaaaactcctgtgggaggatggacgcccagtggcctggacagctcactttccaccctttcattgcctgtctctgtctcctaggtttgtgagttgcctgctggagcagcctgaagtgttagtcaccggtgcaggaagaggacatgctggcaggatcattcacaagctgtttgtgaatgcccagagggctgcagctatgactccaccagaggaggaattgaagagaatgggctccccagaggaaagaaggcagaactccgtgtcagacttcccaccccctgctggccgggaattcattttgcgcaccactgtgccgcgccctgctccctactccaaagctctgcctcagcggatgtacagtgttctcaccaaagaggactttagacttgcaggtgccttttcatcagatacttccttcttctgattcttctagcattactcgttggtggcttcagagacagtgctgcctcctcctgagggagggaaggtaccagggagaacctgggaggtcctggagagggccctgtccagttgggtgatcaggaatcaaaccagcatcggaaagacttcccagcaccaagcttgagctgtgtcgtttcgtggagggggcagcgaggatgggcttgagctgttgagagatttctgccctagagatggcctttgtatatgggggggtggtggggggacacaaacacatcagacactccgtcctcacactggcaggacggtgttcatcgcattctcttctgtgaccagcctctaggctagcggctgcattcgtggtctgtgcaaacacttcgtggttctatatatcagcagcaagtgtgcaaaataaaggacctgttaactcagatttctggatattttggtggtagcttctagtcccagaatctgtgtttttaaaatactacatgacattctgtctattcaatcacctggtggtcatctttcttgtactaattaactgttgatgagcattttggatattctaggagaaagcctataatttcacatagtttctctttttcatgtaactgtaacctaaatgtattacttctgataaaactatatatcaaatgtcactgcaaattagttttatatctgtcatgtgagatttgtcttacttatttttcttttggttgccatggaagttatggccctgaaaatcgtctccctccccttctcttgctgtacagcatgcgttctctttttgtggttgctggctgggtactgtatttaatgaagtagagaatagcacttgcaaaaatacagtcttggtacctagagactgtcatgcagatagtataatttggtatatgtgctaatgcattgagtagaggattattttaacacactattttgcttttgtattttagttaaaataatcgatggggatgtgtagcccccccgtgtgaggatgacatcaccacatttctagtttcatggagctcaagatgtcttgtgtctgtgtggctagatggcctctgcttggtaatcttatttttaggcctaaaattcccacttaaatccaaagtaaaaatggttatactgaagcataaaccttgcctgtgtaattttaaaaaattaatagagctgtgcaaaccctgttatttttgtaaaaaaaaaaaaaatacatatctat

SEQ ID NO: 368366 - DNA, 1558 bp, Homo sapiens
gggacattttcatatctttattatgttaattcatctgtccttcaaaagcatctgagtttagcatttgacctgcttttgactttagcatttgattcttttccaggctgcagctatgactccaccagaggaggaattgaagagaatgggctccccagaggaaagaaggcagaactccgtgtcagacttcccaccccctgctggccgggaattcattttgcgcaccactgtgccgcgccctgctccctactccaaagctctgcctcagcggatgtacagtgttctcaccaaagaggactttagacttgcaggtgccttttcatcagatacttccttcttctgattcttctagcattactcgttggtggcttcagagacagtgctgcctcctcctgagggagggaaggtaccagggagaacctgggaggtcctggagagggccctgtccagttgggtgatcaggaatcaaaccagcatcggaaagacttcccagcaccaagcttgagctgtgtcgtttcgtggagggggcagcgaggatgggcttgagctgttgagagatttctgccctagagatggcctttgtatatgggggggtggtggggggacacaaacacatcagacactccgtcctcacactggcaggacggtgttcatcgcattctcttctgtgaccagcctctaggctagcggctgcattcgtggtctgtgcaaacacttcgtggttctatatatcagcagcaagtgtgcaaaataaaggacctgttaactcagatttctggatattttggtggtagcttctagtcccagaatctgtgtttttaaaatactacatgacattctgtctattcaatcacctggtggtcatctttcttgtactaattaactgttgatgagcattttggatattctaggagaaagcctataatttcacatagtttctctttttcatgtaactgtaacctaaatgtattacttctgataaaactatatatcaaatgtcactgcaaattagttttatatctgtcatgtgagatttgtcttacttatttttcttttggttgccatggaagttatggccctgaaaatcgtctccctccccttctcttgctgtacagcatgcgttctctttttgtggttgctggctgggtactgtatttaatgaagtagagaatagcacttgcaaaaatacagtcttggtacctagagactgtcatgcagatagtataatttggtatatgtgctaatgcattgagtagaggattattttaacacactattttgcttttgtattttagttaaaataatcgatggggatgtgtagcccccccgtgtgaggatgacatcaccacatttctagtttcatggagctcaagatgtcttgtgtctgtgtggctagatggcctctgcttggtaatcttatttttaggcctaaaattcccacttaaatccaaagtaaaaatggttatactgaagcataaaccttgcctgtgtaattttaaaaaattaatagagctgtgcaaaccctgttatttttgtaaaaaaaaaaaaaatacatatctat

SEQ ID NO: 368367 - DNA, 1358 bp, Homo sapiens
gacccacgcgtcggcctctctgacctgcagtcacccctgctccctactccaaagctctgcctcagcggatgtacagtgttctcaccaaagaggactttagacttgcaggtgccttttcatcagatacttccttcttctgattcttctagcattactcgttggtggcttcagagacagtgctgcctcctcctgagggagggaaggtaccagggagaacctgggaggtcctggagagggccctgtccagttgggtgatcaggaatcaaaccagcatcggaaagacttcccagcaccaagcttgagctgtgtcgtttcgtggagggggcagcgaggatgggcttgagctgttgagagatttctgccctagagatggcctttgtatatgggggggtggtggggggacacaaacacatcagacactccgtcctcacactggcaggacggtgttcatcgcattctcttctgtgaccagcctctaggctagcggctgcattcgtggtctgtgcaaacacttcgtggttctatatatcagcagcaagtgtgcaaaataaaggacctgttaactcagatttctggatattttggtggtagcttctagtcccagaatctgtgtttttaaaatactacatgacattctgtctattcaatcacctggtggtcatctttcttgtactaattaactgttgatgagcattttggatattctaggagaaagcctataatttcacatagtttctctttttcatgtaactgtaacctaaatgtattacttctgataaaactatatatcaaatgtcactgcaaattagttttatatctgtcatgtgagatttgtcttacttatttttcttttggttgccatggaagttatggccctgaaaatcgtctccctccccttctcttgctgtacagcatgcgttctctttttgtggttgctggctgggtactgtatttaatgaagtagagaatagcacttgcaaaaatacagtcttggtacctagagactgtcatgcagatagtataatttggtatatgtgctaatgcattgagtagaggattattttaacacactattttgcttttgtattttagttaaaataatcgatggggatgtgtagcccccccgtgtgaggatgacatcaccacatttctagtttcatggagctcaagatgtcttgtgtctgtgtggctagatggcctctgcttggtaatcttatttttaggcctaaaattcccacttaaatccaaagtaaaaatggttatactgaagcataaaccttgcctgtgtaattttaaaaaattaatagagctgtgcaaaccctgttatttttgtaaaaaaaaaaaaaatacatatctat

SEQ ID NO: 368368 - DNA, 913 bp, Homo sapiens
cggcacacagggctgggtaggaggggttggaggggctagcggctgcattcgtggtctgtgcaaacacttcgtggttctatatatcagcagcaagtgtgcaaaataaaggacctgttaactcagatttctggatattttggtggtagcttctagtcccagaatctgtgtttttaaaatactacatgacattctgtctattcaatcacctggtggtcatctttcttgtactaattaactgttgatgagcattttggatattctaggagaaagcctataatttcacatagtttctctttttcatgtaactgtaacctaaatgtattacttctgataaaactatatatcaaatgtcactgcaaattagttttatatctgtcatgtgagatttgtcttacttatttttcttttggttgccatggaagttatggccctgaaaatcgtctccctccccttctcttgctgtacagcatgcgttctctttttgtggttgctggctgggtactgtatttaatgaagtagagaatagcacttgcaaaaatacagtcttggtacctagagactgtcatgcagatagtataatttggtatatgtgctaatgcattgagtagaggattattttaacacactattttgcttttgtattttagttaaaataatcgatggggatgtgtagcccccccgtgtgaggatgacatcaccacatttctagtttcatggagctcaagatgtcttgtgtctgtgtggctagatggcctctgcttggtaatcttatttttaggcctaaaattcccacttaaatccaaagtaaaaatggttatactgaagcataaaccttgcctgtgtaattttaaaaaattaatagagctgtgcaaaccctgttatttttgtaaaaaaaaaaaaaatacatatctat

SEQ ID NO: 368369 - DNA, 1042 bp, Homo sapiens
agatgttaaattgttgtattgaaagaaagaaggcacgtgatgaggggaaaaagacaagtgcttcagatgtcactaatatatatccaggggatgctggaaaagcaggagaccagttggtgccagataatctaaaagaaacagataaggaaaagggagaggtaggaaaatcttgggattcctggagtgacagcgaagaagaattttttgaatgcctaagtgatactgaagaacttaaaggacctgttaactcagatttctggatattttggtggtagcttctagtcccagaatctgtgtttttaaaatactacatgacattctgtctattcaatcacctggtggtcatctttcttgtactaattaactgttgatgagcattttggatattctaggagaaagcctataatttcacatagtttctctttttcatgtaactgtaacctaaatgtattacttctgataaaactatatatcaaatgtcactgcaaattagttttatatctgtcatgtgagatttgtcttacttatttttcttttggttgccatggaagttatggccctgaaaatcgtctccctccccttctcttgctgtacagcatgcgttctctttttgtggttgctggctgggtactgtatttaatgaagtagagaatagcacttgcaaaaatacagtcttggtacctagagactgtcatgcagatagtataatttggtatatgtgctaatgcattgagtagaggattattttaacacactattttgcttttgtattttagttaaaataatcgatggggatgtgtagcccccccgtgtgaggatgacatcaccacatttctagtttcatggagctcaagatgtcttgtgtctgtgtggctagatggcctctgcttggtaatcttatttttaggcctaaaattcccacttaaatccaaagtaaaaatggttatactgaagcataaaccttgcctgtgtaattttaaaaaattaatagagctgtgcaaaccctgttatttttgtaaaaaaaaaaaaaatacatatctat

SEQ ID NO: 368370 - DNA, 3206 bp, Homo sapiens
agcgccaggcccggcgctcctcaagatggctgccgacagtgagcccgaatccgaggtatttgagatcacggacttcaccactgcctcggaatgggaaaggtttatttccaaagttgaagaagtcttgaatgactggaaactgattggaaactctttgggaaagccactcgaaaagggtatatttacttctggcacatgggaagagaaatcagatgaaatttcctttgctgacttcaagttctcagtcactcatcattatcttgtacaagagtccactgataaagaaggaaaggatgagttattagaggatgttgttccacaatctatgcaagatttgctgggtatgaataatgactttcctccaagagcacattgcctggtaagatggtatgggctacgtgagttcgtggtgattgcccctgctgcacacagtgacgctgttctcagcgaatctaagtgcaaccttcttctgagttctgtttctattgccttgggaaacactggctgtcaggtgccactctttgtgcaaattcaccacaaatggcgaagaatgtatgtaggagaatgtcaaggtcctggtgtacgaactgatttcgaaatggttcatcttagaaaagtgccaaatcagtacactcacttatcaggtctgctggatatcttcaaatcaaagattggatgtcctttaactccattgcctccagttagtattgctattcgatttacctatgtacttcaagattggcagcagtatttttggcctcagcaacctccagacatagatgcccttgtaggaggagaagttggaggcttggagtttggcaagttaccatttggtgcctgcgaagatcctattagtgaactccatttagctactacatggcctcatctgaccgaagggatcattgtggataatgatgtttattctgatttggatcctattcaagctccacattggtctgttagagttcgaaaagctgagaatcctcagtgtttgctaggtgattttgtcactgaattttttaaaatttgccgtcgaaaggagtcaactgatgagattcttggacgatctgcatttgaggaagaaggcaaagaaactgctgatataactcatgctttgtcaaaattgacagagccggcatcagttccaattcataaattatcagtttcaaatatggtacacactgcaaagaagaaaatccgaaaacacagaggtgtagaggagtcaccgctaaataatgatgttcttaatactattctcctgttcttattccctgatgctgtttctgagaaaccattagatggaactacttcaacagataataataatcctccatcagagagtgaagactataatctctacaatcagttcaagtctgcaccatctgacagtttaacatacaaactggctttgtgtctctgtatgatcaatttttaccatggagggttgaaaggagtggcacacctctggcaggaatttgttcttgaaatgcgtttccgatgggaaaacaactttctgattccaggattagcaagtggacccccagatctgaggtgttgtttactgcatcagaaactacagatgttaaattgttgtattgaaagaaagaaggcacgtgatgaggggaaaaagacaagtgcttcagatgtcactaatatatatccaggggatgctggaaaagcaggagaccagttggtgccagataatctaaaagaaacagataaggaaaagggagaggtaggaaaatcttgggattcctggagtgacagcgaagaagaattttttgaatgcctaagtgatactgaagaacttaaaggaaatggacaagagagtggcaagaaaggaggacctaaggagatggcaaatttaaggccggaaggacggctctatcagcatgggaaacttacactgctgcataatggagaacctctctacattccagtaacccaggaaccagcacctatgacagaagatctgctagaagagcagtctgaagttttagctaaattaggtacatcggcagagggggctcaccttcgagcacgcatgcagagtgcctgtctgctctcagatatggagtcttttaaggcagctaatccaggttgctccctggaagattttgtgaggtggtattcaccccgggattatattgaagaggaggtgattgatgaaaagggcaatgtggtgctgaaaggagaactgagtgcccggatgaagattccaagcaatatgtgggtagaagcctgggaaacagctaagccaattcctgctagaaggcaaaggagactcttcgatgatacacgggaagcagaaaaggtgctgcactatctggcaatccagaaacctgcagaccttgctcggcacctgttaccttgtgtgattcatgcagctgtactcaaggtaaaggaagaagaaagtctcgaaaacatttcttcagttaagaagatcataaagcagataatatcccattccagtaaagttttgcacttccccaatccagaagacaagaaattggaagaaatcattcaccagattactaatgtggaagctctcattgccagagctcggtcactaaaagccaagtttggaactgagaaatgtgaacaggaggaggaaaaggaagatcttgaaaggtttgtgagttgcctgctggagcagcctgaagtgttagtcaccggtgcaggaagaggacatgctggcaggatcattcacaagctgtttgtgaatgcccagagggctgcagctatgactccaccagaggaggaattgaagagaatgggctccccagaggaaagaaggcagaactccgtgtcagacttcccaccccctgctggccgggaattcattttgcgcaccactgtgccgcgccctgctccctactccaaagctctgcctcagcggatgtacagtgttctcaccaaagaggactttagacttgcaggttaaaataatcgatggggatgtgtagcccccccgtgtgaggatgacatcaccacatttctagtttcatggagctcaagatgtcttgtgtctgtgtggctagatggcctctgcttggtaatcttatttttaggcctaaaattcccacttaaatccaaagtaaaaatggttatactgaagcataaaccttgcctgtgtaattttaaaaaattaatagagctgtgcaaaccctgttatttttgtaaaaaaaaaaaaaatacatatctat

SEQ ID NO: 368371 - DNA, 3191 bp, Homo sapiens
agcgccaggcccggcgctcctcaagatggctgccgacagtgagcccgaatccgaggtatttgagatcacggacttcaccactgcctcggaatgggaaaggtttatttccaaagttgaagaagtcttgaatgactggaaactgattggaaactctttgggaaagccactcgaaaagggtatatttacttctggcacatgggaagagaaatcagatgaaatttcctttgctgacttcaagttctcagtcactcatcattatcttgtacaagagtccactgataaagaaggaaaggatgagttattagaggatgttgttccacaatctatgcaagatttgctgggtatgaataatgactttcctccaagagcacattgcctggtaagatggtatgggctacgtgagttcgtggtgattgcccctgctgcacacagtgacgctgttctcagcgaatctaagtgcaaccttcttctgagttctgtttctattgccttgggaaacactggctgtcaggtgccactctttgtgcaaattcaccacaaatggcgaagaatgtatgtaggagaatgtcaaggtcctggtgtacgaactgatttcgaaatggttcatcttagaaaagtgccaaatcagtacactcacttatcaggtctgctggatatcttcaaatcaaagattggatgtcctttaactccattgcctccagttagtattgctattcgatttacctatgtacttcaagattggcagcagtatttttggcctcagcaacctccagacatagatgcccttgtaggaggagaagttggaggcttggagtttggcaagttaccatttggtgcctgcgaagatcctattagtgaactccatttagctactacatggcctcatctgaccgaagggatcattgtggataatgatgtttattctgatttggatcctattcaagctccacattggtctgttagagttcgaaaagctgagaatcctcagtgtttgctaggtgattttgtcactgaattttttaaaatttgccgtcgaaaggagtcaactgatgagattcttggacgatctgcatttgaggaagaaggcaaagaaactgctgatataactcatgctttgtcaaaattgacagagccggcatcagttccaattcataaattatcagtttcaaatatggtacacactgcaaagaagaaaatccgaaaacacagaggtgtagaggagtcaccgctaaataatgatgttcttaatactattctcctgttcttattccctgatgctgtttctgagaaaccattagatggaactacttcaacagataataataatcctccatcagagagtgaagactataatctctacaatcagttcaagtctgcaccatctgacagtttaacatacaaactggctttgtgtctctgtatgatcaatttttaccatggagggttgaaaggagtggcacacctctggcaggaatttgttcttgaaatgcgtttccgatgggaaaacaactttctgattccaggattagcaagtggacccccagatctgaggtgttgtttactgcatcagaaactacagatgttaaattgttgtattgaaagaaagaaggcacgtgatgaggggaaaaagacaagtgcttcagatgtcactaatatatatccaggggatgctggaaaagcaggagaccagttggtgccagataatctaaaagaaacagataaggaaaagggagaggtaggaaaatcttgggattcctggagtgacagcgaagaagaattttttgaatgcctaagtgatactgaagaacttaaaggaaatggacaagagagtggcaagaaaggaggacctaaggagatggcaaatttaaggccggaaggacggctctatcagcatgggaaacttacactgctgcataatggagaacctctctacattccagtaacccaggaaccagcacctatgacagaagatctgctagaagagcagtctgaagttttagctaaattaggtacatcggcagagggggctcaccttcgagcacgcatgcagagtgcctgtctgctctcagatatggagtcttttaaggcagctaatccaggttgctccctggaagattttgtgaggtggtattcaccccgggattatattgaagaggaggtgattgatgaaaagggcaatgtggtgctgaaaggagaactgagtgcccggatgaagattccaagcaatatgtgggtagaagcctgggaaacagctaagccaattcctgctagaaggcaaaggagactcttcgatgatacacgggaagcagaaaaggtgctgcactatctggcaatccagaaacctgcagaccttgctcggcacctgttaccttgtgtgattcatgcagctgtactcaaggtaaaggaagaagaaagtctcgaaaacatttcttcagttaagaagatcataaagcagataatatcccattccagtaaagttttgcacttccccaatccagaagacaagaaattggaagaaatcattcaccagattactaatgtggaagctctcattgccagagctcggtcactaaaagccaagtttggaactgagaaatgtgaacaggaggaggaaaaggaagatcttgaaaggtttgtgagttgcctgctggagcagcctgaagtgttagtcaccggtgcaggaagaggacatgctggcaggatcattcacaagctgtttgtgaatgcccagagggtatgtgagagtcattattgactccatcataatctctccaaacctctacttgggaagaggctgttttagttcccacacgtggctgatcacactcatgtcacctgagtgtaagtctgggcattgggtttgaacactgaagaaacaatgacttctgagtcttcgaaatccatttgatttcttacatgttgaattaaaatgataagtatattctaggacctaaattttaaaaattagaagagtccaaaatccattgttatagaagctggcagggagtcagttagcaatggccagtgctgtgctgtgggaaaaaatgtttactcacaggtactttcaaatgagaatggagttcagttttaccatctttaaaccccatgtagggcaaagtggagtcacaactcagcttgaattataaatataattgttcttgtaatggtgaggagatctacctttgaggttt

SEQ ID NO: 368372 - DNA, 2489 bp, Homo sapiens
agcgccaggcccggcgctcctcaagatggctgccgacagtgagcccgaatccgaggtatttgagatcacggacttcaccactgcctcggaatgggaaaggtttatttccaaagttgaagaagtcttgaatgactggaaactgattggaaactctttgggaaagccactcgaaaagggtatatttacttctggcacatgggaagagaaatcagatgaaatttcctttgctgacttcaagttctcagtcactcatcattatcttgtacaagagtccactgataaagaaggaaaggatgagttattagaggatgttgttccacaatctatgcaagatttgctgggtatgaataatgactttcctccaagagcacattgcctggtaagatggtatgggctacgtgagttcgtggtgattgcccctgctgcacacagtgacgctgttctcagcgaatctaagtgcaaccttcttctgagttctgtttctattgccttgggaaacactggctgtcaggtgccactctttgtgcaaattcaccacaaatggcgaagaatgtatgtaggagaatgtcaaggtcctggtgtacgaactgatttcgaaatggttcatcttagaaaagtgccaaatcagtacactcacttatcaggtctgctggatatcttcaaatcaaagattggatgtcctttaactccattgcctccagttagtattgctattcgatttacctatgtacttcaagattggcagcagtatttttggcctcagcaacctccagacatagatgcccttgtaggaggagaagttggaggcttggagtttggcaagttaccatttggtgcctgcgaagatcctattagtgaactccatttagctactacatggcctcatctgaccgaagggatcattgtggataatgatgtttattctgatttggatcctattcaagctccacattggtctgttagagttcgaaaagctgagaatcctcagtgtttgctaggtgattttgtcactgaattttttaaaatttgccgtcgaaaggagtcaactgatgagattcttggacgatctgcatttgaggaagaaggcaaagaaactgctgatataactcatgctttgtcaaaattgacagagccggcatcagttccaattcataaattatcagtttcaaatatggtacacactgcaaagaagaaaatccgaaaacacagaggtgtagaggagtcaccgctaaataatgatgttcttaatactattctcctgttcttattccctgatgctgtttctgagaaaccattagatggaactacttcaacagataataataatcctccatcagagagtgaagactataatctctacaatcagttcaagtctgcaccatctgacagtttaacatacaaactggctttgtgtctctgtatgatcaatttttaccatggagggttgaaaggagtggcacacctctggcaggaatttgttcttgaaatgcgtttccgatgggaaaacaactttctgattccaggattagcaagtggacccccagatctgaggtgttgtttactgcatcagaaactacagatgttaaattgttgtattgaaagaaagaaggcacgtgatgaggggaaaaagacaagtgcttcagatgtcactaatatatatccaggggatgctggaaaagcaggagaccagttggtgccagataatctaaaagaaacagataaggaaaagggagaggtaggaaaatcttgggattcctggagtgacagcgaagaagaattttttgaatgcctaagtgatactgaagaacttaaaggaaatggacaagagagtggcaagaaaggaggacctaaggagatggcaaatttaaggccggaaggacggctctatcagcatgggaaacttacactgctgcataatggagaacctctctacattccagtaacccaggaaccagcacctatgacagaagatctgctagaagagcagtctgaagttttagctaaattaggtacatcggcagagggggctcaccttcgagcacgcatgcagagtgcctgtctgctctcagatatggagtcttttaaggcagctaatccaggttgctccctggaagattttgtgaggtggtattcaccccgggattatattgaagaggaggtgattgatgaaaagggcaatgtggtgctgaaaggagaactgagtgcccggatgaagattccaagcaatatgtgggtagaagcctgggaaacagctaagccaattcctgctagaaggcaaaggagactcttcgatgatacacgggaagcagaaaaggtgctgcactatctggcaatccagaaacctgcagaccttgctcggcacctgttaccttgtgtgattcatgcagctgtactcaaggtaaaggaagaagccagtgatcggaacatgtcggcaatatagaagactcgagtagagcaagataatgagcccattaacagtaaagtgattg

SEQ ID NO: 368373 - DNA, 1504 bp, Homo sapiens
agcgccaggcccggcgctcctcaagatggctgccgacagtgagcccgaatccgaggtatttgagatcacggacttcaccactgcctcggaatgggaaaggtttatttccaaagttgaagaagtcttgaatgactggaaactgattggaaactctttgggaaagccactcgaaaagggtatatttacttctggcacatgggaagagaaatcagatgaaatttcctttgctgacttcaagttctcagtcactcatcattatcttgtacaagagtccactgataaagaaggaaaggatgagttattagaggatgttgttccacaatctatgcaagatttgctgggtatgaataatgactttcctccaagagcacattgcctggtaagatggtatgggctacgtgagttcgtggtgattgcccctgctgcacacagtgacgctgttctcagcgaatctaagtgcaaccttcttctgagttctgtttctattgccttgggaaacactggctgtcaggtgccactctttgtgcaaattcaccacaaatggcgaagaatgtatgtaggagaatgtcaaggtcctggtgtacgaactgatttcgaaatggttcatcttagaaaagtgccaaatcagtacactcacttatcaggtctgctggatatcttcaaatcaaagattggatgtcctttaactccattgcctccagttagtattgctattcgatttacctatgtacttcaagattggcagcagtatttttggcctcagcaacctccagacatagatgcccttgtaggaggagaagttggaggcttggagtttggcaagttaccatttggtgcctgcgaagatcctattagtgaactccatttagctactacatggcctcatctgaccgaagggatcattgtggataatgatgtttattctgatttggatcctattcaagctccacattggtctgttagagttcgaaaagctgagaatcctcagtgtttgctaggtgattttgtcactgaattttttaaaatttgccgtcgaaaggagtcaactgatgagattcttggacgatctgcatttgaggaagaaggcaaagaaactgctgatataactcatgctttgtcaaaattgacagagccggcatcagttccaattcataaattatcagtttcaaatatggtacacactgcaaagaagaaaatccgaaaacacagaggtgtagaggagtcaccgctaaataatgatgttcttaatactattctcctgttcttattccctgatgctgtttctgagaaaccattagatggaactacttcaacagataataataatcctccatcagagagtgaagactataatctctacaatcagttcaagtctgcaccatctgacagtttaacatacaaactggctttgtgtctctgtatgatcaatttttaccatggagggttgaaaggagtggcacacctctggtcgacgcggccgcgaatttagtagtagtagggccgc

SEQ ID NO: 368374 - DNA, 361 bp, Homo sapiens
actaaatgtactgagtcctctctggtcaaattgttaaaatataaaaaatacctttttaaagaaattacataataataggaaaaaaggtgtgctgttgtatttagaagctttctccctacttcctaggtttatttccaaagttgaagaagtcttgaatgactggaaactgattggaaactctttgggaaagccactcgaaaaggtcagatctatttgctggtgtctctaaatgactatttactttgaaacctctattttccagccctttgctgcatttggcacatttgaattaaatgttttttaaagttacgtataatctataaacatcaaatagcatttggaagaatttggatttaaatct

SEQ ID NO: 368375 - DNA, 547 bp, Homo sapiens
gttttgatttcttatcaatatagctaaaaattatggtagtatagaaaataatcatatctgaagcaattttactaaaactaagctttcttttctccttactttatttgatagattagcaagtggacccccagatctgaggtgttgtttactgcatcagaaactacaggtaaagatttctcaatgacatggataaatgtggtcttgatttaatcagattattctaatactaaatgtaataatgggttacatgctgttctcatggtgctgctgtaggttgcctatagtcagtagtcactgcaattcacaaggtcctgagaagtggagagtgaaaattaaatattcaagcagtaggtagatttttatttttctgtaactaattcaactataaatgttatttctcttttcttaagatgttaaattgttgtattgaaagaaagaaggcacgtgatgaggggaaaaagacaagtgcttcagatgtcactaatatatatccaggggatgctggaaaagcaggagaccagttggtgccagataatctaaaagaaac

SEQ ID NO: 368376 - DNA, 508 bp, Homo sapiens
agttccattttcacctgcttaggttggtgatataattaatatttatttctgttctttttatagaaactgctgatataactcatgctttgtcaaaattgacagagccggcatcagttccaattcataaattatcagtttcaaatatggtacacactgcaaagaagaaaatccgaaaacacagaggtgtagaggagtcaccgctaaataatgatgttcttaatactattctcctggtaactaaatgttctgtctttataggtctatatgcagaatcatttattcattatatagccagttccttttatgtggtaggcagtgaccttggaatatacaatgagtaaaacagttaccacatttagaaaattcctactagtttagtggtgagaaggaaagtaaatagtagttgtgataccatgttgcatgtgagaaatctggcaagggggctgtgagagcacagcaggggtgcatttgtctctgtctgggcaggtgaaaggggggtaccgagctg

SEQ ID NO: 368377 - DNA, 379 bp, Homo sapiens
aaaaaaaaaaaaaatacatatctatatataatatgtgtgtgtgtgtgacatatgcacacgtctctgtgtatgtgaagtaggggaggccctgggggatgacctcccagcctttatgatgcttttctctatgctgctggacttcattcttactggtccacgcagatgcaggcggcctgaggccagtgctgtaccaagtagaagacggttcctaaggacagagtttgtctgttttctaacaaagaaaaattctacaaaggagaggttgggcgttacaaaggcattgtgaatctaataaaaggaaagtgtcgctttctgtggcgttttctttcattttctcccgctgaggcatttcagtctaatttcatgtggttttgtgctg

SEQ ID NO: 368378 - DNA, 4189 bp, Homo sapiens
agcgccaggcccggcgctcctcaagatggctgccgacagtgagcccgaatccgaggtatttgagatcacggacttcaccactgcctcggaatgggaaaggtttatttccaaagttgaagaagtcttgaatgactggaaactgattggaaactctttgggaaagccactcgaaaagggtatatttacttctggcacatgggaagagaaatcagatgaaatttcctttgctgacttcaagttctcagtcactcatcattatcttgtacaagagtccactgataaagaaggaaaggatgagttattagaggatgttgttccacaatctatgcaagatttgctgggtatgaataatgactttcctccaagagcacattgcctggtaagatggtatgggctacgtgagttcgtggtgattgcccctgctgcacacagtgacgctgttctcagcgaatctaagtgcaaccttcttctgagttctgtttctattgccttgggaaacactggctgtcaggtgccactctttgtgcaaattcaccacaaatggcgaagaatgtatgtaggagaatgtcaaggtcctggtgtacgaactgatttcgaaatggttcatcttagaaaagtgccaaatcagtacactcacttatcaggtctgctggatatcttcaaatcaaagattggatgtcctttaactccattgcctccagttagtattgctattcgatttacctatgtacttcaagattggcagcagtatttttggcctcagcaacctccagacatagatgcccttgtaggaggagaagttggaggcttggagtttggcaagttaccatttggtgcctgcgaagatcctattagtgaactccatttagctactacatggcctcatctgaccgaagggatcattgtggataatgatgtttattctgatttggatcctattcaagctccacattggtctgttagagttcgaaaagctgagaatcctcagtgtttgctaggtgattttgtcactgaattttttaaaatttgccgtcgaaaggagtcaactgatgagattcttggacgatctgcatttgaggaagaaggcaaagaaactgctgatataactcatgctttgtcaaaattgacagagccggcatcagttccaattcataaattatcagtttcaaatatggtacacactgcaaagaagaaaatccgaaaacacagaggtgtagaggagtcaccgctaaataatgatgttcttaatactattctcctgttcttattccctgatgctgtttctgagaaaccattagatggaactacttcaacagataataataatcctccatcagagagtgaagactataatctctacaatcagttcaagtctgcaccatctgacagtttaacatacaaactggctttgtgtctctgtatgatcaatttttaccatggagggttgaaaggagtggcacacctctggcaggaatttgttcttgaaatgcgtttccgatgggaaaacaactttctgattccaggattagcaagtggacccccagatctgaggtgttgtttactgcatcagaaactacagatgttaaattgttgtattgaaagaaagaaggcacgtgatgaggggaaaaagacaagtgcttcagatgtcactaatatatatccaggggatgctggaaaagcaggagaccagttggtgccagataatctaaaagaaacagataaggaaaagggagaggtaggaaaatcttgggattcctggagtgacagcgaagaagaattttttgaatgcctaagtgatactgaagaacttaaaggaaatggacaagagagtggcaagaaaggaggacctaaggagatggcaaatttaaggccggaaggacggctctatcagcatgggaaacttacactgctgcataatggagaacctctctacattccagtaacccaggaaccagcacctatgacagaagatctgctagaagagcagtctgaagttttagctaaattaggtacatcggcagagggggctcaccttcgagcacgcatgcagagtgcctgtctgctctcagatatggagtcttttaaggcagctaatccaggttgctccctggaagattttgtgaggtggtattcaccccgggattatattgaagaggaggtgattgatgaaaagggcaatgtggtgctgaaaggagaactgagtgcccggatgaagattccaagcaatatgtgggtagaagcctgggaaacagctaagccaattcctgctagaaggcaaaggagactcttcgatgatacacgggaagcagaaaaggtgctgcactatctggcaatccagaaacctgcagaccttgctcggcacctgttaccttgtgtgattcatgcagctgtactcaaggtaaaggaagaagaaagtctcgaaaacatttcttcagttaagaagatcataaagcagataatatcccattccagtaaagttttgcacttccccaatccagaagacaagaaattggaagaaatcattcaccagattactaatgtggaagctctcattgccagagctcggtcactaaaagccaagtttggaactgagaaatgtgaacaggaggaggaaaaggaagatcttgaaaggtttgtgagttgcctgctggagcagcctgaagtgttagtcaccggtgcaggaagaggacatgctggcaggatcattcacaagctgtttgtgaatgcccagagggctgcagctatgactccaccagaggaggaattgaagagaatgggctccccagaggaaagaaggcagaactccgtgtcagacttcccaccccctgctggccgggaattcattttgcgcaccactgtgccgcgccctgctccctactccaaagctctgcctcagcggatgtacagtgttctcaccaaagaggactttagacttgcaggtgccttttcatcagatacttccttcttctgattcttctagcattactcgttggtggcttcagagacagtgctgcctcctcctgagggagggaaggtaccagggagaacctgggaggtcctggagagggccctgtccagttgggtgatcaggaatcaaaccagcatcggaaagacttcccagcaccaagcttgagctgtgtcgtttcgtggagggggcagcgaggatgggcttgagctgttgagagatttctgccctagagatggcctttgtatatgggggggtggtggggggacacaaacacatcagacactccgtcctcacactggcaggacggtgttcatcgcattctcttctgtgaccagcctctaggctagcggctgcattcgtggtctgtgcaaacacttcgtggttctatatatcagcagcaagtgtgcaaaataaaggacctgttaactcagatttctggatattttggtggtagcttctagtcccagaatctgtgtttttaaaatactacatgacattctgtctattcaatcacctggtggtcatctttcttgtactaattaactgttgatgagcattttggatattctaggagaaagcctataatttcacatagtttctctttttcatgtaactgtaacctaaatgtattacttctgataaaactatatatcaaatgtcactgcaaattagttttatatctgtcatgtgagatttgtcttacttatttttcttttggttgccatggaagttatggccctgaaaatcgtctccctccccttctcttgctgtacagcatgcgttctctttttgtggttgctggctgggtactgtatttaatgaagtagagaatagcacttgcaaaaatacagtcttggtacctagagactgtcatgcagatagtataatttggtatatgtgctaatgcattgagtagaggattattttaacacactattttgcttttgtattttagttaaaataatcgatggggatgtgtagcccccccgtgtgaggatgacatcaccacatttctagtttcatggagctcaagatgtcttgtgtctgtgtggctagatggcctctgcttggtaatcttatttttaggcctaaaattcccacttaaatccaaagtaaaaatggttatactgaagcataaaccttgcctgtgtaattttaaaaaattaatagagctgtgcaaaccctgttatttttgtaaaaaaaaaaaaaatacatatctat

SEQ ID NO: 368379 - DNA, 4107 bp, Homo sapiens
agcgccaggcccggcgctcctcaagatggctgccgacagtgagcccgaatccgaggtatttgagatcacggacttcaccactgcctcggaatgggaaaggtttatttccaaagttgaagaagtcttgaatgactggaaactgattggaaactctttgggaaagccactcgaaaagggtatatttacttctggcacatgggaagagaaatcagatgaaatttcctttgctgacttcaagttctcagtcactcatcattatcttgtacaagagtccactgataaagaaggaaaggatgagttattagaggatgttgttccacaatctatgcaagatttgctgggtatgaataatgactttcctccaagagcacattgcctggtaagatggtatgggctacgtgagttcgtggtgattgcccctgctgcacacagtgacgctgttctcagcgaatctaagtgcaaccttcttctgagttctgtttctattgccttgggaaacactggctgtcaggtgccactctttgtgcaaattcaccacaaatggcgaagaatgtatgtaggagaatgtcaaggtcctggtgtacgaactgatttcgaaatggttcatcttagaaaagtgccaaatcagtacactcacttatcaggtctgctggatatcttcaaatcaaagattggatgtcctttaactccattgcctccagttagtattgctattcgatttacctatgtacttcaagattggcagcagtatttttggcctcagcaacctccagtgaactccatttagctactacatggcctcatctgaccgaagggatcattgtggataatgatgtttattctgatttggatcctattcaagctccacattggtctgttagagttcgaaaagctgagaatcctcagtgtttgctaggtgattttgtcactgaattttttaaaatttgccgtcgaaaggagtcaactgatgagattcttggacgatctgcatttgaggaagaaggcaaagaaactgctgatataactcatgctttgtcaaaattgacagagccggcatcagttccaattcataaattatcagtttcaaatatggtacacactgcaaagaagaaaatccgaaaacacagaggtgtagaggagtcaccgctaaataatgatgttcttaatactattctcctgttcttattccctgatgctgtttctgagaaaccattagatggaactacttcaacagataataataatcctccatcagagagtgaagactataatctctacaatcagttcaagtctgcaccatctgacagtttaacatacaaactggctttgtgtctctgtatgatcaatttttaccatggagggttgaaaggagtggcacacctctggcaggaatttgttcttgaaatgcgtttccgatgggaaaacaactttctgattccaggattagcaagtggacccccagatctgaggtgttgtttactgcatcagaaactacagatgttaaattgttgtattgaaagaaagaaggcacgtgatgaggggaaaaagacaagtgcttcagatgtcactaatatatatccaggggatgctggaaaagcaggagaccagttggtgccagataatctaaaagaaacagataaggaaaagggagaggtaggaaaatcttgggattcctggagtgacagcgaagaagaattttttgaatgcctaagtgatactgaagaacttaaaggaaatggacaagagagtggcaagaaaggaggacctaaggagatggcaaatttaaggccggaaggacggctctatcagcatgggaaacttacactgctgcataatggagaacctctctacattccagtaacccaggaaccagcacctatgacagaagatctgctagaagagcagtctgaagttttagctaaattaggtacatcggcagagggggctcaccttcgagcacgcatgcagagtgcctgtctgctctcagatatggagtcttttaaggcagctaatccaggttgctccctggaagattttgtgaggtggtattcaccccgggattatattgaagaggaggtgattgatgaaaagggcaatgtggtgctgaaaggagaactgagtgcccggatgaagattccaagcaatatgtgggtagaagcctgggaaacagctaagccaattcctgctagaaggcaaaggagactcttcgatgatacacgggaagcagaaaaggtgctgcactatctggcaatccagaaacctgcagaccttgctcggcacctgttaccttgtgtgattcatgcagctgtactcaaggtaaaggaagaagaaagtctcgaaaacatttcttcagttaagaagatcataaagcagataatatcccattccagtaaagttttgcacttccccaatccagaagacaagaaattggaagaaatcattcaccagattactaatgtggaagctctcattgccagagctcggtcactaaaagccaagtttggaactgagaaatgtgaacaggaggaggaaaaggaagatcttgaaaggtttgtgagttgcctgctggagcagcctgaagtgttagtcaccggtgcaggaagaggacatgctggcaggatcattcacaagctgtttgtgaatgcccagagggctgcagctatgactccaccagaggaggaattgaagagaatgggctccccagaggaaagaaggcagaactccgtgtcagacttcccaccccctgctggccgggaattcattttgcgcaccactgtgccgcgccctgctccctactccaaagctctgcctcagcggatgtacagtgttctcaccaaagaggactttagacttgcaggtgccttttcatcagatacttccttcttctgattcttctagcattactcgttggtggcttcagagacagtgctgcctcctcctgagggagggaaggtaccagggagaacctgggaggtcctggagagggccctgtccagttgggtgatcaggaatcaaaccagcatcggaaagacttcccagcaccaagcttgagctgtgtcgtttcgtggagggggcagcgaggatgggcttgagctgttgagagatttctgccctagagatggcctttgtatatgggggggtggtggggggacacaaacacatcagacactccgtcctcacactggcaggacggtgttcatcgcattctcttctgtgaccagcctctaggctagcggctgcattcgtggtctgtgcaaacacttcgtggttctatatatcagcagcaagtgtgcaaaataaaggacctgttaactcagatttctggatattttggtggtagcttctagtcccagaatctgtgtttttaaaatactacatgacattctgtctattcaatcacctggtggtcatctttcttgtactaattaactgttgatgagcattttggatattctaggagaaagcctataatttcacatagtttctctttttcatgtaactgtaacctaaatgtattacttctgataaaactatatatcaaatgtcactgcaaattagttttatatctgtcatgtgagatttgtcttacttatttttcttttggttgccatggaagttatggccctgaaaatcgtctccctccccttctcttgctgtacagcatgcgttctctttttgtggttgctggctgggtactgtatttaatgaagtagagaatagcacttgcaaaaatacagtcttggtacctagagactgtcatgcagatagtataatttggtatatgtgctaatgcattgagtagaggattattttaacacactattttgcttttgtattttagttaaaataatcgatggggatgtgtagcccccccgtgtgaggatgacatcaccacatttctagtttcatggagctcaagatgtcttgtgtctgtgtggctagatggcctctgcttggtaatcttatttttaggcctaaaattcccacttaaatccaaagtaaaaatggttatactgaagcataaaccttgcctgtgtaattttaaaaaattaatagagctgtgcaaaccctgttatttttgtaaaaaaaaaaaaaatacatatctat

SEQ ID NO: 368380 - DNA, 1598 bp, Homo sapiens
gatcgatgaaagggcacctgcaagtctaaagtctctttggtgagaacactgtacatccgctgaggcagagctttgtagtcaccggtgcaggaagaggacatgctggcaggatcattcacaagctgtttgtgaatgcccagagggctgcagctatgactccaccagaggaggaattgaagagaatgggctccccagaggaaagaaggcagaactccgtgtcagacttcccaccccctgctggccgggaattcattttgcgcaccactgtgccgcgccctgctccctactccaaagctctgcctcagcggatgtacagtgttctcaccaaagaggactttagacttgcaggtgccttttcatcagatacttccttcttctgattcttctagcattactcgttggtggcttcagagacagtgctgcctcctcctgagggagggaaggtaccagggagaacctgggaggtcctggagagggccctgtccagttgggtgatcaggaatcaaaccagcatcggaaagacttcccagcaccaagcttgagctgtgtcgtttcgtggagggggcagcgaggatgggcttgagctgttgagagatttctgccctagagatggcctttgtatatgggggggtggtggggggacacaaacacatcagacactccgtcctcacactggcaggacggtgttcatcgcattctcttctgtgaccagcctctaggctagcggctgcattcgtggtctgtgcaaacacttcgtggttctatatatcagcagcaagtgtgcaaaataaaggacctgttaactcagatttctggatattttggtggtagcttctagtcccagaatctgtgtttttaaaatactacatgacattctgtctattcaatcacctggtggtcatctttcttgtactaattaactgttgatgagcattttggatattctaggagaaagcctataatttcacatagtttctctttttcatgtaactgtaacctaaatgtattacttctgataaaactatatatcaaatgtcactgcaaattagttttatatctgtcatgtgagatttgtcttacttatttttcttttggttgccatggaagttatggccctgaaaatcgtctccctccccttctcttgctgtacagcatgcgttctctttttgtggttgctggctgggtactgtatttaatgaagtagagaatagcacttgcaaaaatacagtcttggtacctagagactgtcatgcagatagtataatttggtatatgtgctaatgcattgagtagaggattattttaacacactattttgcttttgtattttagttaaaataatcgatggggatgtgtagcccccccgtgtgaggatgacatcaccacatttctagtttcatggagctcaagatgtcttgtgtctgtgtggctagatggcctctgcttggtaatcttatttttaggcctaaaattcccacttaaatccaaagtaaaaatggttatactgaagcataaaccttgcctgtgtaattttaaaaaattaatagagctgtgcaaaccctgttatttttgtaaaaaaaaaaaaaatacatatctat

SEQ ID NO: 368381 - DNA, 3499 bp, Homo sapiens
agcgccaggcccggcgctcctcaagatggctgccgacagtgagcccgaatccgaggtatttgagatcacggacttcaccactgcctcggaatgggaaaggtttatttccaaagttgaagaagtcttgaatgactggaaactgattggaaactctttgggaaagccactcgaaaagggtatatttacttctggcacatgggaagagaaatcagatgaaatttcctttgctgacttcaagttctcagtcactcatcattatcttgtacaagagtccactgataaagaaggaaaggatgagttattagaggatgttgttccacaatctatgcaagatttgctgggtatgaataatgactttcctccaagagcacattgcctggtaagatggtatgggctacgtgagttcgtggtgattgcccctgctgcacacagtgacgctgttctcagcgaatctaagtgcaaccttcttctgagttctgtttctattgccttgggaaacactggctgtcaggtgccactctttgtgcaaattcaccacaaatggcgaagaatgtatgtaggagaatgtcaaggtcctggtgtacgaactgatttcgaaatggttcatcttagaaaagtgccaaatcagtacactcacttatcaggtctgctggatatcttcaaatcaaagattggatgtcctttaactccattgcctccagttagtattgctattcgatttacctatgtacttcaagattggcagcagtatttttggcctcagcaacctccagacatagatgcccttgtaggaggagaagttggaggcttggagtttggcaagttaccatttggtgcctgcgaagatcctattagtgaactccatttagctactacatggcctcatctgaccgaagggatcattgtggataatgatgtttattctgatttggatcctattcaagctccacattggtctgttagagttcgaaaagctgagaatcctcagtgtttgctaggtgattttgtcactgaattttttaaaatttgccgtcgaaaggagtcaactgatgagattcttggacgatctgcatttgaggaagaaggcaaagaaactgctgatataactcatgctttgtcaaaattgacagagccggcatcagttccaattcataaattatcagtttcaaatatggtacacactgcaaagaagaaaatccgaaaacacagaggtgtagaggagtcaccgctaaataatgatgttcttaatactattctcctgttcttattccctgatgctgtttctgagaaaccattagatggaactacttcaacagataataataatcctccatcagagagtgaagactataatctctacaatcagttcaagtctgcaccatctgacagtttaacatacaaactggctttgtgtctctgtatgatcaatttttaccatggagggttgaaaggagtggcacacctctggcaggaatttgttcttgaaatgcgtttccgatgggaaaacaactttctgattccaggattagcaagtggacccccagatctgaggtgttgtttactgcatcagaaactacagatgttaaattgttgtattgaaagaaagaaggcacgtgatgaggggaaaaagacaagtgcttcagatgtcactaatatatatccaggggatgctggaaaagcaggagaccagttggtgccagataatctaaaagaaacagataaggaaaagggagaggtaggaaaatcttgggattcctggagtgacagcgaagaagaattttttgaatgcctaagtgatactgaagaacttaaaggaaatggacaagagagtggcaagaaaggaggacctaaggagatggcaaatttaaggccggaaggacggctctatcagcatgggaaacttacactgctgcataatggagaacctctctacattccagtaacccaggaaccagcacctatgacagaagatctgctagaagagcagtctgaagttttagctaaattaggtacatcggcagagggggctcaccttcgagcacgcatgcagagtgcctgtctgctctcagatatggagtcttttaaggcagctaatccaggttgctccctggaagattttgtgaggtggtattcaccccgggattatattgaagaggaggtgattgatgaaaagggcaatgtggtgctgaaaggagaactgagtgcccggatgaagattccaagcaatatgtgggtagaagcctgggaaacagctaagccaattcctgctagaaggcaaaggagactcttcgatgatacacgggaagcagaaaaggtgctgcactatctggcaatccagaaacctgcagaccttgctcggcacctgttaccttgtgtgattcatgcagctgtactcaaggtaaaggaagaagaaagtctcgaaaacatttcttcagttaagaagatcataaagcagataatatcccattccagtaaagttttgcacttccccaatccagaagacaagaaattggaagaaatcattcaccagattactaatgtggaagctctcattgccagagctcggtcactaaaagccaagtttggaactgagaaatgtgaacaggaggaggaaaaggaagatcttgaaaggtttgtgagttgcctgctggagcagcctgaagtgttagtcaccggtgcaggaagaggacatgctggcaggatcattcacaagctgtttgtgaatgcccagagggctgcagctatgactccaccagaggaggaattgaagagaatgggctccccagaggaaagaaggcagaactccgtgtcagacttcccaccccctgctggccgggaattcattttgcgcaccactgtgccgcgccctgctccctactccaaagctctgcctcagcggatgtacagtgttctcaccaaagaggactttagacttgcaggttaaaataatcgatggggatgtgtagcccccccgtgtgaggatgacatcaccacatttctagtttcatggagctcaagatgtcttgtgtctgtgtggctagatggcctctgcttggtaatcttatttttaggcctaaaattcccacttaaatccaaagtaaaaatggttatactgaagcataaaccttgcctgtgtaattttaaaaaattaatagagctgtgcaaaccctgttatttttgtaaaaaaaaaaaaaatacatatctattttttaccaaaaaaaaaaaacaaaaacaaaaaaaacaaaaaagaaaagatagacaagggaaacacaccgaagagaataagaggagagcagcgagaacaaagaagaaaacacgaaaaaggaagacgagagaacaacgaaacaggagtcaatagggagacagaacagagagacagagcaaaggagcggagcaaagcgatagacgaagcgaggcaacagagaggggaacagagcgagcggatagagagagagcggggcgaacgagggcacgagcgggcgaagacaggcgaaatgac

SEQ ID NO: 368382 - DNA, 1059 bp, Homo sapiens
agcgccaggcccggcgctcctcaagatggctgccgacagtgagcccgaatccgaggtatttgagatcacggacttcaccactgcctcggaatgggaaaggtttatttccaaagttgaagaagtcttgaatgactggaaactgattggaaactctttgggaaagccactcgaaaagggtatatttacttctggcacatgggaagagaaatcagatgaaatttcctttgctgacttcaagttctcagtcactcatcattatcttgtacaagagtccactgataaagaaggaaaggatgagttattagaggatgttgttccacaatctatgcaagatttgctgggtatgaataatgactttcctccaagagcacattgcctggtaagatggtatgggctacgtgagttcgtggtgattgcccctgctgcacacagtgacgctgttctcagcgaatctaagtgcaaccttcttctgagttctgtttctattgccttgggaaacactggctgtcaggtgccactctttgtgcaaattcaccacaaatggcgaagaatgtatgtaggagaatgtcaaggtcctggtgtacgaactgatttcgaaatggttcatcttagaaaagtgccaaatcagtacactcacttatcaggtctgctggatatcttcaaatcaaagattggatgtcctttaactccattgcctccagttagtattgctattcgatttacctatgtacttcaagattggcagcagtatttttggcctcagcaacctccagacatagatgcccttgtaggaggagaagttggaggcttggagtttggcaagttaccatttggtgcctgcgaagatcctattagtgaactccatttagctactacatggcctcatctgaccgaagggatcattgtggataatgatgtttattctgatttggatcctattcaagctccacattggtctgttagagttcgaaaagctgagaatcctcagtgtttgctaggtgattttgtcactgaattttttaaaattgccgtctaggagcgtaatcggtaccgagctca

SEQ ID NO: 368383 - DNA, 1006 bp, Homo sapiens
gcggccgcagagactgggtcgccttggattccctctgcctccgaggaccccaaaagacacccccaaccccaggccagccggccctgctctggcgcgtccaaaatactacctagcacaggcctctgctcgaggcacccccaaactacctatgtatccagccccagagggcctccattcccaggaagtccctatgtatcccaacactggcagacacccagcaccaccctcccagacccgcaagaaagtgaatctcactactacctactcccctaaaactacctattttgtgctggctggcttgcctgctacctagtgccgactgctcccaggcaagtcccctgctgcttacagcccgcagcttttggggtccctgaggctgccctgagaatgtgctgaggtccaggatcagggtattggcatctatttaaatcgaaaaataatatatttattccaaaaagcatcctaagtgcttgcaccctagaatcaatccctccttctctggcttggcacccacagctcaggcccatcaacccccacttctggaggggaatgttcctgagctggctgcagatctgtgggttagcttctgcttagcaggactgtggagatgcttccagcttcgctgtcctttcctctggctcctgtatcttactgttcagctgtgttaaatatggacgcccatcgatgcgcttcctataatagcagatactgtatatttgaacaagatttttttttatcatttctatagtcttggagttcatttgtaaggcagtgtcttgacttggaaaggatgtgttaatggggtgactttgtagcatggtatgttgtcttgagttaactgtagtgggtggggaggtccaatgccctccgcaatgcccttcatctcctgtgttgtcctgtaccctgctcagctccatcctggggttcagggaaggcacacttcccagcccagctgtgttttatgtaaccgaaaataaagatgcgtggtgacaaagaaaaatgtgga

SEQ ID NO: 368384 - DNA, 254 bp, Homo sapiens
actattcaataggaagagcattgtcttttcaacaaatggcacccagacaactggatagataaccacatgcaaaataaagaagtttgtcccttacctcacaccatatacaaaaattgattcaaaatggatcaagatctaactaacagcctgaactataaaacccttacaaggaaacatagaggcaaatcttcatgactttggatttggcaatggattcttaggtataatgccagaagcacaagcaacaactgaaa

SEQ ID NO: 368385 - DNA, 1238 bp, Homo sapiens
ggaccggaagtggcgtccggcgcaagcgctggcagccgcacagcccattgggaggccgaggggcgcggccgtggggtggggagtccccggcaccccaggtccgcgccatgggccgcaggagggcagcgcgcgggccgggggcggaaggcggccgccctcggcacctcccgacgcgctccctggaggccttcgccgaggaggtcggcgccgcgctgcaggcttccgtggagccaggggcggctgacggcgagggcggcccgggcccggcggcgctgccctgcacgctggccatgtgggagttgggccactgcgacccccggcgctgcacgggccgcaagctggcccgcctggggctggtgcgctgcctgcgcctgggccacagattcggcggtctggtgctgagccccgtgggcaagcagtacgcgtcccccgcagacagacagctggtggcgcagtctggggtcgccgtcatcgactgctcctgggccaggctggacgagacaccgtttgggaagatgcgagggagccacttgcgcctgttgccctacctggtggccgccaaccccgtgaactatggccggccctacagactttcctgcgtggaagcgtttgctgccaccttctgcatcgtaggctttccagaccttgctgtcattttgctgcggaagtttaaatggggcaagggcttcttggacctgaaccgccagctcctggacaagtacgcggcctgcggcagcccggaggaggtgctgcaggcggagcaggagttcttggccaatgccaaggagagcccccaggaggaggagatcgatcccttcgatgtggattcagggagagagtttggaaaccccaacaggcctgtggccagcacccggctgccctcggacactgatgacagtgatgcgtctgaggacccagggcctggcgccgagcgcggaggagccagcagcagctgctgtgaagaggagcagacgcagggacggggggctgaggccagggccccggctgaggtttggaaaggaatcaagaaacggcagagagactgagggttgcagacacatatatttttgaggctgggtgacgagaaaatctagagacatgagggacataaatgggcctggcagcctcggctctttgcggctgctggcaggactgagctgtccgggttctccccacacttccagcacagctgtgctctgtgtcctgcctcggcgctctcgcaaatgaagctgcaggcc

SEQ ID NO: 368386 - DNA, 750 bp, Homo sapiens
ggaccggaagtggcgtccggcgcaagcgctggcagccgcacagcccattgggaggccgaggggcgcggccgtggggtggggagtccccggcaccccaggtccgcgccatgggccgcaggagggcagcgcgcgggccgggggcggaaggcggccgccctcggcacctcccgacgcgctccctggaggccttcgccgaggaggtcggcgccgcgctgcaggcttccgtggagccaggggcggctgacggcgagggcggcccgggcccggcggcgctgccctgcacgctggccatgtgggagttgggccactgcgacccccggcgctgcacgggccgcaagctggcccgcctggggctggtgcgctgcctgcgcctgggccacagattcggcggtctggtgctgagccccgtgggcaagcagtacgcgtcccccgcagacagacagctggtggcgcagtctggggtcgccgtcatcgactgctcctgggccaggctggacgagacaccgtttgggaagatgcgagggagccacttgcgcctgttgccctacctggtggccgccaaccccgtgaactatggccggccctacagactttcctgcgtggaagcgtttgctgccaccttctgcatcgtaggtgagtccagtggccccacagcagtgtgacccggcggcctgctgttcctgctatgctcccagcatcatgtttcctgccgacagaccccaggaggagcataagggacggacaggggaa

SEQ ID NO: 368387 - DNA, 516 bp, Homo sapiens
ggccgccctcggcacctcccgacgcgctccctggaggccttcgccgaggaggtcggcgccgcgctgcagggtgagcgaggcgtgatggggagagcgggtcagggtttgagggcctgcccgggggtcccacgctgaggccgagtgcccttctctctctcgtgcagcttccgtggagccaggggcggctgacggcgagggcggcccgggcccggcggcgctgccctgcacgctggccatgtgggagttgggccactgcgacccccggcgctgcacgggccgcaagctggcccgcctggggctggtgcgctgcctgcgcctgggccacagattcggcggtctggtgctgagccccgtgggcaagcagtacgcgtcccccgcagacaggtaggcgcgggaggcctgcccgaggtcgtcttcatttccagcgcgtggttcccttcagggatggtttagtggcacttgtatgtcgcacccacatccacacccacgtgggcagggaacgtctgtctagtttgc

SEQ ID NO: 368388 - DNA, 1115 bp, Homo sapiens
ggaccggaagtggcgtccggcgcaagcgctggcagccgcacagcccattgggaggccgaggggcgcggccgtggggtggggagtccccggcaccccaggtccgcgccatgggccgcaggagggcagcgcgcgggccgggggcggaaggcggccgccctcggcacctcccgacgcgctccctggaggccttcgccgaggaggtcggcgccgcgctgcaggcttccgtggagccaggggcggctgacggcgagggcggcccgggcccggcggcgctgccctgcacgctggccatgtgggagttgggccactgcgacccccggcgctgcacgggccgcaagctggcccgcctggggctggtgcgctgcctgcgcctgggccacagattcggcggtctggtgctgagccccttgcgcctgttgccctacctggtggccgccaaccccgtgaactatggccggccctacagactttcctgcgtggaagcgtttgctgccaccttctgcatcgtaggctttccagaccttgctgtcattttgctgcggaagtttaaatggggcaagggcttcttggacctgaaccgccagctcctggacaagtacgcggcctgcggcagcccggaggaggtgctgcaggcggagcaggagttcttggccaatgccaaggagagcccccaggaggaggagatcgatcccttcgatgtggattcagggagagagtttggaaaccccaacaggcctgtggccagcacccggctgccctcggacactgatgacagtgatgcgtctgaggacccagggcctggcgccgagcgcggaggagccagcagcagctgctgtgaagaggagcagacgcagggacggggggctgaggccagggccccggctgaggtttggaaaggaatcaagaaacggcagagagactgagggttgcagacacatatatttttgaggctgggtgacgagaaaatctagagacatgagggacataaatgggcctggcagcctcggctctttgcggctgctggcaggactgagctgtccgggttctccccacacttccagcacagctgtgctctgtgtcctgcctcggcgctctcgcaaatgaagctgcaggcc

SEQ ID NO: 368389 - DNA, 952 bp, Homo sapiens
  misc_feature (1)..(1): n is a, c, g, or t
  misc_feature (29)..(29): n is a, c, g, or t
  misc_feature (798)..(798): n is a, c, g, or t
  misc_feature (825)..(825): n is a, c, g, or t
naacttaggctaggtacgaggctgggtgntaagatggcggcgctgagggctttgtgcggcttccggggcgtcgcggcccaggtgctgcggcctggggctggagtccgattgccgattcagcccagcagaggtgttcggcagtggcagccagatgtggaatgggcacagcagtttgggggagctgttatgtacccaagcaaagaaacagcccactggaagcctccaccttggaatgatgtggaccctccaaaggacacaattgtgaagaacattaccctgaactttgggccccaacacccagcagcgcatggtgtcctgcgactagtgatggaattgagtggggagatggtgcggaagtgtgatcctcacatcgggctcctgcaccgaggcactgagaagctcattgaatacaagacctatcttcaggcccttccatactttgaccggctagactatgtgtccatgatgtgtaacgaacaggcctattctctagctgtggagaagttgctaaacatccggcctcctcctcgggcacagtggatccgagtgctgtttggagaaatcacacgtttgttgaaccacatcatggctgtgaccacacatgccctggaccttggggccatgacccctttcttctggctgtttgaagaaagggagaagatgtttgagttctacgagcgagtgtctggagcccgaatgcatgctgcttatatccggccaggaggagtgcaccagacttacctgggctttggtgcattatcagttctagactctctcttcggtgagagtggggagtgngaccacatggattgggaacggcctgcntggcgtgtacgcacaaaaacctatctggtagggggggcgcggcaggaccaggacgcgaacccctttttcacggatgagtccggcccggggaaacctgggggaagcccacacgtcaagcgggcagaca

SEQ ID NO: 368390 - DNA, 1948 bp, Homo sapiens
ttcttcaaaaggggcctccccctacaactggcttggcccctttggccctagtggctggtttccagggctgaggggactgagtgagctgcctgagaaaagagggtagggaacagaaaagccagccaggagctgtgggaggaaacgccctcagtaaagatgaccgcggtcactgttatctaaacgcaagtgaagccgagtcacaggacccggatgttgtcagttcgacggtaaacgaccctgccagcttccaagagggcggcttcactgtgcgaataggtgagaagccaagaaggaggcgcgctggagttacttccgcccggttctccttcccgcagtctgcagccggagtaagatggcggcgctgagggctttgtgcggcttccggggcgtcgcggcccaggtgctgcggcctggggctggagtccgattgccgattcagcccagcagaggtgttcggcagtggcagccagatgtggaatgggcacagcagtttgggggagctgttatgtacccaagcaaagaaacagcccactggaagcctccaccttggaatgatgtggaccctccaaaggacacaattgtgaagaacattaccctgaactttgggccccaacacccagcagcgcatggtgtcctgcgactagtgatggaattgagtggggagatggtgcggaagtgtgatcctcacatcgggctcctgcaccgaggcactgagaagctcattgaatacaagacctatcttcaggcccttccatactttgaccggctagactatgtgtccatgatgtgtaacgaacaggcctattctctagctgtggagaagttgctaaacatccggcctcctcctcgggcacagtggatccgagtgctgtttggagaaatcacacgtttgttgaaccacatcatggctgtgaccacacatgccctggaccttggggccatgacccctttcttctggctgtttgaagaaagggagaagatgtttgagttctacgagcgagtgtctggagcccgaatgcatgctgcttatatccggccaggaggagtgcaccaggacctaccccttgggcttatggatgacatttatcagttttctaagaacttctctcttcggcttgatgagttggaggagttgctgaccaacaataggatctggcgaaatcggacaattgacattggggttgtaacagcagaagaagcacttaactatggttttagtggagtgatgcttcggggctcaggcatccagtgggacctgcggaagacccagccctatgatgtttacgaccaggttgagtttgatgttcctgttggttctcgaggggactgctatgataggtacctgtgccgggtggaggagatgcgccagtccctgagaattatcgcacagtgtctaaacaagatgcctcctggggagatcaaggttgatgatgccaaagtgtctccacctaagcgagcagagatgaagacttccatggagtcactgattcatcactttaagttgtatactgagggctaccaagttcctccaggagccacatatactgccattgaggctcccaagggagagtttggggtgtacctggtgtctgatggcagcagccgcccttatcgatgcaagatcaaggctcctggttttgcccatctggctggtttggacaagatgtctaagggacacatgttggcagatgtcgttgccatcataggtacccaagatattgtatttggagaagtagatcggtgagcaggggagcagcgtttgatcccccctgcctatcagcttcttctgtggagcctgttcctcactggaaattggcctctgtgtgtgtgtgtgtgtgtgtgtgtgtgtgtgtatgttcatgtacacttggctgtcaggctttctgtgcatgtactaaaaaaggagaaattataataaattagccgtcttgcggcccctaggcctaaa

SEQ ID NO: 368391 - DNA, 2278 bp, Homo sapiens
  misc_feature (3)..(3): n is a, c, g, or t
ggnacagggccccaggagaggcagagagtgagggaaagggcctggccggcatgcacagataggatcacggtcctgggagaattcctgctcttatagtctaacctaccatggcttctcttttctcaaggctccctcatgctgccctttggccctagtggctggtttccagggctgaggggactgagtgagctgcctgagaaaagagggtagggaacagaaaagccagccaggagctgtgggaggaaacgccctcagtaaagatgaccgcggtcactgttatctaaacgcaagtgaagccgagtcacaggacccggatgttgtcagttcgacggtaaacgaccctgccagcttccaagagggcggcttcactgtgcgaataggtgagaagccaagaaggaggcgcgctggagttacttccgcccggttctccttcccgcagtctgcagccggagtaagatggcggcgctgagggctttgtgcggcttccggggcgtcgcggcccaggtgctgcggcctggggctggagtccgattgccgattcagcccagcagaggtgttcggcagtggcagccagatgtggaatgggcacagcagtttgggggagctgttatgtacccaagcaaagaaacagcccactggaagcctccaccttggaatgatgtggaccctccaaaggacacaattgtgaagaacattaccctgaactttgggccccaacacccagcagcgcatggtgtcctgcgactagtgatggaattgagtggggagatggtgcggaagtgtgatcctcacatcgggctcctgcaccgaggcactgagaagctcattgaatacaagacctatcttcaggcccttccatactttgaccggctagactatgtgtccatgatgtgtaacgaacaggcctattctctagctgtggagaagttgctaaacatccggcctcctcctcgggcacagtggatccgagtgctgtttggagaaatcacacgtttgttgaaccacatcatggctgtgaccacacatgccctggaccttggggccatgacccctttcttctggctgtttgaagaaagggagaagatgtttgagttctacgagcgagtgtctggagcccgaatgcatgctgcttatatccggccaggaggagtgcaccaggacctaccccttgggcttatggatgacatttatcagttttctaagaacttctctcttcggcttgatgagttggaggagttgctgaccaacaataggatctggcgaaatcggacaattgacattggggttgtaacagcagaagaagcacttaactatggttttagtggagtgatgcttcggggctcaggcatccagtgggacctgcggaagacccagccctatgatgtttacgaccaggttgagtttgatgttcctgttggttctcgaggggactgctatgataggtacctgtgccgggtggaggagatgcgccagtccctgagaattatcgcacagtgtctaaacaagatgcctcctggggagatcaaggttgatgatgccaaagtgtctccacctaagcgagcagagatgaagacttccatggagtcactgattcatcactttaagttgtatactgagggctaccaagttcctccaggagccacatatactgccattgaggctcccaagggagagtttggggtgtacctggtgtctgatggcagcagccgcccttatcgatgcaagatcaaggctcctggttttgcccatctggctggtttggacaagatgtctaagggacacatgttggcagatgtcgttgccatcataggtacccaagatattgtatttggagaagtagatcggtgagcaggggagcagcgtttgatcccccctgcctatcagcttcttctgtggagcctgttcctcactggaaattggcctctgtgtgtgtgtgtgtgtgtgtgtgtgtgtgtgtatgttcatgtacacttggctgtcaggctttctgtgcatgtactaaaaaaggagaaattataataaattagccgtcttgcggcccctaggcctaaaaaaaaaaaaaaaaaaaaaaaaaaaaaaaaaaaaaaccggggggaatctaattatcggggggggggacaaacaggggttaatgaagaggggacacgtgggtcaactgggtgtgttcctggagacccactttctctgctgacacacagggggtgaaaattcggaggggccccccataaaggggggcgcagatataaatcggaataaccaccggcgtaaccgcgattag

SEQ ID NO: 368392 - DNA, 2286 bp, Homo sapiens
  misc_feature (3)..(3): n is a, c, g, or t
ggnacagggccccaggagaggcagagagtgagggaaagggcctggccggcatgcacagataggatcacggtcctgggagaattcctgctcttatagtctaacctaccatggcttctcttttctcaaggctccctcatgctgccctttggccctagtggctggtttccagggctgaggggactgagtgagctgcctgagaaaagagggtagggaacagaaaagccagccaggagctgtgggaggaaacgccctcagtaaagatgaccgcggtcactgttatctaaacgcaagtgaagccgagtcacaggacccggatgttgtcagttcgacggtaaacgaccctgccagcttccaagagggcggcttcactgtgcgaataggtgagaagccaagaaggaggcgcgctggagttacttccgcccggttctccttcccgcagtctgcagccggagtaagatggcggcgctgagggctttgtgcggcttccggggcgtcgcggcccaggtgctgcggcctggggctggagtccgattgccgattcagcccagcagaggtgttcggcagtggcagccagatgtggaatgggcacagcagtttgggggagctgttatgtacccaagcaaagaaacagcccactggaagcctccaccttggaatgatgtggaccctccaaaggacacaattgtgaagaacattaccctgaactttgggccccaacacccagcagcgcatggtgtcctgcgactagtgatggaattgagtggggagatggtgcggaagtgtgatcctcacatcgggctcctgcaccgaggcactgagaagctcattgaatacaagacctatcttcaggcccttccatactttgaccggctagactatgtgtccatgatgtgtaacgaacaggcctattctctagctgtggagaagttgctaaacatccggcctcctcctcgggcacagtggatccgagtgctgtttggagaaatcacacgtttgttgaaccacatcatggctgtgaccacacatgccctggaccttggggccatgacccctttcttctggctgtttgaagaaagggagaagatgtttgagttctacgagcgagtgtctggagcccgaatgcatgctgcttatatccggccaggaggagtgcaccaggacctaccccttgggcttatggatgacatttatcagttttctaagaacttctctcttcggcttgatgagttggaggagttgctgaccaacaataggatctggcgaaatcggacaattgacattggggttgtaacagcagaagaagcacttaactatggttttagtggagtgatgcttcggggctcaggcatccagtgggacctgcggaagacccagccctatgatgtttacgaccaggttgagtttgatgttcctgttggttctcgaggggactgctatgataggtacctgtgccgggtggaggagatgcgccagtccctgagaattatcgcacagtgtctaaacaagatgcctcctggggagatcaaggttgatgatgccaaagtgtctccacctaagcgagcagagatgaagacttccatggagtcactgattcatcactttaagttgtatactgagggctaccaagttcctccaggagccacatatactgccattgaggctcccaagggagagtttggggtgtacctggtgtctgatggcagcagccgcccttatcgatgcaagatcaaggctcctggttttgcccatctggctggtttggacaagatgtctaagggacacatgttggcagatgtcgttgccatcataggtacgaggcctattgtgtagtagaggtatcctagacaaaggagttcgggacgcccactggggacagaaggagaacacttcctgttcaccataggccatggcatggactcgggtcctcaatcttttgagcacagtaatgggttctggatcttgggtaacaccactttttttgtttgttttgcctcacaacaggaagataagtaacatcacttttttcctccatcctctcacctaggtacccaagatattgtatttggagaagtagatcggtgagcaggggagcagcgtttgatcccccctgcctatcagcttcttctgtggagcctgttcctcactggaaattggcctctgtgtgtgtgtgtgtgtgtgtgtgtgtgtgtgtatgttcatgtacacttggctgtcaggctttctgtgcatgtactaaaaaaggagaaattataataaattagccgtcttgcggcccctaggcctaaa

SEQ ID NO: 368393 - DNA, 2115 bp, Homo sapiens
  misc_feature (3)..(3): n is a, c, g, or t
ggnacagggccccaggagaggcagagagtgagggaaagggcctggccggcatgcacagataggatcacggtcctgggagaattcctgctcttatagtctaacctaccatggcttctcttttctcaaggctccctcatgctgccctttggccctagtggctggtttccagggctgaggggactgagtgagctgcctgagaaaagagggtagggaacagaaaagccagccaggagctgtgggaggaaacgccctcagtaaagatgaccgcggtcactgttatctaaacgcaagtgaagccgagtcacaggacccggatgttgtcagttcgacggtaaacgaccctgccagcttccaagagggcggcttcactgtgcgaataggtgagaagccaagaaggaggcgcgctggagttacttccgcccggttctccttcccgcagtctgcagccggagtaagatggcggcgctgagggctttgtgcggcttccggggcgtcgcggcccaggtgctgcggcctggggctggagtccgattgccgattcagcccagcagaggtgttcggcagtggcagccagatgtggaatgggcacagcagtttgggggagctgttatgtacccaagcaaagaaacagcccactggaagcctccaccttggaatgatgtggaccctccaaaggacacaattgtgaagaacattaccctgaactttgggccccaacacccagcagcgcatggtgtcctgcgactagtgatggaattgagtggggagatggtgcggaagtgtgatcctcacatcgggctcctgcaccgaggcactgagaagctcattgaatacaagacctatcttcaggcccttccatactttgaccggctagactatgtgtccatgatgtgtaacgaacaggcctattctctagctgtggagaagttgctaaacatccggcctcctcctcgggcacagtggatccgagtgctgtttggagaaatcacacgtttgttgaaccacatcatggctgtgaccacacatgccctggaccttggggccatgacccctttcttctggctgtttgaagaaagggagaagatgtttgagttctacgagcgagtgtctggagcccgaatgcatgctgcttatatccggccaggaggagtgcaccaggacctaccccttgggcttatggatgacatttatcagttttctaagaacttctctcttcggcttgatgagttggaggagttgctgaccaacaataggatctggcgaaatcggacaattgacattggggttgtaacagcagaagaagcacttaactatggttttagtggagtgatgcttcggggctcaggcatccagtgggacctgcggaagacccagccctatgatgtttacgaccaggttgagtttgatgttcctgttggttctcgaggggactgctatgataggtacctgtgccgggtggaggagatgcgccagtccctgagaattatcgcacagtgtctaaacaagatgcctcctggggagatcaaggttgatgatgccaaagtgtctccacctaagcgagcagagatgaagagttttactcttattgcccagactggagtgcaatctcggctaactgcaacctccgcctcccagacttccatggagtcactgattcatcactttaagttgtatactgagggctaccaagttcctccaggagccacatatactgccattgaggctcccaagggagagtttggggtgtacctggtgtctgatggcagcagccgcccttatcgatgcaagatcaaggctcctggttttgcccatctggctggtttggacaagatgtctaagggacacatgttggcagatgtcgttgccatcataggtacccaagatattgtatttggagaagtagatcggtgagcaggggagcagcgtttgatcccccctgcctatcagcttcttctgtggagcctgttcctcactggaaattggcctctgtgtgtgtgtgtgtgtgtgtgtgtgtgtgtgtatgttcatgtacacttggctgtcaggctttctgtgcatgtactaaaaaaggagaaattataataaattagccgtcttgcggcccctaggcctaaa

SEQ ID NO: 368394 - DNA, 1555 bp, Homo sapiens
  misc_feature (3)..(3): n is a, c, g, or t
ggnacagggccccaggagaggcagagagtgagggaaagggcctggccggcatgcacagataggatcacggtcctgggagaattcctgctcttatagtctaacctaccatggcttctcttttctcaaggctccctcatgctgccctttggccctagtggctggtttccagggctgaggggactgagtgagctgcctgagaaaagagggtagggaacagaaaagccagccaggagctgtgggaggaaacgccctcagtaaagatgaccgcggtcactgttatctaaacgcaagtgaagccgagtcacaggacccggatgttgtcagttcgacggtaaacgaccctgccagcttccaagagggcggcttcactgtgcgaataggtgagaagccaagaaggaggcgcgctggagttacttccgcccggttctccttcccgcagtctgcagccggagtaagatggcggcgctgagggctttgtgcggcttccggggcgtcgcggcccaggtgctgcggcctggggctggagtccgattgccgattcagcccagcagaggtgttcggcagtggcagccagatgtggaatgggcacagcagtttgggggagctgttatgtacccaagcaaagaaacagcccactggaagcctccaccttggaatgatgtggaccctccaaaggacacaattgtgaagaacattaccctgaactttgggccccaacacccagcagcgcatggtgtcctgcgactagtgatggaattgagtggggagatggtgcggaagtgtgatcctcacatcgggctcctgcaccgaggcactgagaagctcattgaatacaagacctatcttcaggcccttccatactttgaccggctagactatgtgtccatgatgtgtaacgaacaggcctattctctagctgtggagaagttgctaaacatccggcctcctcctcgggcacagtggatccgagtgctgtttggagaaatcacacgtttgttgaaccacatcatggctgtgaccacacatgccctggaccttggggccatgacccctttcttctggctgtttgaagaaagggagaagatgtttgagttctacgagcgagtgtctggagcccgaatgcatgctgcttatatccggccaggaggagtgcaccaggacctaccccttgggcttatggatgacatttatcagttttctaagaacttctctcttcggcttgatgagttggaggagttgctgaccaacaataggatctggcgaaatcggacaattgacattggggttgtaacagcagaagaagcacttaactatggttttagtggagtgatgcttcggggctcaggcatccagtgggacctgcggaagacccagccctatgatgtttacgaccaggttgagtttgatgttcctgttggttctcgaggggactgctatgataggtacctgtgccgggtggaggagatgcgccagtccctgagaattatcgcacagtgtctaaacaagatgcctcgtccccactgttggctagtactaacggggatcctcatagagt

SEQ ID NO: 368395 - DNA, 1974 bp, Homo sapiens
  misc_feature (3)..(3): n is a, c, g, or t
ggnacagggccccaggagaggcagagagtgagggaaagggcctggccggcatgcacagataggatcacggtcctgggagaattcctgctcttatagtctaacctaccatggcttctcttttctcaaggctccctcatgctgccctttggccctagtggctggtttccagggctgaggggactgagtgagctgcctgagaaaagagggtagggaacagaaaagccagccaggagctgtgggaggaaacgccctcagtaaagatgaccgcggtcactgttatctaaacgcaagtgaagccgagtcacaggacccggatgttgtcagttcgacggtaaacgaccctgccagcttccaagagggcggcttcactgtgcgaataggtgagaagccaagaaggaggcgcgctggagttacttccgcccggttctccttcccgcagtctgcagccggagtaagatggcggcgctgagggctttgtgcggcttccggggcgtcgcggcccaggtgctgcggcctggggctggagtccgattgccgattcagcccagcagaggtgttcggcagtggcagccagatgtggaatgggcacagcagtttgggggagctgttatgtacccaagcaaagaaacagcccactggaagcctccaccttggaatgatgtggaccctccaaaggacacaattgtgaagaacattaccctgaactttgggccccaacacccagcagcgcatggtgtcctgcgactagtgatggaattgagtggggagatggtgcggaagtgtgatcctcacatcgggctcctgcaccgaggcactgagaagctcattgaatacaagacctatcttcaggcccttccatactttgaccggctagactatgtgtccatgatgtgtaacgaacaggcctattctctagctgtggagaagttgctaaacatccggcctcctcctcgggcacagtggatccgagtgctgtttggagaaatcacacgtttgttgaaccacatcatggctgtgaccacacatgccctggaccttggggccatgacccctttcttctggctgtttgaagaaagggagaagatgtttgagttctacgagcgagtgtctggagcccgaatgcatgctgcttatatccggccaggaggagtgcaccagttgctgaccaacaataggatctggcgaaatcggacaattgacattggggttgtaacagcagaagaagcacttaactatggttttagtggagtgatgcttcggggctcaggcatccagtgggacctgcggaagacccagccctatgatgtttacgaccaggttgagtttgatgttcctgttggttctcgaggggactgctatgataggtacctgtgccgggtggaggagatgcgccagtccctgagaattatcgcacagtgtctaaacaagatgcctcctggggagatcaaggttgatgatgccaaagtgtctccacctaagcgagcagagatgaagacttccatggagtcactgattcatcactttaagttgtatactgagggctaccaagttcctccaggagccacatatactgccattgaggctcccaagggagagtttggggtgtacctggtgtctgatggcagcagccgcccttatcgatgcaagatcaaggctcctggttttgcccatctggctggtttggacaagatgtctaagggacacatgttggcagatgtcgttgccatcataggtacccaagatattgtatttggagaagtagatcggtgagcaggggagcagcgtttgatcccccctgcctatcagcttcttctgtggagcctgttcctcactggaaattggcctctgtgtgtgtgtgtgtgtgtgtgtgtgtgtgtgtatgttcatgtacacttggctgtcaggctttctgtgcatgtactaaaaaaggagaaattataataaattagccgtcttgcggcccctaggcctaaa

SEQ ID NO: 368396 - DNA, 1687 bp, Homo sapiens
gagctcgggtaccccacgcgcaccgccggttcaaaaaggccttcgatacgggataatcctatttattacctcagaagtttttttcttcgcaggatttttctgagccttttaccactccagcctagcccctaccccccaactaggagggcactggcccccaacaggcatcaccccgctaaatcccctagaagtcccactcctaaacacatccgtattactcgcacagcagtttgggggagctgttatgtacccaagcaaagaaacagcccactggaagcctccaccttggaatgatgtggaccctccaaaggacacaattgtgaagaacattaccctgaactttgggccccaacacccagcagcgcatggtgtcctgcgactagtgatggaattgagtggggagatggtgcggaagtgtgatcctcacatcgggctcctgcaccgaggcactgagaagctcattgaatacaagacctatcttcaggcccttccatactttgaccggctagactatgtgtccatgatgtgtaacgaacaggcctattctctagctgtggagaagttgctaaacatccggcctcctcctcgggcacagtggatccgagtgctgtttggagaaatcacacgtttgttgaaccacatcatggctgtgaccacacatgccctggaccttggggccatgacccctttcttctggctgtttgaagaaagggagaagatgtttgagttctacgagcgagtgtctggagcccgaatgcatgctgcttatatccggccaggaggagtgcaccaggacctaccccttgggcttatggatgacatttatcagttttctaagaacttctctcttcggcttgatgagttggaggagttgctgaccaacaataggatctggcgaaatcggacaattgacattggggttgtaacagcagaagaagcacttaactatggttttagtggagtgatgcttcggggctcaggcatccagtgggacctgcggaagacccagccctatgatgtttacgaccaggttgagtttgatgttcctgttggttctcgaggggactgctatgataggtacctgtgccgggtggaggagatgcgccagtccctgagaattatcgcacagtgtctaaacaagatgcctcctggggagatcaaggttgatgatgccaaagtgtctccacctaagcgagcagagatgaagacttccatggagtcactgattcatcactttaagttgtatactgagggctaccaagttcctccaggagccacatatactgccattgaggctcccaagggagagtttggggtgtacctggtgtctgatggcagcagccgcccttatcgatgcaagatcaaggctcctggttttgcccatctggctggtttggacaagatgtctaagggacacatgttggcagatgtcgttgccatcataggtacccaagatattgtatttggagaagtagatcggtgagcaggggagcagcgtttgatcccccctgcctatcagcttcttctgtggagcctgttcctcactggaaattggcctctgtgtgtgtgtgtgtgtgtgtgtgtgtgtgtgtatgttcatgtacacttggctgtcaggctttctgtgcatgtactaaaaaaggagaaattataataaattagccgtcttgcggcccctaggcctaaa

SEQ ID NO: 368397 - DNA, 1522 bp, Homo sapiens
  misc_feature (1)..(1): n is a, c, g, or t
  misc_feature (29)..(29): n is a, c, g, or t
naacttaggctaggtacgaggctgggtgntaagatggcggcgctgagggctttgtgcggcttccggggcgtcgcggcccaggtgctgcggcctggggctggagtccgattgccgattcagcccagcagatgtggaccctccaaaggacacaattgtgaagaacattaccctgaactttgggccccaacacccagcagcgcatggtgtcctgcgactagtgatggaattgagtggggagatggtgcggaagtgtgatcctcacatcgggctcctgcaccgaggcactgagaagctcattgaatacaagacctatcttcaggcccttccatactttgaccggctagactatgtgtccatgatgtgtaacgaacaggcctattctctagctgtggagaagttgctaaacatccggcctcctcctcgggcacagtggatccgagtgctgtttggagaaatcacacgtttgttgaaccacatcatggctgtgaccacacatgccctggaccttggggccatgacccctttcttctggctgtttgaagaaagggagaagatgtttgagttctacgagcgagtgtctggagcccgaatgcatgctgcttatatccggccaggaggagtgcaccaggacctaccccttgggcttatggatgacatttatcagttttctaagaacttctctcttcggcttgatgagttggaggagttgctgaccaacaataggatctggcgaaatcggacaattgacattggggttgtaacagcagaagaagcacttaactatggttttagtggagtgatgcttcggggctcaggcatccagtgggacctgcggaagacccagccctatgatgtttacgaccaggttgagtttgatgttcctgttggttctcgaggggactgctatgataggtacctgtgccgggtggaggagatgcgccagtccctgagaattatcgcacagtgtctaaacaagatgcctcctggggagatcaaggttgatgatgccaaagtgtctccacctaagcgagcagagatgaagacttccatggagtcactgattcatcactttaagttgtatactgagggctaccaagttcctccaggagccacatatactgccattgaggctcccaagggagagtttggggtgtacctggtgtctgatggcagcagccgcccttatcgatgcaagatcaaggctcctggttttgcccatctggctggtttggacaagatgtctaagggacacatgttggcagatgtcgttgccatcataggtacccaagatattgtatttggagaagtagatcggtgagcaggggagcagcgtttgatcccccctgcctatcagcttcttctgtggagcctgttcctcactggaaattggcctctgtgtgtgtgtgtgtgtgtgtgtgtgtgtgtgtatgttcatgtacacttggctgtcaggctttctgtgcatgtactaaaaaaggagaaattataataaattagccgtcttgcggcccctaggcctaaa

SEQ ID NO: 368398 - DNA, 1479 bp, Homo sapiens
gctggaagcctccaccttggaatgatgtgggctgtttctttgcttgggtacataacagctcactggaagcctccaccttggaatgatgtggaccctccaaaggacacaattgtgaagaacattaccctgaactttgggccccaacacccagcagcgcatggtgtcctgcgactagtgatggaattgagtggggagatggtgcggaagtgtgatcctcacatcgggctcctgcaccgaggcactgagaagctcattgaatacaagacctatcttcaggcccttccatactttgaccggctagactatgtgtccatgatgtgtaacgaacaggcctattctctagctgtggagaagttgctaaacatccggcctcctcctcgggcacagtggatccgagtgctgtttggagaaatcacacgtttgttgaaccacatcatggctgtgaccacacatgccctggaccttggggccatgacccctttcttctggctgtttgaagaaagggagaagatgtttgagttctacgagcgagtgtctggagcccgaatgcatgctgcttatatccggccaggaggagtgcaccaggacctaccccttgggcttatggatgacatttatcagttttctaagaacttctctcttcggcttgatgagttggaggagttgctgaccaacaataggatctggcgaaatcggacaattgacattggggttgtaacagcagaagaagcacttaactatggttttagtggagtgatgcttcggggctcaggcatccagtgggacctgcggaagacccagccctatgatgtttacgaccaggttgagtttgatgttcctgttggttctcgaggggactgctatgataggtacctgtgccgggtggaggagatgcgccagtccctgagaattatcgcacagtgtctaaacaagatgcctcctggggagatcaaggttgatgatgccaaagtgtctccacctaagcgagcagagatgaagacttccatggagtcactgattcatcactttaagttgtatactgagggctaccaagttcctccaggagccacatatactgccattgaggctcccaagggagagtttggggtgtacctggtgtctgatggcagcagccgcccttatcgatgcaagatcaaggctcctggttttgcccatctggctggtttggacaagatgtctaagggacacatgttggcagatgtcgttgccatcataggtacccaagatattgtatttggagaagtagatcggtgagcaggggagcagcgtttgatcccccctgcctatcagcttcttctgtggagcctgttcctcactggaaattggcctctgtgtgtgtgtgtgtgtgtgtgtgtgtgtgtgtatgttcatgtacacttggctgtcaggctttctgtgcatgtactaaaaaaggagaaattataataaattagccgtcttgcggcccctaggcctaaa

SEQ ID NO: 368399 - DNA, 1895 bp, Homo sapiens
  misc_feature (3)..(3): n is a, c, g, or t
ggnacagggccccaggagaggcagagagtgagggaaagggcctggccggcatgcacagataggatcacggtcctgggagaattcctgctcttatagtctaacctaccatggcttctcttttctcaaggctccctcatgctgccctttggccctagtggctggtttccagggctgaggggactgagtgagctgcctgagaaaagagggtagggaacagaaaagccagccaggagctgtgggaggaaacgccctcagtaaagatgaccgcggtcactgttatctaaacgcaagtgaagccgagtcacaggacccggatgttgtcagttcgacggtaaacgaccctgccagcttccaagagggcggcttcactgtgcgaataggtgagaagccaagaaggaggcgcgctggagttacttccgcccggttctccttcccgcagtctgcagccggagtaagatggcggcgctgagggctttgtgcggcttccggggcgtcgcggcccaggtgctgcggcctggggctggagtccgattgccgattcagcccagcagaggtgttcggcagtggcagccagatgtggaatgggcacagcagtttgggggagctgttatgtacccaagcaaagaaacagcccactggaagcctccaccttggaatgatgtggaccctccaaaggacacaattgtgaagaacattaccctgaactttgggccccaacacccagcagcgcatggtgtcctgcgactagtgatggaattgagtggggagatggtgcggaagtgtgatcctcacatcgggctcctgcaccgaggcactgagaagctcattgaatacaagacctatcttcaggcccttccatactttgaccggctagactatgtgtccatgatgtgtaacgaacaggcctattctctagctgtggagaaatgtttgagttctacgagcgagtgtctggagcccgaatgcatgctgcttatatccggccaggaggagtgcaccaggacctaccccttgggcttatggatgacatttatcagttttctaagaacttctctcttcggcttgatgagttggaggagttgctgaccaacaataggatctggcgaaatcggacaattgacattggggttgtaacagcagaagaagcacttaactatggttttagtggagtgatgcttcggggctcaggcatccagtgggacctgcggaagacccagccctatgatgtttacgaccaggttgagtttgatgttcctgttggttctcgaggggactgctatgataggtacctgtgccgggtggaggagatgcgccagtccctgagaattatcgcacagtgtctaaacaagatgcctcctggggagatcaaggttgatgatgccaaagtgtctccacctaagcgagcagagatgaagacttccatggagtcactgattcatcactttaagttgtatactgagggctaccaagttcctccaggagccacatatactgccattgaggctcccaagggagagtttggggtgtacctggtgtctgatggcagcagccgcccttatcgatgcaagatcaaggctcctggttttgcccatctggctggtttggacaagatgtctaagggacacatgttggcagatgtcgttgccatcataggtacccaagatattgtatttggagaagtagatcggtgagcaggggagcagcgtttgatcccccctgcctatcagcttcttctgtggagcctgttcctcactggaaattggcctctgtgtgtgtgtgtgtgtgtgtgtgtgtgtgtgtatgttcatgtacacttggctgtcaggctttctgtgcatgtactaaaaaaggagaaattataataaattagccgtcttgcggcccctaggcctaaa

SEQ ID NO: 368400 - DNA, 1218 bp, Homo sapiens
  misc_feature (3)..(3): n is a, c, g, or t
ggnacagggccccaggagaggcagagagtgagggaaagggcctggccggcatgcacagataggatcacggtcctgggagaattcctgctcttatagtctaacctaccatggcttctcttttctcaaggctccctcatgctgccctttggccctagtggctggtttccagggctgaggggactgagtgagctgcctgagaaaagagggtagggaacagaaaagccagccaggagctgtgggaggaaacgccctcagtaaagatgaccgcggtcactgttatctaaacgcaagtgaagccgagtcacaggacccggatgttgtcagttcgacggtaaacgaccctgccagcttccaagagggcggcttcactgtgcgaataggtgagaagccaagaaggaggcgcgctggagttacttccgcccggttctccttcccgcagtctgcagccggagtaagatggcggcgctgagggctttgtgcggcttccggggcgtcgcggcccaggtgctgcggcctggggctggagtccgattgccgattcagcccagcagaggtgttcggcagtggcagccagatgtggaatgggcacagcagtttgggggagctgttatgtacccaagcaaagaaacagcccactggaagcctccaccttggaatgatgtggaccctccaaaggacacaattgtgaagaacattaccctgaactttgggccccaacacccagcagcgcatggtgtcctgcgactagtgatggaattgagtggggagatggtgcggaagtgtgatcctcacatcgggctcctgcaccgaggcactgagaagctcattgaatacaagacctatcttcaggcccttccatactttgaccggctagactatgtgtccatgatgtgtaacgaacaggcctattctctagctgtggagaagttgctaaacatccggcctcctcctcgggcacagtggatccgagtgctgtttggagaaatcacacgtttgttgaaccacatcatggctgtgaccacacatgccctggaccttggggccatgacccctttcttctggctgtttgaagaaagggagaagaggtaagagtgggaggaaaggataggaatagggaaggaagtgcaggaagtagagaaggtataaaggagacaggagattaaaagaagagagagaacatgggagaacatttagagggggaaggtatgtttaacttgg

SEQ ID NO: 368401 - DNA, 1581 bp, Homo sapiens
  misc_feature (3)..(3): n is a, c, g, or t
ggnacagggccccaggagaggcagagagtgagggaaagggcctggccggcatgcacagataggatcacggtcctgggagaattcctgctcttatagtctaacctaccatggcttctcttttctcaaggctccctcatgctgccctttggccctagtggctggtttccagggctgaggggactgagtgagctgcctgagaaaagagggtagggaacagaaaagccagccaggagctgtgggaggaaacgccctcagtaaagatgaccgcggtcactgttatctaaacgcaagtgaagccgagtcacaggacccggatgttgtcagttcgacggtaaacgaccctgccagcttccaagagggcggcttcactgtgcgaataggtgagaagccaagaaggaggcgcgctggagttacttccgcccggttctccttcccgcagtctgcagccggagtaagatggcggcgctgagggctttgtgcggcttccggggcgtcgcggcccaggtgctgcggcctggggctggagtccgattgccgattcagcccagcagaggtgttcggcagtggcagccagatgtggaatgggcacagcagtttgggggagctgttatgtacccaagcaaagaaacagcccactggaagcctccaccttggaatgatgtggaccctccaaaggacacaattgtgaagaacattaccctgaactttgggccccaacacccagcagcgcatggtgtcctgcgactagtgatggaattgagtggggagatggtgcggaagtgtgatcctcacatcgggctcctgcaccgaggcactgagaagctcattgaatacaagacctatcttcaggcccttccatactttgaccggctagactatgtgtccatgatgtgtaacgaacaggcctattctctagctgtggagaagttgctaaacatccggcctcctcctcgggcacagtggatccgagatcatggctgtgaccacacatgccctggaccttggggccatgacccctttcttctggctgtttgaagaaagggagaagatgtttgagttctacgagcgagtgtctggagcccgaatgcatgctgcttatatccggccaggaggagtgcaccaggacctaccccttgggcttatggatgacatttatcagttttctaagaacttctctcttcggcttgatgagttggaggagttgctgaccaacaataggatctggatggcagcagccgcccttatcgatgcaagatcaaggctcctggttttgcccatctggctggtttggacaagatgtctaagggacacatgttggcagatgtcgttgccatcataggtacccaagatattgtatttggagaagtagatcggtgagcaggggagcagcgtttgatcccccctgcctatcagcttcttctgtggagcctgttcctcactggaaattggcctctgtgtgtgtgtgtgtgtgtgtgtgtgtgtgtgtatgttcatgtacacttggctgtcaggctttctgtgcatgtactaaaaaaggagaaattataataaattagccgtcttgcggcccctaggcctaaa

SEQ ID NO: 368402 - DNA, 395 bp, Homo sapiens
ttcctccaggagccacatatactgccattgaggctcccaaggtaaggagaggaggggaaggaaaagaccatatgtagagtaggtagctaaagatagatgtttaacaaatagctcattcatcaatgagagagaaaacagaatgaatagaggttttgttggcagagaaaaatactcttcatgttaatacagacacccaaccttcttccttgaacagggagagtttggggtgtacctggtgtctgatggcagcagccgcccttatcgatgcaagatcaaggctcctggttttgcccatctggtaagaatcaatcccagtaactataactccaatgaattaaacctgaccttggttgaggtttttatgaactcttctttctcctcccaccttgcaagtc

SEQ ID NO: 368403 - DNA, 383 bp, Homo sapiens
ccggcttccccaaatgtccagcccaggcctattttccctgtggccactggagggcagtgctggatgatggaaactccaaacctgtatcgctgggggagggggtgctgagagggctctccttagtgaaggctatgccacattcagtagcacttccgtttggcttctaggacctaccccttgggcttatggatgacatttatcagttttctaagaacttctctcttcggcttgatgagttggaggaggtaagctaggagtcaatgggaaaaatctctcccccacaagaagggctagagaaatacagagatatttgaagagtgtgaggaagagtattaacacaccagttttcttgatcaatagttgctgaccaacaataggatctg

SEQ ID NO: 368404 - DNA, 96 bp, Homo sapiens
ctgttcttctcttgctctgtctcatcttcttgaggtacctgtgccgggtggaggagatgcgccagtccctgagaattatcgcacagtgtctaaaca

SEQ ID NO: 368405 - DNA, 336 bp, Homo sapiens
ccataggccatggcatggactcgggtcctcaatcttttgagcacagtaatgggttctggatcttgggtaacaccactttttttgtttgttttgcctcacaacaggaagataagtaacatcacttttttcctccatcctctcacctaggtacccaagatattgtatttggagaagtagatcggtgagcaggggagcagcgtttgatcccccctgcctatcagcttcttctgtggagcctgttcctcactggaaattggcctctgtgtgtgtgtgtgtgtgtgtgtgtgtgtgtgtatgttcatgtacacttggctgtcaggctttctgtgcatgtac

SEQ ID NO: 368406 - DNA, 2052 bp, Homo sapiens
  misc_feature (3)..(3): n is a, c, g, or t
ggnacagggccccaggagaggcagagagtgagggaaagggcctggccggcatgcacagataggatcacggtcctgggagaattcctgctcttatagtctaacctaccatggcttctcttttctcaaggctccctcatgctgccctttggccctagtggctggtttccagggctgaggggactgagtgagctgcctgagaaaagagggtagggaacagaaaagccagccaggagctgtgggaggaaacgccctcagtaaagatgaccgcggtcactgttatctaaacgcaagtgaagccgagtcacaggacccggatgttgtcagttcgacggtaaacgaccctgccagcttccaagagggcggcttcactgtgcgaataggtgagaagccaagaaggaggcgcgctggagttacttccgcccggttctccttcccgcagtctgcagccggagtaagatggcggcgctgagggctttgtgcggcttccggggcgtcgcggcccaggtgctgcggcctggggctggagtccgattgccgattcagcccagcagaggtgttcggcagtggcagccagatgtggaatgggcacagcagtttgggggagctgttatgtacccaagcaaagaaacagcccactggaagcctccaccttggaatgatgtggaccctccaaaggacacaattgtgaagaacattaccctgaactttgggccccaacacccagcagcgcatggtgtcctgcgactagtgatggaattgagtggggagatggtgcggaagtgtgatcctcacatcgggctcctgcaccgaggcactgagaagctcattgaatacaagacctatcttcaggcccttccatactttgaccggctagactatgtgtccatgatgtgtaacgaacaggcctattctctagctgtggagaagttgctaaacatccggcctcctcctcgggcacagtggatccgagtgctgtttggagaaatcacacgtttgttgaaccacatcatggctgtgaccacacatgccctggaccttggggccatgacccctttcttctggctgtttgaagaaagggagaagatgtttgagttctacgagcgagtgtctggagcccgaatgcatgctgcttatatccggccaggaggagtgcaccaggacctaccccttgggcttatggatgacatttatcagttttctaagaacttctctcttcggcttgatgagttggaggagttgctgaccaacaataggatctggcgaaatcggacaattgacattggggttgtaacagcagaagaagcacttaactatggttttagtggagtgatgcttcggggctcaggcatccagtgggacctgcggaagacccagccctatgatgtttacgaccaggttgagtttgatgttcctgttggttctcgaggggactgctatgataggtacctgtgccgggtggaggagatgcgccagtccctgagaattatcgcacagtgtctaaacaagatgcctcctggggagatcaaggttgatgatgccaaagtgtctccacctaagcgagcagagatgaagacttccatggagtcactgattcatcactttaagttgtatactgagggctaccaagttcctccaggagccacatatactgccattgaggctcccaagggagagtttggggtgtacctggtgtctgatggcagcagccgcccttatcgatgcaagatcaaggctcctggttttgcccatctggctggtttggacaagatgtctaagggacacatgttggcagatgtcgttgccatcataggtacccaagatattgtatttggagaagtagatcggtgagcaggggagcagcgtttgatcccccctgcctatcagcttcttctgtggagcctgttcctcactggaaattggcctctgtgtgtgtgtgtgtgtgtgtgtgtgtgtgtgtatgttcatgtacacttggctgtcaggctttctgtgcatgtactaaaaaaggagaaattataataaattagccgtcttgcggcccctaggcctaaa

SEQ ID NO: 368407 - DNA, 1936 bp, Homo sapiens
ggaagcgccgcgcgtttccaagatacgcaggcgggctcggcgagagagcacgaagtatctgccccacgcaggaacggcaattttcccttgctcgctcctagaaaagccagccaggagctgtgggaggaaacgccctcagtaaagatgaccgcggtcactgttatctaaacgcaagtgaagccgagtcacaggacccggatgttgtcagttcgacggtaaacgaccctgccagcttccaagagggcggcttcactgtgcgaataggtgagaagccaagaaggaggcgcgctggagttacttccgcccggttctccttcccgcagtctgcagccggagtaagatggcggcgctgagggctttgtgcggcttccggggcgtcgcggcccaggtgctgcggcctggggctggagtccgattgccgattcagcccagcagaggtgttcggcagtggcagccagatgtggaatgggcacagcagtttgggggagctgttatgtacccaagcaaagaaacagcccactggaagcctccaccttggaatgatgtggaccctccaaaggacacaattgtgaagaacattaccctgaactttgggccccaacacccagcagcgcatggtgtcctgcgactagtgatggaattgagtggggagatggtgcggaagtgtgatcctcacatcgggctcctgcaccgaggcactgagaagctcattgaatacaagacctatcttcaggcccttccatactttgaccggctagactatgtgtccatgatgtgtaacgaacaggcctattctctagctgtggagaagttgctaaacatccggcctcctcctcgggcacagtggatccgagtgctgtttggagaaatcacacgtttgttgaaccacatcatggctgtgaccacacatgccctggaccttggggccatgacccctttcttctggctgtttgaagaaagggagaagatgtttgagttctacgagcgagtgtctggagcccgaatgcatgctgcttatatccggccaggaggagtgcaccaggacctaccccttgggcttatggatgacatttatcagttttctaagaacttctctcttcggcttgatgagttggaggagttgctgaccaacaataggatctggcgaaatcggacaattgacattggggttgtaacagcagaagaagcacttaactatggttttagtggagtgatgcttcggggctcaggcatccagtgggacctgcggaagacccagccctatgatgtttacgaccaggttgagtttgatgttcctgttggttctcgaggggactgctatgataggtacctgtgccgggtggaggagatgcgccagtccctgagaattatcgcacagtgtctaaacaagatgcctcctggggagatcaaggttgatgatgccaaagtgtctccacctaagcgagcagagatgaagacttccatggagtcactgattcatcactttaagttgtatactgagggctaccaagttcctccaggagccacatatactgccattgaggctcccaagggagagtttggggtgtacctggtgtctgatggcagcagccgcccttatcgatgcaagatcaaggctcctggttttgcccatctggctggtttggacaagatgtctaagggacacatgttggcagatgtcgttgccatcataggtacccaagatattgtatttggagaagtagatcggtgagcaggggagcagcgtttgatcccccctgcctatcagcttcttctgtggagcctgttcctcactggaaattggcctctgtgtgtgtgtgtgtgtgtgtgtgtgtgtgtgtatgttcatgtacacttggctgtcaggctttctgtgcatgtactaaaaaaggagaaattataataaattagccgtcttgcggcccctaggcctaaa

SEQ ID NO: 368408 - DNA, 2276 bp, Homo sapiens
  misc_feature (3)..(3): n is a, c, g, or t
ggnacagggccccaggagaggcagagagtgagggaaagggcctggccggcatgcacagataggatcacggtcctgggagaattcctgctcttatagtctaacctaccatggcttctcttttctcaaggctccctcatgctgccctttggccctagtggctggtttccagggctgaggggactgagtgagctgcctgagaaaagagggtagggaacagaaaagccagccaggagctgtgggaggaaacgccctcagtaaagatgaccgcggtcactgttatctaaacgcaagtgaagccgagtcacaggacccggatgttgtcagttcgacggtaaacgaccctgccagcttccaagagggcggcttcactgtgcgaataggtgagaagccaagaaggaggcgcgctggagttacttccgcccggttctccttcccgcagtctgcagccggagtaagatggcggcgctgagggctttgtgcggcttccggggcgtcgcggcccaggtgctgcggcctggggctggagtccgattgccgattcagcccagcagaggtgttcggcagtggcagccagatgtggaatgggcacagcagtttgggggagctgttatgtacccaagcaaagaaacagcccactggaagcctccaccttggaatgatgtggaccctccaaaggacacaattgtgaagaacattaccctgaactttgggccccaacacccagcagcgcatggtgtcctgcgactagtgatggaattgagtggggagatggtgcggaagtgtgatcctcacatcgggctcctgcaccgaggcactgagaagctcattgaatacaagacctatcttcaggcccttccatactttgaccggctagactatgtgtccatgatgtgtaacgaacaggcctattctctagctgtggagaagttgctaaacatccggcctcctcctcgggcacagtggatccgagtgctgtttggagaaatcacacgtttgttgaaccacatcatggctgtgaccacacatgccctggaccttggggccatgacccctttcttctggctgtttgaagaaagggagaagatgtttgagttctacgagcgagtgtctggagcccgaatgcatgctgcttatatccggccaggaggagtgcaccaggacctaccccttgggcttatggatgacatttatcagttttctaagaacttctctcttcggcttgatgagttggaggagttgctgaccaacaataggatctggcgaaatcggacaattgacattggggttgtaacagcagaagaagcacttaactatggttttagtggagtgatgcttcggggctcaggcatccagtgggacctgcggaagacccagccctatgatgtttacgaccaggttgagtttgatgttcctgttggttctcgaggggactgctatgataggtacctgtgccgggtggaggagatgcgccagtccctgagaattatcgcacagtgtctaaacaagatgcctcctggggagatcaaggttgatgatgccaaagtgtctccacctaagcgagcagagatgaagacttccatggagtcactgattcatcactttaagttgtatactgagggctaccaagttcctccaggagccacatatactgccattgaggctcccaagggagagtttggggtgtacctggtgtctgatggcagcagccgcccttatcgatgcaagatcaaggctcctggttttgcccatctggctggtttggacaagatgtctaagggacacatgttggcagatgtcgttgccatcataggtacccaagatattgtatttggagaagtagatcggtgagcaggggagcagcgtttgatcccccctgcctatcagcttcttctgtggagcctgttcctcactggaaattggcctctgtgtgtgtgtgtgtgtgtgtgtgtgtgtgtgtagtatgtaatgtacatgtggggtgacagagataatgtgaagtatgtaataaaaggggagactattttaataaactacggcgtcgtgcaggacccatgaggcctcagaacagacaacgaacagaagaaagcacaaaaaaacaaaacagaaagaggcgagaacgaacatcaggggggggagagaacaggagagagaaaaaggacagagaaggggcacaggcagggacacgcgggcgagacggatgaagcagaagaggaggagaagcgggccgcaaacaacaaagaagacgggaaacacaaaaagcgaacagaggcaaacag

SEQ ID NO: 368409 - DNA, 1995 bp, Homo sapiens
  misc_feature (3)..(3): n is a, c, g, or t
ggnacagggccccaggagaggcagagagtgagggaaagggcctggccggcatgcacagataggatcacggtcctgggagaattcctgctcttatagtctaacctaccatggcttctcttttctcaaggctccctcatgctgccctttggccctagtggctggtttccagggctgaggggactgagtgagctgcctgagaaaagagggtagggaacagaaaagccagccaggagctgtgggaggaaacgccctcagtaaagatgaccgcggtcactgttatctaaacgcaagtgaagccgagtcacaggacccggatgttgtcagttcgacggtaaacgaccctgccagcttccaagagggcggcttcactgtgcgaataggtgagaagccaagaaggaggcgcgctggagttacttccgcccggttctccttcccgcagtctgcagccggagtaagatggcggcgctgagggctttgtgcggcttccggggcgtcgcggcccaggtgctgcggcctggggctggagtccgattgccgattcagcccagcagaggtgttcggcagtggcagccagatgtggaatgggcacagcagtttgggggagctgttatgtacccaagcaaagaaacagcccactggaagcctccaccttggaatgatgtggaccctccaaaggacacaattgtgaagaacattaccctgaactttgggccccaacacccagcagcgcatggtgtcctgcgactagtgatggaattgagtggggagatggtgcggaagtgtgatcctcacatcgggctcctgcaccgaggcactgagaagctcattgaatacaagacctatcttcaggcccttccatactttgaccggctagactatgtgtccatgatgtgtaacgaacaggcctattctctagctgtggagaagttgctaaacatccggcctcctcctcgggcacagtggatccgagtgctgtttggagaaatcacacgtttgttgaaccacatcatggctgtgaccacacatgccctggaccttggggccatgacccctttcttctggctgtttgaagaaagggagaagatgtttgagttctacgagcgagtgtctggagcccgaatgcatgctgcttatatccggccaggaggagtgcaccaggacctaccccttgggcttatggatgacatttatcagttttctaagaacttctctcttcggcttgatgagttggaggagttgctgaccaacaataggatctggcgaaatcggacaattgacattggggttgtaacagcagaagaagcacttaactatggttttagtggagtgatgcttcggggctcaggcatccagtgggacctgcggaagacccagccctatgatgtttacgaccaggttgagtttgatgttcctgttggttctcgaggggactgctatgataggtacctgtgccgggtggaggagatgcgccagtccctgagaattatcgcacagtgtctaaacaagatgcctcctggggagatcaaggttgatgatgccaaagtgtctccacctaagcgagcagagatgaagacttccatggagtcactgattcatcactttaagttgtatactgagggctaccaagttcctccaggagccacatatactgccattgaggctcccaagggagagtttggggtgtacctggtgtctgctggtttggacaagatgtctaagggacacatgttggcagatgtcgttgccatcataggtacccaagatattgtatttggagaagtagatcggtgagcaggggagcagcgtttgatcccccctgcctatcagcttcttctgtggagcctgttcctcactggaaattggcctctgtgtgtgtgtgtgtgtgtgtgtgtgtgtgtgtatgttcatgtacacttggctgtcaggctttctgtgcatgtactaaaaaaggagaaattataataaattagccgtcttgcggcccctaggcctaaa

SEQ ID NO: 368410 - DNA, 1881 bp, Homo sapiens
  misc_feature (3)..(3): n is a, c, g, or t
ggnacagggccccaggagaggcagagagtgagggaaagggcctggccggcatgcacagataggatcacggtcctgggagaattcctgctcttatagtctaacctaccatggcttctcttttctcaaggctccctcatgctgccctttggccctagtggctggtttccagggctgaggggactgagtgagctgcctgagaaaagagggtagggaacagaaaagccagccaggagctgtgggaggaaacgccctcagtaaagatgaccgcggtcactgttatctaaacgcaagtgaagccgagtcacaggacccggatgttgtcagttcgacggtaaacgaccctgccagcttccaagagggcggcttcactgtgcgaataggtgagaagccaagaaggaggcgcgctggagttacttccgcccggttctccttcccgcagtctgcagccggagtaagatggcggcgctgagggctttgtgcggcttccggggcgtcgcggcccaggtgctgcggcctggggctggagtccgattgccgattcagcccagcagaggtgttcggcagtggcagccagatgtggaatgggcacagcagtttgggggagctgttatgtacccaagcaaagaaacagcccactggaagcctccaccttggaatgatgtggaccctccaaaggacacaattgtgaagaacattaccctgaactttgggccccaacacccagcagcgcatggtgtcctgcgactagtgatggaattgagtggggagatggtgcggaagtgtgatcctcacatcgggctcctgcaccgaggcactgagaagctcattgaatacaagacctatcttcaggcccttccatactttgaccggctagactatgtgtccatgatgtgtaacgaacaggcctattctctagctgtggagaagttgctaaacatccggcctcctcctcgggcacagtggatccgagtgctgtttggagaaatcacacgtttgttgaaccacatcatggctgtgaccacacatgccctggaccttggggccatgacccctttcttctggctgtttgaagaaagggagaagatgtttgagttctacgagcgagtgtctggagcccgaatgcatgctgcttatatccggccaggaggagtgcaccaggacctaccccttgggcttatggatgacatttatcagttttctaagaacttctctcttcggcttgatgagttggaggagttgctgaccaacaataggatctggcgaaatcggacaattgacattggggttgtaacagcagaagaagcacttaactatggttttagtggagtgatgcttcggggctcaggcatccagtgggacctgcggaagacccagccctatgatgtttacgaccaggttgagtttgatgttcctgttggttctcgaggggactgctatgataggtacctgtgccgggtggaggagatgcgccagtccctgagaattatcgcacagtgtctaaacaagatgcctcctggggagatcaaggttgatgatgccaaagtgtctccacctaagcgagcagagatgaagacttccatggagtcactgattcatcactttaagttgtatactgagggctaccaagttcctccaggagccacatatactgccattgaggctcccaagggagagtttggggtgtacctggtgtctgatggcagcagccgcccttatcgatgcaagatcaaggctcctggttttgcccatctggtaagaatcaatcccagtaactataactccaatgaattaaacctgaccttggttgaggtttttatgaactcttctttctcctcccaccttgcaagtcttaactaacattgttgccatctcaatctccct

SEQ ID NO: 368411 - DNA, 1616 bp, Homo sapiens
  misc_feature (3)..(3): n is a, c, g, or t
ggnacagggccccaggagaggcagagagtgagggaaagggcctggccggcatgcacagataggatcacggtcctgggagaattcctgctcttatagtctaacctaccatggcttctcttttctcaaggctccctcatgctgccctttggccctagtggctggtttccagggctgaggggactgagtgagctgcctgagaaaagagggtagggaacagaaaagccagccaggagctgtgggaggaaacgccctcagtaaagatgaccgcggtcactgttatctaaacgcaagtgaagccgagtcacaggacccggatgttgtcagttcgacggtaaacgaccctgccagcttccaagagggcggcttcactgtgcgaataggtgagaagccaagaaggaggcgcgctggagttacttccgcccggttctccttcccgcagtctgcagccggagtaagatggcggcgctgagggctttgtgcggcttccggggcgtcgcggcccaggtgctgcggcctggggctggagtccgattgccgattcagcccagcagaggtgttcggcagtggcagccagatgtggaatgggcacagcagtttgggggagctgttatgtacccaagcaaagaaacagcccactggaagcctccaccttggaatgatgtggaccctccaaaggacacaattgtgaagaacattaccctgaactttgggccccaacacccagcagcgcatggtgtcctgcgactagtgatggaattgagtggggagatggtgcggaagtgtgatcctcacatcgggctcctgcaccgaggcactgagaagctcattgaatacaagacctatcttcaggcccttccatactttgaccggctagactatgtgtccatgatgtgtaacgaacaggcctattctctagctgtggagaagttgctaaacatccggcctcctcctcgggcacagtggatccgagtgctgtttggagaaatcacacgtttgttgaaccacatcatggctgtgaccacacatgccctggaccttggggccatgacccctttcttctggctgtttgaagaaagggagaagatgtttgagttctacgagcgagtgtctggagcccgaatgcatgctgcttatatccggccaggaggagtgcaccaggacctaccccttgggcttatggatgacatttatcagttttctaagaacttctctcttcggcttgatgagttggaggagttgctgaccaacaataggatctggatggcagcagccgcccttatcgatgcaagatcaaggctcctggttttgcccatctggctggtttggacaagatgtctaagggacacatgttggcagatgtcgttgccatcataggtacccaagatattgtatttggagaagtagatcggtgagcaggggagcagcgtttgatcccccctgcctatcagcttcttctgtggagcctgttcctcactggaaattggcctctgtgtgtgtgtgtgtgtgtgtgtgtgtgtgtgtatgttcatgtacacttggctgtcaggctttctgtgcatgtactaaaaaaggagaaattataataaattagccgtcttgcggcccctaggcctaaa

SEQ ID NO: 368412 - DNA, 1584 bp, Homo sapiens
ttaggagcgcagcgggtgacgggccgtatcgcctttcgctcggcgtcgcggaactgtcagaccttcgtgccgctgttccgtacaggtgttcggcagtggcagccagatgtggaatgggcacagcagtttgggggagctgttatgtacccaagcaaagaaacagcccactggaagcctccaccttggaatgatgtggaccctccaaaggacacaattgtgaagaacattaccctgaactttgggccccaacacccagcagcgcatggtgtcctgcgactagtgatggaattgagtggggagatggtgcggaagtgtgatcctcacatcgggctcctgcaccgaggcactgagaagctcattgaatacaagacctatcttcaggcccttccatactttgaccggctagactatgtgtccatgatgtgtaacgaacaggcctattctctagctgtggagaagttgctaaacatccggcctcctcctcgggcacagtggatccgagtgctgtttggagaaatcacacgtttgttgaaccacatcatggctgtgaccacacatgccctggaccttggggccatgacccctttcttctggctgtttgaagaaagggagaagatgtttgagttctacgagcgagtgtctggagcccgaatgcatgctgcttatatccggccaggaggagtgcaccaggacctaccccttgggcttatggatgacatttatcagttttctaagaacttctctcttcggcttgatgagttggaggagttgctgaccaacaataggatctggcgaaatcggacaattgacattggggttgtaacagcagaagaagcacttaactatggttttagtggagtgatgcttcggggctcaggcatccagtgggacctgcggaagacccagccctatgatgtttacgaccaggttgagtttgatgttcctgttggttctcgaggggactgctatgataggtacctgtgccgggtggaggagatgcgccagtccctgagaattatcgcacagtgtctaaacaagatgcctcctggggagatcaaggttgatgatgccaaagtgtctccacctaagcgagcagagatgaagacttccatggagtcactgattcatcactttaagttgtatactgagggctaccaagttcctccaggagccacatatactgccattgaggctcccaagggagagtttggggtgtacctggtgtctgatggcagcagccgcccttatcgatgcaagatcaaggctcctggttttgcccatctggctggtttggacaagatgtctaagggacacatgttggcagatgtcgttgccatcataggtacccaagatattgtatttggagaagtagatcggtgagcaggggagcagcgtttgatcccccctgcctatcagcttcttctgtggagcctgttcctcactggaaattggcctctgtgtgtgtgtgtgtgtgtgtgtgtgtgtgtgtatgttcatgtacacttggctgtcaggctttctgtgcatgtactaaaaaaggagaaattataataaattagccgtcttgcggcccctaggcctaaa

SEQ ID NO: 368413 - DNA, 1561 bp, Homo sapiens
  misc_feature (1)..(1): n is a, c, g, or t
  misc_feature (29)..(29): n is a, c, g, or t
  misc_feature (129)..(130): n is a, c, g, or t
  misc_feature (132)..(132): n is a, c, g, or t
  misc_feature (134)..(134): n is a, c, g, or t
naacttaggctaggtacgaggctgggtgntaagatggcggcgctgagggctttgtgcggcttccggggcgtcgcggcccaggtgctgcggcctggggctggagtccgattgccgattcagcccagcagnngngntcgagggcagctggaagcctccaccttggaatgatgtggaccctccaaaggacacaattgtgaagaacattaccctgaactttgggccccaacacccagcagcgcatggtgtcctgcgactagtgatggaattgagtggggagatggtgcggaagtgtgatcctcacatcgggctcctgcaccgaggcactgagaagctcattgaatacaagacctatcttcaggcccttccatactttgaccggctagactatgtgtccatgatgtgtaacgaacaggcctattctctagctgtggagaagttgctaaacatccggcctcctcctcgggcacagtggatccgagtgctgtttggagaaatcacacgtttgttgaaccacatcatggctgtgaccacacatgccctggaccttggggccatgacccctttcttctggctgtttgaagaaagggagaagatgtttgagttctacgagcgagtgtctggagcccgaatgcatgctgcttatatccggccaggaggagtgcaccaggacctaccccttgggcttatggatgacatttatcagttttctaagaacttctctcttcggcttgatgagttggaggagttgctgaccaacaataggatctggcgaaatcggacaattgacattggggttgtaacagcagaagaagcacttaactatggttttagtggagtgatgcttcggggctcaggcatccagtgggacctgcggaagacccagccctatgatgtttacgaccaggttgagtttgatgttcctgttggttctcgaggggactgctatgataggtacctgtgccgggtggaggagatgcgccagtccctgagaattatcgcacagtgtctaaacaagatgcctcctggggagatcaaggttgatgatgccaaagtgtctccacctaagcgagcagagatgaagacttccatggagtcactgattcatcactttaagttgtatactgagggctaccaagttcctccaggagccacatatactgccattgaggctcccaagggagagtttggggtgtacctggtgtctgatggcagcagccgcccttatcgatgcaagatcaaggctcctggttttgcccatctggctggtttggacaagatgtctaagggacacatgttggcagatgtcgttgccatcataggtacccaagatattgtatttggagaagtagatcggtgagcaggggagcagcgtttgatcccccctgcctatcagcttcttctgtggagcctgttcctcactggaaattggcctctgtgtgtgtgtgtgtgtgtgtgtgtgtgtgtgtatgttcatgtacacttggctgtcaggctttctgtgcatgtactaaaaaaggagaaattataataaattagccgtcttgcggcccctaggcctaaa

SEQ ID NO: 368414 - DNA, 1464 bp, Homo sapiens
gcgacccctgagcagtgttctatgtgctgagcggcgggactgagctgttgagttagagccaacatgaatgatgtggaccctccaaaggacacaattgtgaagaacattaccctgaactttgggccccaacacccagcagcgcatggtgtcctgcgactagtgatggaattgagtggggagatggtgcggaagtgtgatcctcacatcgggctcctgcaccgaggcactgagaagctcattgaatacaagacctatcttcaggcccttccatactttgaccggctagactatgtgtccatgatgtgtaacgaacaggcctattctctagctgtggagaagttgctaaacatccggcctcctcctcgggcacagtggatccgagtgctgtttggagaaatcacacgtttgttgaaccacatcatggctgtgaccacacatgccctggaccttggggccatgacccctttcttctggctgtttgaagaaagggagaagatgtttgagttctacgagcgagtgtctggagcccgaatgcatgctgcttatatccggccaggaggagtgcaccaggacctaccccttgggcttatggatgacatttatcagttttctaagaacttctctcttcggcttgatgagttggaggagttgctgaccaacaataggatctggcgaaatcggacaattgacattggggttgtaacagcagaagaagcacttaactatggttttagtggagtgatgcttcggggctcaggcatccagtgggacctgcggaagacccagccctatgatgtttacgaccaggttgagtttgatgttcctgttggttctcgaggggactgctatgataggtacctgtgccgggtggaggagatgcgccagtccctgagaattatcgcacagtgtctaaacaagatgcctcctggggagatcaaggttgatgatgccaaagtgtctccacctaagcgagcagagatgaagacttccatggagtcactgattcatcactttaagttgtatactgagggctaccaagttcctccaggagccacatatactgccattgaggctcccaagggagagtttggggtgtacctggtgtctgatggcagcagccgcccttatcgatgcaagatcaaggctcctggttttgcccatctggctggtttggacaagatgtctaagggacacatgttggcagatgtcgttgccatcataggtacccaagatattgtatttggagaagtagatcggtgagcaggggagcagcgtttgatcccccctgcctatcagcttcttctgtggagcctgttcctcactggaaattggcctctgtgtgtgtgtgtgtgtgtgtgtgtgtgtgtgtatgttcatgtacacttggctgtcaggctttctgtgcatgtactaaaaaaggagaaattataataaattagccgtcttgcggcccctaggcctaaa

SEQ ID NO: 368415 - DNA, 1375 bp, Homo sapiens
  misc_feature (3)..(3): n is a, c, g, or t
  misc_feature (1221)..(1221): n is a, c, g, or t
  misc_feature (1248)..(1248): n is a, c, g, or t
ggnacagggccccaggagaggcagagagtgagggaaagggcctggccggcatgcacagataggatcacggtcctgggagaattcctgctcttatagtctaacctaccatggcttctcttttctcaaggctccctcatgctgccctttggccctagtggctggtttccagggctgaggggactgagtgagctgcctgagaaaagagggtagggaacagaaaagccagccaggagctgtgggaggaaacgccctcagtaaagatgaccgcggtcactgttatctaaacgcaagtgaagccgagtcacaggacccggatgttgtcagttcgacggtaaacgaccctgccagcttccaagagggcggcttcactgtgcgaataggtgagaagccaagaaggaggcgcgctggagttacttccgcccggttctccttcccgcagtctgcagccggagtaagatggcggcgctgagggctttgtgcggcttccggggcgtcgcggcccaggtgctgcggcctggggctggagtccgattgccgattcagcccagcagaggtgttcggcagtggcagccagatgtggaatgggcacagcagtttgggggagctgttatgtacccaagcaaagaaacagcccactggaagcctccaccttggaatgatgtggaccctccaaaggacacaattgtgaagaacattaccctgaactttgggccccaacacccagcagcgcatggtgtcctgcgactagtgatggaattgagtggggagatggtgcggaagtgtgatcctcacatcgggctcctgcaccgaggcactgagaagctcattgaatacaagacctatcttcaggcccttccatactttgaccggctagactatgtgtccatgatgtgtaacgaacaggcctattctctagctgtggagaagttgctaaacatccggcctcctcctcgggcacagtggatccgagtgctgtttggagaaatcacacgtttgttgaaccacatcatggctgtgaccacacatgccctggaccttggggccatgacccctttcttctggctgtttgaagaaagggagaagatgtttgagttctacgagcgagtgtctggagcccgaatgcatgctgcttatatccggccaggaggagtgcaccagacttacctgggctttggtgcattatcagttctagactctctcttcggtgagagtggggagtgngaccacatggattgggaacggcctgcntggcgtgtacgcacaaaaacctatctggtagggggggcgcggcaggaccaggacgcgaacccctttttcacggatgagtccggcccggggaaacctgggggaagcccacacgtcaagcgggcagaca

SEQ ID NO: 368416 - DNA, 1297 bp, Homo sapiens
ttcttcaaaaggggcctccccctacaactggcttggcccctttggccctagtggctggtttccagggctgaggggactgagtgagctgcctgagaaaagagggtagggaacagaaaagccagccaggagctgtgggaggaaacgccctcagtaaagatgaccgcggtcactgttatctaaacgcaagtgaagccgagtcacaggacccggatgttgtcagttcgacggtaaacgaccctgccagcttccaagagggcggcttcactgtgcgaataggtgagaagccaagaaggaggcgcgctggagttacttccgcccggttctccttcccgcagtctgcagccggagtaagatggcggcgctgagggctttgtgcggcttccggggcgtcgcggcccaggtgctgcggcctggggctggagtccgattgccgattcagcccagcagaggtgttcggcagtggcagccagatgtggaatgggcacagcagtttgggggagctgttatgtacccaagcaaagaaacagcccactggaagcctccaccttggaatgatgtggaccctccaaaggacacaattgtgaagaacattaccctgaactttgggccccaacacccaccctatgatgtttacgaccaggttgagtttgatgttcctgttggttctcgaggggactgctatgataggtacctgtgccgggtggaggagatgcgccagtccctgagaattatcgcacagtgtctaaacaagatgcctcctggggagatcaaggttgatgatgccaaagtgtctccacctaagcgagcagagatgaagacttccatggagtcactgattcatcactttaagttgtatactgagggctaccaagttcctccaggagccacatatactgccattgaggctcccaagggagagtttggggtgtacctggtgtctgatggcagcagccgcccttatcgatgcaagatcaaggctcctggttttgcccatctggctggtttggacaagatgtctaagggacacatgttggcagatgtcgttgccatcataggtacccaagatattgtatttggagaagtagatcggtgagcaggggagcagcgtttgatcccccctgcctatcagcttcttctgtggagcctgttcctcactggaaattggcctctgtgtgtgtgtgtgtgtgtgtgtgtgtgtgtgtatgttcatgtacacttggctgtcaggctttctgtgcatgtactaaaaaaggagaaattataataaattagccgtcttgcggcccctaggcctaaa

SEQ ID NO: 368417 - DNA, 509 bp, Homo sapiens
  misc_feature (1)..(1): n is a, c, g, or t
  misc_feature (29)..(29): n is a, c, g, or t
naacttaggctaggtacgaggctgggtgnacttccatggagtcactgattcatcactttaagttgtatactgagggctaccaagttcctccaggagccacatatactgccattgaggctcccaagggagagtttggggtgtacctggtgtctgatggcagcagccgcccttatcgatgcaagatcaaggctcctggttttgcccatctggctggtttggacaagatgtctaagggacacatgttggcagatgtcgttgccatcataggtacccaagatattgtatttggagaagtagatcggtgagcaggggagcagcgtttgatcccccctgcctatcagcttcttctgtggagcctgttcctcactggaaattggcctctgtgtgtgtgtgtgtgtgtgtgtgtgtgtgtgtatgttcatgtacacttggctgtcaggctttctgtgcatgtactaaaaaaggagaaattataataaattagccgtcttgcggcccctaggcctaaa

SEQ ID NO: 368418 - DNA, 587 bp, Homo sapiens
cgacggcagtgaatcgagactcgggacccaccagtcctatagatcagtatagcaatattctgaattcaaaattctgttgttaaggatggtgtaaccatatatgacaaggcttttacaaactcctttttgaacattgctttaagcaatcatttgtgtatttgtattaattttcaatctaatcattccaaatgaggcaaagttttgtgtaccagtgattgaattagaagaaagaacaagttattttgtatagtctaaaagctttgtaagaatcctctgcttgcagtgtttgcacagttctccattagccctgtcgtgttttcttcttctttgagacatccattagtagatactttaacactaatccgttttctgtcccaaatacataggagtccaggagccagggatgcaggtgtcattttaccttctagtagtctatttttgtgttctggtgcatgtccgactgagctctatttttaaaagtacggagctgcttgctacctgaagccagagagatactgaagaatgaaagacctcgagagtcctgctgtctaaaggagtagcacagccagacactgatgagggtggag

SEQ ID NO: 368419 - DNA, 462 bp, Homo sapiens
gactgttcagatacagctccatcagggaaaccaaatatgttgctgccaccctgacatttttgtgtttttctacctgatcatctgtataggacaagggaatttcttctctgtggtgacctgtcatgaattaatgatcccagcatacccagtaaagtttttaatgtgcagtatgggttaattcataagacatggtctgactcaggtttgtttatacaaaaatgtgctctgtccacaccaacatggcacatgtatacacgtgtaacaaacctgcacgttgtacacatgtaccctagaacttaaagtatatatatataaaaaaacaaaactagttattgggcactatactctctacctggggttgcaccccaactctcagcatcacacaatatacccatgtaacaacctgcacatgtaccctctgaatataaaataaaagttgaaattatttaaaaaaagttctct

SEQ ID NO: 368420 - DNA, 9167 bp, Homo sapiens
tatgtttagtcccatatgctcttcctgaatcttgccactgcccatcaagagatagaatacatttcccctcccctggaacatggaagcaaccaagctttaagaagcacagctttggagacactccatgagtctgcactgctttcaggggaactagcacttaagaccttgtgtaacaaaatggacactggggacacagctctaggacaaaaagctacctcaaggtctggagaaactgataaagcatcaggtagatggagacaggaacaatcagctgttattaagatgagcacttttggcagtcatgaaggacagcggcaaccacaaatagagcctgagcaaatcggaaacacagcatcagcacaactgtttggttctgggaaactggcctcccctagtgaagtggtgcagcaagtcgcagagaagcaatatccaccgcatcgtccgagtccttactcatgccaacactcactctctttccctcagcactcattgccacagggggtcatgcacagcaccaagccacatcagagcctcgaaggtcctccgtggcttttccctggccctttgccatccgttgcctctgaggacttatttccttttcctatacatggccacagtggtggttatcctagaaaaaagatttcaagtctgaaccctgcttatagccaatactcccagaaaagtattgaacaggcagaagaggctcacaagaaagagcacaaacccaaaaagcctggcaagtacatttgcccttactgcagcagagcgtgtgccaaacctagtgtactgaaaaaacacatcaggtcccatactggggagcggccatatccatgtataccttgtggtttctctttcaagacaaagagcaatttgtacaagcacaggaagtcacatgcccatgcaattaaggcaggattagtacctttcacagagtcagctgtatctaaattggacctagaggctggttttattgatgtagaagcagaaatacattcagatggtgaacagagtacagacacagatgaggagagttctttatttgccgaggcttctgacaaaatgagtcctggtccacccatcccactggacattgccagcagaggcggctatcatgggtcattggaagaatcattgggaggtccaatgaaggtgccgattttgattatccctaaaagtgggattcctctccctaatgaaagctctcagtatattggccctgatatgctaccaaatccatctttaaatactaaggctgatgattcgcacacagtcaaacagaaacttgcactaagactgtcagagaaaaaaggacaagattctgagccatcgctcaaccttctgagcccgcacagtaaaggaagcactgattctggttacttttctcgctcagaaagtgctgagcagcaaataagccctcccaacacaaatgcaaagtcttatgaagaaatcatctttggaaaatactgtcggcttagtccgagaaatgcactcagtgttacaaccacaagtcaggagcgtgccgcaatgggtaggaagggcataatggaaccattacctcacgttaacaccaggttagatgtcaagatgtttgaagatcctgtttcacagctgatcccaagcaagggagatgtcgaccccagtcaaacgagcatgctgaaatccactaagttcaacagtgagtccagacaaccccagattattccatcatctatcaggaacgaaggaaaactttatccagcaaacttccaaggcagcaacccggttctcttagaagctcctgtagactcttcaccccttattagaagcaactcagtgccaacttcttcagcaactaatctaactattcctccttctttgagaggaagtcactcatttgatgaaaggatgactggttccgacgatgtattctatccagggaccgtgggcataccccctcagcgcatgctaagaagacaagcggcatttgagctgccttcggtacaggagggccacgtggaagtcgagcaccatggcaggatgttgaagggtatcagcagttcatccctgaaggaaaagaaattgtctcctggggacagggttgggtatgactatgatgtctgtcggaaaccctataagaagtgggaggactctgaaacaccaaagcaaaactacagggacatttcctgcttgagttctttaaagcatggtggagaatatttcatggatcccgtggtgccattgcagggagtaccaagcatgtttggaactacctgtgaaaacaggaaacgccggaaagagaagagcgtaggggatgaagaggacacgcccatgatctgcagcagcattgtaagcactcctgtgggcatcatggcttccgattatgaccccaaactgcagatgcaggaaggagtcaggagtggatttgccatggctggacacgaaaacctttctcatggtcacacggaacgctttgacccatgtcggccccaactgcagcctggaagtccatctcttgtgtcagaggagtcaccttcagccattgattcagacaagatgtcagacctagggggcaggaaacctcctggaaatgtgatttctgtgattcagcacaccaactcactgagccgacccaattcatttgaaaggtctgagtcagccgaacttgtggcttgcacacaggataaagccccttccccttcagagacttgtgacagtgagatttcagaagccccagtgagtcctgagtgggctccacctggggatggtgcagaaagtggggggaaaccctctccatctcagcaggtgcagcagcagtcctatcacacacagcccaggctagttcggcaacacaacatccaggttcctgagattcgagtgaccgaggagcctgataaacctgagaaggagaaggaagcccagagcaaagagccagagaagcctgtggaagaatttcagtggccccagagaagtgagaccctttcccagctccccgcggagaagttgccacccaaaaagaagcgtctgcgacttgcagatatggagcactcctcaggggagtccagctttgaatccacaggcacaggcctctcccgcagccccagccaagaaagcaacttgtcccacagctccagtttctccatgtcttttgaaagagaagaaaccagtaagctttctgcacttcctaagcaggatgagtttgggaagcattcagagtttctgactgtccctgctggttcatactcattgtctgtcccaggccatcaccaccagaaagagatgcgacgctgctcatcagagcagatgccttgtcctcacccagcggaagtcccagaagttcggagcaaatcatttgattatgggaatctgtcccatgctcctgtgtcgggagcagcagcctccacggtatcaccgtccagggagaggaagaaatgctttctggtgcggcaagcttccttcagtggctccccagaaatctcccagggcgaggttggcatggatcagagcgtgaagcaagagcagctggagcacctgcatgctggcctccggtccgggtggcaccatggcccgcctgctgtgctgcctcctcttcagcaagaggacccagggaagcaggtggcgggtccttgtcccccgctgagctcggggccactgcacctggcccagccacagatcatgcacatggacagtcaggaatctttgagaaatcccttgatccaaccaacatcctatatgacaagcaagcacttacctgaacagccacacttatttccacatcaagagacaattccattttctccaatccagaatgccttgtttcagtttcagtatcctacagtttgtatggttcatttaccagctcagcagcctccctggtggcaggcacatttcccacatccctttgctcagcaccctcagaagagctatggcaagccctcttttcagacagaaatccattcgagctatcccttagagcatgtggcagagcacactggaaagaaacctgctgagtatgcacacacgaaagagcagacctacccatgttattcaggagcatcagggctacacccaaagaaccttcttccaaagtttccatcagaccagagcagtaagtcaactgaaacgccctctgagcaggttcttcaagaagattttgcctcggcaaatgctgggtctttgcagtccctcccaggaacagtggttcctgttcggatccagacgcacgtaccatcctatggaagtgtcatgtacacaagcatttctcagatacttgggcagaatagccctgccattgtcatatgcaaagtcgatgagaatatgacccaaaggacactggtcaccaacgcagccatgcaagggataggattcaacattgcccaggtgctggggcagcatgcgggcttggagaagtaccccatttggaaagcacctcagactttgcccctcggcttagaatcctccatccccttgtgtttaccttccacctctgacagcgtggccaccctgggaggtagcaagcgaatgctttctccagccagtagcttggagctcttcatggaaaccaagcagcagaaaagggtcaaagaagaaaagatgtacggacagattgtggaggagcttagtgctgtggagctgaccaactcagacatcaaaaaggacctctcccgcccccagaaaccccagctggttcgacaaggatgtgcttctgagccaaaagatggcttgcagtcagggtcatcttccttctcctcgctgtcgccctcctcatctcaagactatccttctgttagcccgtcttccagggagccattcccgcccagcaaggagatgctttccggttcccgggcaccacttccggggcagaagtccagtgggccttctgaaagcaaagaatcttcagatgaattagatatcgatgagacggcatcggacatgagcatgagcccacagagttcttcattaccagcaggagatggtcagctggaagaggaagggaagggccacaagcggcctgttggcatgctggtccgcatggcctctgcccccagcgggaacgtggcagactcaactcttcttctcacggacatggcagatttccagcagattcttcagttccccagtctgcggacaacaactactgtgagttggtgcttcttgaattatacaaaacccaattatgtgcaacaggccaccttcaaatcctcggtttatgcttcatggtgcattagttcctgtaatccaaacccatcaggattgaacaccaagaccacgctggctcttctgaggtccaagcaaaaaatcactgcagaaatttatactctggctgctatgcataggcctggaaccggcaagcttacatcatcaagtgcttggaagcagtttactcagatgaaacctgatgcgtcctttttatttggcagcaaactagaaaggaaactagtgggaaatatcttaaaggaaagagggaaaggagatattcatggagataaagatattggatccaaacaaactgagccaatccgaattaaaatatttgaaggagggtacaaatcgaatgaagattatgtatatgtcagaggacgtggccggggaaagtacatttgtgaagaatgtgggattcgctgtaagaagccaagcatgctcaaaaaacacatccgtacccatactgatgttcggccttatgtatgcaagttatgtaactttgccttcaaaacgaaaggaaacctaacgaagcatatgaaatctaaagcacacatgaaaaaatgcctggaattgggagtctcaatgacatcggtggatgatacagaaactgaggaagcagaaaatttggaagatttgcacaaagcagcagagaagcatagcatgtccagcatttcaactgatcatcagttctccgatgctgaggaatcagatggtgaggatggagatgataatgatgatgatgatgaagatgaagatgactttgacgaccagggagatttaacaccaaaaacaagatcaagaagcaccagtcctcagcctcctagattctcctccttgcctgtgaatgttggcgccgtaccccacggggttccttcagatagttccctgggacattcttcgttgatcagctatttggttactttgccaagtattcgagttactcagcttatgacacccagtgattcatgtgaagatacccagatgacagaataccagaggctattccagagcaaaagtacggactcagaaccagacaaagacagattggacatacctagttgtatggatgaggagtgcatgctaccttcagagccaagctcctctcccagggacttctcaccctcaagccaccattcctctccaggatatgattcttcaccctgtcgagataattcaccaaagaggtatctgatacccaaaggagatttatctcccaggagacatttatcacctaggagagatctgtcacccatgagacatctttcaccaagaaaggaagctgcattgagaagagagatgtcccaaagagatgtttcaccaagaaggcatttgtctccaaggaggccagtgtctcctgggaaagatatcacagcaagaagagacctctcccctagaagagagagaagatacatgaccacaataagagcgccatctcccagaagggctttataccataacccaccattgtccatgggacagtatttgcaagcagagccaattgtattggggcctcctaatttaagaagaggattacctcaggttccttacttcagtctctatggagaccaagaaggtgcttatgaacatccaggctccagccttttccctgagggtcctaatgactatgtcttcagtcatcttccactccactctcagcaacaagtgcgagcccctatccccatggtgcccgttggtgggatccagatggttcactccatgccgccagccctttccagtttacatccttcacccacattgcccctgccaatggagggctttgaggagaagaaaggcgcgtcaggggagtccttctccaaggacccctatgtgctttctaagcagcatgagaagcgaggtcctcacgctttgcagtcatctggtccgcctagcactccctcctctcctcggctgttgatgaaacagagcacttcggaagacagcctaaacgcaacagagcgggaacaggaggaaaatatacagacttgtacaaaagccattgcctctctccggattgccacggaagaggcagctctgctcgggccagatcagccagcgcgggtgcaggagccccaccagaaccccctgggaagtgcacatgttagcattagacactttagtagacctgagccaggtcagccctgtacctcagccacccaccctgacttgcatgatggtgaaaaggacaattttggtacatcacagactccattagctcactccacgttttacagcaagagttgtgtggatgacaagcagttggactttcacagcagcaaggaattatcttcaagcacagaggaaagcaaagatccttcatcagaaaagagtcagctacattgatctatgatgcatggagactttcatttccacattttcccatttttttgtttttgtttttctagaaatggaggtaatccagtttatagcatgcctgtcctaagttacagtagtttgctattatatatacttttgttatatcaaaagaattaggtaaattaacaagtcatcatgagcctgaccaaaacaaaatttgaaattaacctattgggtctggtacttttaaaattgtacagatgtttgtgccttttctttactttgcttatattcttataagcattttttagcagtaatttgtacatattttagaatttgtgtatctgctttgtaataaatgtaatttctttccttttttggacacttggatctaaatgatgtaaagcaaaacagcatcaatatatatgtgaggttgcactaaaacatatttttatatgattaaaactgaacagcttttatgtacagctctgattctgtaatactaatatttatttactttgtttcataaattgtacattttttcttaatgttgtggattgcttttctatgtgaagcatgggatttactgttgcgtaactagaacaaaaatgtacattgtaaacaagatatttaaactagagtatcttattctgcacttatgcattagttaaaaaaagataaaggatgtatcagtcagttcttaactcttgtatatttttttgtctcttgtttgctggattgactataacttaagtgctgattgtgattttaaaatgatagtaccgtaaagcattaaagtaaacaatgtgctattgtgagttttttcaaagctttataaatcagttataaataatattaaaagtatttggtcttatgtgaacatgttgatctatatactcatctaaaaatatgggaaaacattccaccccatgtaaatatgtacaagtgcatcactggtacaattttatgtaactcagttggacactaggttgccacagacctatgctaggtgtctttaaaaaattaaggtgacaaagcacatgggactgtgtagagcttggttatcggccggcccggtggcttggcaggcagtgctgtgcgctgctcatggagaagacctgggcttagcaatctccttagttcttgctacacaggatggtgactggaactaaggctacacagagggtcgcacttggactctgagggttgggtgtggaagggggaaaaggggatggagacctgctccccagctcttcctgtcagccggtttacatgggaacagggttaacatctgtgttaggggaggtcaccttaccctttttcataggggaagagtgtcacactcctggctatctcagggggaatggggaaaagaatctttcaagggcaaagaactcgtgggaggatgtctgttgtatgtaatactcacaatggcttttggttagtgttgaaggtgggaagagcatttgtaggtccagaagagtgaaagagagggaggggtgcagcaacatgtgcacaggcacgcacatgtgtgcacgcacacatacaatctgggttatctttgtgctatatagtggattataattctgtgaaaccaagtttgtatattgaattacattaaggagtgttctttaaaaagagaaataaatatacaattacatgcttaaaaaaaaaag

SEQ ID NO: 368421 - DNA, 8466 bp, Homo sapiens
tgatctacaggatctctttgcggtgcctttccctggcaagtacatttgcccttactgcagcagagcgtgtgccaaacctagtgtactgaaaaaacacatcaggtcccatactggggagcggccatatccatgtataccttgtggtttctctttcaagacaaagagcaatttgtacaagcacaggaagtcacatgcccatgcaattaaggcaggattagtacctttcacagagtcagctgtatctaaattggacctagaggctggttttattgatgtagaagcagaaatacattcagatggtgaacagagtacagacacagatgaggagagttctttatttgccgaggcttctgacaaaatgagtcctggtccacccatcccactggacattgccagcagaggcggctatcatgggtcattggaagaatcattgggaggtccaatgaaggtgccgattttgattatccctaaaagtgggattcctctccctaatgaaagctctcagtatattggccctgatatgctaccaaatccatctttaaatactaaggctgatgattcgcacacagtcaaacagaaacttgcactaagactgtcagagaaaaaaggacaagattctgagccatcgctcaaccttctgagcccgcacagtaaaggaagcactgattctggttacttttctcgctcagaaagtgctgagcagcaaataagccctcccaacacaaatgcaaagtcttatgaagaaatcatctttggaaaatactgtcggcttagtccgagaaatgcactcagtgttacaaccacaagtcaggagcgtgccgcaatgggtaggaagggcataatggaaccattacctcacgttaacaccaggttagatgtcaagatgtttgaagatcctgtttcacagctgatcccaagcaagggagatgtcgaccccagtcaaacgagcatgctgaaatccactaagttcaacagtgagtccagacaaccccagattattccatcatctatcaggaacgaaggaaaactttatccagcaaacttccaaggcagcaacccggttctcttagaagctcctgtagactcttcaccccttattagaagcaactcagtgccaacttcttcagcaactaatctaactattcctccttctttgagaggaagtcactcatttgatgaaaggatgactggttccgacgatgtattctatccagggaccgtgggcataccccctcagcgcatgctaagaagacaagcggcatttgagctgccttcggtacaggagggccacgtggaagtcgagcaccatggcaggatgttgaagggtatcagcagttcatccctgaaggaaaagaaattgtctcctggggacagggttgggtatgactatgatgtctgtcggaaaccctataagaagtgggaggactctgaaacaccaaagcaaaactacagggacatttcctgcttgagttctttaaagcatggtggagaatatttcatggatcccgtggtgccattgcagggagtaccaagcatgtttggaactacctgtgaaaacaggaaacgccggaaagagaagagcgtaggggatgaagaggacacgcccatgatctgcagcagcattgtaagcactcctgtgggcatcatggcttccgattatgaccccaaactgcagatgcaggaaggagtcaggagtggatttgccatggctggacacgaaaacctttctcatggtcacacggaacgctttgacccatgtcggccccaactgcagcctggaagtccatctcttgtgtcagaggagtcaccttcagccattgattcagacaagatgtcagacctagggggcaggaaacctcctggaaatgtgatttctgtgattcagcacaccaactcactgagccgacccaattcatttgaaaggtctgagtcagccgaacttgtggcttgcacacaggataaagccccttccccttcagagacttgtgacagtgagatttcagaagccccagtgagtcctgagtgggctccacctggggatggtgcagaaagtggggggaaaccctctccatctcagcaggtgcagcagcagtcctatcacacacagcccaggctagttcggcaacacaacatccaggttcctgagattcgagtgaccgaggagcctgataaacctgagaaggagaaggaagcccagagcaaagagccagagaagcctgtggaagaatttcagtggccccagagaagtgagaccctttcccagctccccgcggagaagttgccacccaaaaagaagcgtctgcgacttgcagatatggagcactcctcaggggagtccagctttgaatccacaggcacaggcctctcccgcagccccagccaagaaagcaacttgtcccacagctccagtttctccatgtcttttgaaagagaagaaaccagtaagctttctgcacttcctaagcaggatgagtttgggaagcattcagagtttctgactgtccctgctggttcatactcattgtctgtcccaggccatcaccaccagaaagagatgcgacgctgctcatcagagcagatgccttgtcctcacccagcggaagtcccagaagttcggagcaaatcatttgattatgggaatctgtcccatgctcctgtgtcgggagcagcagcctccacggtatcaccgtccagggagaggaagaaatgctttctggtgcggcaagcttccttcagtggctccccagaaatctcccagggcgaggttggcatggatcagagcgtgaagcaagagcagctggagcacctgcatgctggcctccggtccgggtggcaccatggcccgcctgctgtgctgcctcctcttcagcaagaggacccagggaagcaggtggcgggtccttgtcccccgctgagctcggggccactgcacctggcccagccacagatcatgcacatggacagtcaggaatctttgagaaatcccttgatccaaccaacatcctatatgacaagcaagcacttacctgaacagccacacttatttccacatcaagagacaattccattttctccaatccagaatgccttgtttcagtttcagtatcctacagtttgtatggttcatttaccagctcagcagcctccctggtggcaggcacatttcccacatccctttgctcagcaccctcagaagagctatggcaagccctcttttcagacagaaatccattcgagctatcccttagagcatgtggcagagcacactggaaagaaacctgctgagtatgcacacacgaaagagcagacctacccatgttattcaggagcatcagggctacacccaaagaaccttcttccaaagtttccatcagaccagagcagtaagtcaactgaaacgccctctgagcaggttcttcaagaagattttgcctcggcaaatgctgggtctttgcagtccctcccaggaacagtggttcctgttcggatccagacgcacgtaccatcctatggaagtgtcatgtacacaagcatttctcagatacttgggcagaatagccctgccattgtcatatgcaaagtcgatgagaatatgacccaaaggacactggtcaccaacgcagccatgcaagggataggattcaacattgcccaggtgctggggcagcatgcgggcttggagaagtaccccatttggaaagcacctcagactttgcccctcggcttagaatcctccatccccttgtgtttaccttccacctctgacagcgtggccaccctgggaggtagcaagcgaatgctttctccagccagtagcttggagctcttcatggaaaccaagcagcagaaaagggtcaaagaagaaaagatgtacggacagattgtggaggagcttagtgctgtggagctgaccaactcagacatcaaaaaggacctctcccgcccccagaaaccccagctggttcgacaaggatgtgcttctgagccaaaagatggcttgcagtcagggtcatcttccttctcctcgctgtcgccctcctcatctcaagactatccttctgttagcccgtcttccagggagccattcccgcccagcaaggagatgctttccggttcccgggcaccacttccggggcagaagtccagtgggccttctgaaagcaaagaatcttcagatgaattagatatcgatgagacggcatcggacatgagcatgagcccacagagttcttcattaccagcaggagatggtcagctggaagaggaagggaagggccacaagcggcctgttggcatgctggtccgcatggcctctgcccccagcgggaacgtggcagactcaactcttcttctcacggacatggcagatttccagcagattcttcagttccccagtctgcggacaacaactactgtgagttggtgcttcttgaattatacaaaacccaattatgtgcaacaggccaccttcaaatcctcggtttatgcttcatggtgcattagttcctgtaatccaaacccatcaggattgaacaccaagaccacgctggctcttctgaggtccaagcaaaaaatcactgcagaaatttatactctggctgctatgcataggcctggaaccggcaagcttacatcatcaagtgcttggaagcagtttactcagatgaaacctgatgcgtcctttttatttggcagcaaactagaaaggaaactagtgggaaatatcttaaaggaaagagggaaaggagatattcatggagataaagatattggatccaaacaaactgagccaatccgaattaaaatatttgaaggagggtacaaatcgaatgaagattatgtatatgtcagaggacgtggccggggaaagtacatttgtgaagaatgtgggattcgctgtaagaagccaagcatgctcaaaaaacacatccgtacccatactgatgttcggccttatgtatgcaagttatgtaactttgccttcaaaacgaaaggaaacctaacgaagcatatgaaatctaaagcacacatgaaaaaatgcctggaattgggagtctcaatgacatcggtggatgatacagaaactgaggaagcagaaaatttggaagatttgcacaaagcagcagagaagcatagcatgtccagcatttcaactgatcatcagttctccgatgctgaggaatcagatggtgaggatggagatgataatgatgatgatgatgaagatgaagatgactttgacgaccagggagatttaacaccaaaaacaagatcaagaagcaccagtcctcagcctcctagattctcctccttgcctgtgaatgttggcgccgtaccccacggggttccttcagatagttccctgggacattcttcgttgatcagctatttggttactttgccaagtattcgagttactcagcttatgacacccagtgattcatgtgaagatacccagatgacagaataccagaggctattccagagcaaaagtacggactcagaaccagacaaagacagattggacatacctagttgtatggatgaggagtgcatgctaccttcagagccaagctcctctcccagggacttctcaccctcaagccaccattcctctccaggatatgattcttcaccctgtcgagataattcaccaaagaggtatctgatacccaaaggagatttatctcccaggagacatttatcacctaggagagatctgtcacccatgagacatctttcaccaagaaaggaagctgcattgagaagagagatgtcccaaagagatgtttcaccaagaaggcatttgtctccaaggaggccagtgtctcctgggaaagatatcacagcaagaagagacctctcccctagaagagagagaagatacatgaccacaataagagcgccatctcccagaagggctttataccataacccaccattgtccatgggacagtatttgcaagcagagccaattgtattggggcctcctaatttaagaagaggattacctcaggttccttacttcagtctctatggagaccaagaaggtgcttatgaacatccaggctccagccttttccctgagggtcctaatgactatgtcttcagtcatcttccactccactctcagcaacaagtgcgagcccctatccccatggtgcccgttggtgggatccagatggttcactccatgccgccagccctttccagtttacatccttcacccacattgcccctgccaatggagggctttgaggagaagaaaggcgcgtcaggggagtccttctccaaggacccctatgtgctttctaagcagcatgagaagcgaggtcctcacgctttgcagtcatctggtccgcctagcactccctcctctcctcggctgttgatgaaacagagcacttcggaagacagcctaaacgcaacagagcgggaacaggaggaaaatatacagacttgtacaaaagccattgcctctctccggattgccacggaagaggcagctctgctcgggccagatcagccagcgcgggtgcaggagccccaccagaaccccctgggaagtgcacatgttagcattagacactttagtagacctgagccaggtcagccctgtacctcagccacccaccctgacttgcatgatggtgaaaaggacaattttggtacatcacagactccattagctcactccacgttttacagcaagagttgtgtggatgacaagcagttggactttcacagcagcaaggaattatcttcaagcacagaggaaagcaaagatccttcatcagaaaagagtcagctacattgatctatgatgcatggagactttcatttccacattttcccatttttttgtttttgtttttctagaaatggaggtaatccagtttatagcatgcctgtcctaagttacagtagtttgctattatatatacttttgttatatcaaaagaattaggtaaattaacaagtcatcatgagcctgaccaaaacaaaatttgaaattaacctattgggtctggtacttttaaaattgtacagatgtttgtgccttttctttactttgcttatattcttataagcattttttagcagtaatttgtacatattttagaatttgtgtatctgctttgtaataaatgtaatttctttccttttttggacacttggatctaaatgatgtaaagcaaaacagcatcaatatatatgtgaggttgcactaaaacatatttttatatgattaaaactgaacagcttttatgtacagctctgattctgtaatactaatatttatttactttgtttcataaattgtacattttttcttaatgttgtggattgcttttctatgtgaagcatgggatttactgttgcgtaactagaacaaaaatgtacattgtaaacaagatatttaaactagagtatcttattctgcacttatgcattagttaaaaaaagataaaggatgtatcagtcagttcttaactcttgtatatttttttgtctcttgtttgctggattgactataacttaagtgctgattgtgattttaaaatgatagtaccgtaaagcattaaagtaaacaatgtgctattgtgagttttttcaaagctttataaatcagttataaataatattaaaagtatttggtcttatgtgaacatgttgatctatatactcatctaaaaatatgggaaaacattccaccccatgtaaatatgtacaagtgcatcactggtacaattttatgtaactcagttggacactaggttgccacagacctatgctaggtgtctttaaaaaattaaggtgacaaagcacatgggactgtgtagagcttggttatcggccggcccggtggcttggcaggcagtgctgtgcgctgctcatggagaagacctgggcttagcaatctccttagttcttgctacacaggatggtgactggaactaaggctacacagagggtcgcacttggactctgagggttgggtgtggaagggggaaaaggggatggagacctgctccccagctcttcctgtcagccggtttacatgggaacagggttaacatctgtgttaggggaggtcaccttaccctttttcataggggaagagtgtcacactcctggctatctcagggggaatggggaaaagaatctttcaagggcaaagaactcgtgggaggatgtctgttgtatgtaatactcacaatggcttttggttagtgttgaaggtgggaagagcatttgtaggtccagaagagtgaaagagagggaggggtgcagcaacatgtgcacaggcacgcacatgtgtgcacgcacacatacaatctgggttatctttgtgctatatagtggattataattctgtgaaaccaagtttgtatattgaattacattaaggagtgttctttaaaaagagaaataaatatacaattacatgcttaaaaaaaaaag

SEQ ID NO: 368422 - DNA, 466 bp, Homo sapiens
aattgggagtctcaatgacatcggtggatgatacagaaactgaggaagcaggtgtgtatgtcataaatgagttgacagacctcttcattatgcacagtggagctctgtggctgaggtagtaaaataagtttagatatttttaaaaagtgatcacttttcattttattaaatactaaatatagaaaataaaactgacacattgaattgcttgaaatctactgagaagaaatgcatttcagttttgactccgagggcaaaaaaggccttactttgaaaatacttatatttagagccttctatgaagggaatagaattgcacttgctttgtgatagcaaattagattttatgaggctttttggggaatttgaaaagcattttaatgtattattattcaagttaagaagaaacccagtaggaaaacaaataaactagcaaacaaacatcattaaggttggccagacctcc

SEQ ID NO: 368423 - DNA, 636 bp, Homo sapiens
ttccggttcccgggcaccacttccggggcagaagtccagtgggccttctgaaagcaaagaatcttcagatgaattagatatcgatgagacggcatcggacatgagcatgagcccacagagttcttcattaccagcaggagatggtcagctggaagaggaagggaagggccacaagcggcctgttggcatgctggtccgcatggcctctgcccccagcgggaacgtggcagactcaactcttcttctcacggacatggcagatttccagcagattcttcagttccccagtctgcggacaacaactactgtgagttggtgcttcttgaattatacaaaacccaattatgtgcaacaggccaccttcaaatcctcggtttatgcttcatggtgcattagttcctgtaatccaaacccatcaggattgaacaccaagaccacgctggctcttctgaggtccaagcaaaaaatcactgcagaaatttatactctggctgctatgcataggcctggaaccggcaagcttacatcatcaagtgcttggaagcagtttactcaggtaacaaatactgttttaggaagaactttgtattgtggatttgattgctgagcagactacatagtgaaggatataaggcc

SEQ ID NO: 368424 - DNA, 9180 bp, Homo sapiens
gacattactagctaatgcccatcgactgtggtgtgcgtgtggaaggttccaaagagaaggagcaatcagcaagtttgcagacaccctggaacatggaagcaaccaagctttaagaagcacagctttggagacactccatgagtctgcactgctttcaggggaactagcacttaagaccttgtgtaacaaaatggacactggggacacagctctaggacaaaaagctacctcaaggtctggagaaactgataaagcatcaggtagatggagacaggaacaatcagctgttattaagatgagcacttttggcagtcatgaaggacagcggcaaccacaaatagagcctgagcaaatcggaaacacagcatcagcacaactgtttggttctgggaaactggcctcccctagtgaagtggtgcagcaagtcgcagagaagcaatatccaccgcatcgtccgagtccttactcatgccaacactcactctctttccctcagcactcattgccacagggggtcatgcacagcaccaagccacatcagagcctcgaaggtcctccgtggcttttccctggccctttgccatccgttgcctctgaggacttatttccttttcctatacatggccacagtggtggttatcctagaaaaaagatttcaagtctgaaccctgcttatagccaatactcccagaaaagtattgaacaggcagaagaggctcacaagaaagagcacaaacccaaaaagcctggcaagtacatttgcccttactgcagcagagcgtgtgccaaacctagtgtactgaaaaaacacatcaggtcccatactggggagcggccatatccatgtataccttgtggtttctctttcaagacaaagagcaatttgtacaagcacaggaagtcacatgcccatgcaattaaggcaggattagtacctttcacagagtcagctgtatctaaattggacctagaggctggttttattgatgtagaagcagaaatacattcagatggtgaacagagtacagacacagatgaggagagttctttatttgccgaggcttctgacaaaatgagtcctggtccacccatcccactggacattgccagcagaggcggctatcatgggtcattggaagaatcattgggaggtccaatgaaggtgccgattttgattatccctaaaagtgggattcctctccctaatgaaagctctcagtatattggccctgatatgctaccaaatccatctttaaatactaaggctgatgattcgcacacagtcaaacagaaacttgcactaagactgtcagagaaaaaaggacaagattctgagccatcgctcaaccttctgagcccgcacagtaaaggaagcactgattctggttacttttctcgctcagaaagtgctgagcagcaaataagccctcccaacacaaatgcaaagtcttatgaagaaatcatctttggaaaatactgtcggcttagtccgagaaatgcactcagtgttacaaccacaagtcaggagcgtgccgcaatgggtaggaagggcataatggaaccattacctcacgttaacaccaggttagatgtcaagatgtttgaagatcctgtttcacagctgatcccaagcaagggagatgtcgaccccagtcaaacgagcatgctgaaatccactaagttcaacagtgagtccagacaaccccagattattccatcatctatcaggaacgaaggaaaactttatccagcaaacttccaaggcagcaacccggttctcttagaagctcctgtagactcttcaccccttattagaagcaactcagtgccaacttcttcagcaactaatctaactattcctccttctttgagaggaagtcactcatttgatgaaaggatgactggttccgacgatgtattctatccagggaccgtgggcataccccctcagcgcatgctaagaagacaagcggcatttgagctgccttcggtacaggagggccacgtggaagtcgagcaccatggcaggatgttgaagggtatcagcagttcatccctgaaggaaaagaaattgtctcctggggacagggttgggtatgactatgatgtctgtcggaaaccctataagaagtgggaggactctgaaacaccaaagcaaaactacagggacatttcctgcttgagttctttaaagcatggtggagaatatttcatggatcccgtggtgccattgcagggagtaccaagcatgtttggaactacctgtgaaaacaggaaacgccggaaagagaagagcgtaggggatgaagaggacacgcccatgatctgcagcagcattgtaagcactcctgtgggcatcatggcttccgattatgaccccaaactgcagatgcaggaaggagtcaggagtggatttgccatggctggacacgaaaacctttctcatggtcacacggaacgctttgacccatgtcggccccaactgcagcctggaagtccatctcttgtgtcagaggagtcaccttcagccattgattcagacaagatgtcagacctagggggcaggaaacctcctggaaatgtgatttctgtgattcagcacaccaactcactgagccgacccaattcatttgaaaggtctgagtcagccgaacttgtggcttgcacacaggataaagccccttccccttcagagacttgtgacagtgagatttcagaagccccagtgagtcctgagtgggctccacctggggatggtgcagaaagtggggggaaaccctctccatctcagcaggtgcagcagcagtcctatcacacacagcccaggctagttcggcaacacaacatccaggttcctgagattcgagtgaccgaggagcctgataaacctgagaaggagaaggaagcccagagcaaagagccagagaagcctgtggaagaatttcagtggccccagagaagtgagaccctttcccagctccccgcggagaagttgccacccaaaaagaagcgtctgcgacttgcagatatggagcactcctcaggggagtccagctttgaatccacaggcacaggcctctcccgcagccccagccaagaaagcaacttgtcccacagctccagtttctccatgtcttttgaaagagaagaaaccagtaagctttctgcacttcctaagcaggatgagtttgggaagcattcagagtttctgactgtccctgctggttcatactcattgtctgtcccaggccatcaccaccagaaagagatgcgacgctgctcatcagagcagatgccttgtcctcacccagcggaagtcccagaagttcggagcaaatcatttgattatgggaatctgtcccatgctcctgtgtcgggagcagcagcctccacggtatcaccgtccagggagaggaagaaatgctttctggtgcggcaagcttccttcagtggctccccagaaatctcccagggcgaggttggcatggatcagagcgtgaagcaagagcagctggagcacctgcatgctggcctccggtccgggtggcaccatggcccgcctgctgtgctgcctcctcttcagcaagaggacccagggaagcaggtggcgggtccttgtcccccgctgagctcggggccactgcacctggcccagccacagatcatgcacatggacagtcaggaatctttgagaaatcccttgatccaaccaacatcctatatgacaagcaagcacttacctgaacagccacacttatttccacatcaagagacaattccattttctccaatccagaatgccttgtttcagtttcagtatcctacagtttgtatggttcatttaccagctcagcagcctccctggtggcaggcacatttcccacatccctttgctcagcaccctcagaagagctatggcaagccctcttttcagacagaaatccattcgagctatcccttagagcatgtggcagagcacactggaaagaaacctgctgagtatgcacacacgaaagagcagacctacccatgttattcaggagcatcagggctacacccaaagaaccttcttccaaagtttccatcagaccagagcagtaagtcaactgaaacgccctctgagcaggttcttcaagaagattttgcctcggcaaatgctgggtctttgcagtccctcccaggaacagtggttcctgttcggatccagacgcacgtaccatcctatggaagtgtcatgtacacaagcatttctcagatacttgggcagaatagccctgccattgtcatatgcaaagtcgatgagaatatgacccaaaggacactggtcaccaacgcagccatgcaagggataggattcaacattgcccaggtgctggggcagcatgcgggcttggagaagtaccccatttggaaagcacctcagactttgcccctcggcttagaatcctccatccccttgtgtttaccttccacctctgacagcgtggccaccctgggaggtagcaagcgaatgctttctccagccagtagcttggagctcttcatggaaaccaagcagcagaaaagggtcaaagaagaaaagatgtacggacagattgtggaggagcttagtgctgtggagctgaccaactcagacatcaaaaaggacctctcccgcccccagaaaccccagctggttcgacaaggatgtgcttctgagccaaaagatggcttgcagtcagggtcatcttccttctcctcgctgtcgccctcctcatctcaagactatccttctgttagcccgtcttccagggagccattcccgcccagcaaggagatgctttccggttcccgggcaccacttccggggcagaagtccagtgggccttctgaaagcaaagaatcttcagatgaattagatatcgatgagacggcatcggacatgagcatgagcccacagagttcttcattaccagcaggagatggtcagctggaagaggaagggaagggccacaagcggcctgttggcatgctggtccgcatggcctctgcccccagcgggaacgtggcagactcaactcttcttctcacggacatggcagatttccagcagattcttcagttccccagtctgcggacaacaactactgtgagttggtgcttcttgaattatacaaaacccaattatgtgcaacaggccaccttcaaatcctcggtttatgcttcatggtgcattagttcctgtaatccaaacccatcaggattgaacaccaagaccacgctggctcttctgaggtccaagcaaaaaatcactgcagaaatttatactctggctgctatgcataggcctggaaccggcaagcttacatcatcaagtgcttggaagcagtttactcagatgaaacctgatgcgtcctttttatttggcagcaaactagaaaggaaactagtgggaaatatcttaaaggaaagagggaaaggagatattcatggagataaagatattggatccaaacaaactgagccaatccgaattaaaatatttgaaggagggtacaaatcgaatgaagattatgtatatgtcagaggacgtggccggggaaagtacatttgtgaagaatgtgggattcgctgtaagaagccaagcatgctcaaaaaacacatccgtacccatactgatgttcggccttatgtatgcaagttatgtaactttgccttcaaaacgaaaggaaacctaacgaagcatatgaaatctaaagcacacatgaaaaaatgcctggaattgggagtctcaatgacatcggtggatgatacagaaactgaggaagcagaaaatttggaagatttgcacaaagcagcagagaagcatagcatgtccagcatttcaactgatcatcagttctccgatgctgaggaatcagatggtgaggatggagatgataatgatgatgatgatgaagatgaagatgactttgacgaccagggagatttaacaccaaaaacaagatcaagaagcaccagtcctcagcctcctagattctcctccttgcctgtgaatgttggcgccgtaccccacggggttccttcagatagttccctgggacattcttcgttgatcagctatttggttactttgccaagtattcgagttactcagcttatgacacccagtgattcatgtgaagatacccagatgacagaataccagaggctattccagagcaaaagtacggactcagaaccagacaaagacagattggacatacctagttgtatggatgaggagtgcatgctaccttcagagccaagctcctctcccagggacttctcaccctcaagccaccattcctctccaggatatgattcttcaccctgtcgagataattcaccaaagaggtatctgatacccaaaggagatttatctcccaggagacatttatcacctaggagagatctgtcacccatgagacatctttcaccaagaaaggaagctgcattgagaagagagatgtcccaaagagatgtttcaccaagaaggcatttgtctccaaggaggccagtgtctcctgggaaagatatcacagcaagaagagacctctcccctagaagagagagaagatacatgaccacaataagagcgccatctcccagaagggctttataccataacccaccattgtccatgggacagtatttgcaagcagagccaattgtattggggcctcctaatttaagaagaggattacctcaggttccttacttcagtctctatggagaccaagaaggtgcttatgaacatccaggctccagccttttccctgagggtcctaatgactatgtcttcagtcatcttccactccactctcagcaacaagtgcgagcccctatccccatggtgcccgttggtgggatccagatggttcactccatgccgccagccctttccagtttacatccttcacccacattgcccctgccaatggagggctttgaggagaagaaaggcgcgtcaggggagtccttctccaaggacccctatgtgctttctaagcagcatgagaagcgaggtcctcacgctttgcagtcatctggtccgcctagcactccctcctctcctcggctgttgatgaaacagagcacttcggaagacagcctaaacgcaacagagcgggaacaggaggaaaatatacagacttgtacaaaagccattgcctctctccggattgccacggaagaggcagctctgctcgggccagatcagccagcgcgggtgcaggagccccaccagaaccccctgggaagtgcacatgttagcattagacactttagtagacctgagccaggtcagccctgtacctcagccacccaccctgacttgcatgatggtgaaaaggacaattttggtacatcacagactccattagctcactccacgttttacagcaagagttgtgtggatgacaagcagttggactttcacagcagcaaggaattatcttcaagcacagaggaaagcaaagatccttcatcagaaaagagtcagctacattgatctatgatgcatggagactttcatttccacattttcccatttttttgtttttgtttttctagaaatggaggtaatccagtttatagcatgcctgtcctaagttacagtagtttgctattatatatacttttgttatatcaaaagaattaggtaaattaacaagtcatcatgagcctgaccaaaacaaaatttgaaattaacctattgggtctggtacttttaaaattgtacagatgtttgtgccttttctttactttgcttatattcttataagcattttttagcagtaatttgtacatattttagaatttgtgtatctgctttgtaataaatgtaatttctttccttttttggacacttggatctaaatgatgtaaagcaaaacagcatcaatatatatgtgaggttgcactaaaacatatttttatatgattaaaactgaacagcttttatgtacagctctgattctgtaatactaatatttatttactttgtttcataaattgtacattttttcttaatgttgtggattgcttttctatgtgaagcatgggatttactgttgcgtaactagaacaaaaatgtacattgtaaacaagatatttaaactagagtatcttattctgcacttatgcattagttaaaaaaagataaaggatgtatcagtcagttcttaactcttgtatatttttttgtctcttgtttgctggattgactataacttaagtgctgattgtgattttaaaatgatagtaccgtaaagcattaaagtaaacaatgtgctattgtgagttttttcaaagctttataaatcagttataaataatattaaaagtatttggtcttatgtgaacatgttgatctatatactcatctaaaaatatgggaaaacattccaccccatgtaaatatgtacaagtgcatcactggtacaattttatgtaactcagttggacactaggttgccacagacctatgctaggtgtctttaaaaaattaaggtgacaaagcacatgggactgtgtagagcttggttatcggccggcccggtggcttggcaggcagtgctgtgcgctgctcatggagaagacctgggcttagcaatctccttagttcttgctacacaggatggtgactggaactaaggctacacagagggtcgcacttggactctgagggttgggtgtggaagggggaaaaggggatggagacctgctccccagctcttcctgtcagccggtttacatgggaacagggttaacatctgtgttaggggaggtcaccttaccctttttcataggggaagagtgtcacactcctggctatctcagggggaatggggaaaagaatctttcaagggcaaagaactcgtgggaggatgtctgttgtatgtaatactcacaatggcttttggttagtgttgaaggtgggaagagcatttgtaggtccagaagagtgaaagagagggaggggtgcagcaacatgtgcacaggcacgcacatgtgtgcacgcacacatacaatctgggttatctttgtgctatatagtggattataattctgtgaaaccaagtttgtatattgaattacattaaggagtgttctttaaaaagagaaataaatatacaattacatgcttaaaaaaaaaag

SEQ ID NO: 368425 - DNA, 5641 bp, Homo sapiens
gacattactagctaatgcccatcgactgtggtgtgcgtgtggaaggttccaaagagaaggagcaatcagcaagtttgcagacaccctggaacatggaagcaaccaagctttaagaagcacagctttggagacactccatgagtctgcactgctttcaggggaactagcacttaagaccttgtgtaacaaaatggacactggggacacagctctaggacaaaaagctacctcaaggtctggagaaactgataaagcatcaggtagatggagacaggaacaatcagctgttattaagatgagcacttttggcagtcatgaaggacagcggcaaccacaaatagagcctgagcaaatcggaaacacagcatcagcacaactgtttggttctgggaaactggcctcccctagtgaagtggtgcagcaagtcgcagagaagcaatatccaccgcatcgtccgagtccttactcatgccaacactcactctctttccctcagcactcattgccacagggggtcatgcacagcaccaagccacatcagagcctcgaaggtcctccgtggcttttccctggccctttgccatccgttgcctctgaggacttatttccttttcctatacatggccacagtggtggttatcctagaaaaaagatttcaagtctgaaccctgcttatagccaatactcccagaaaagtattgaacaggcagaagaggctcacaagaaagagcacaaacccaaaaagcctggcaagtacatttgcccttactgcagcagagcgtgtgccaaacctagtgtactgaaaaaacacatcaggtcccatactggggagcggccatatccatgtataccttgtggtttctctttcaagacaaagagcaatttgtacaagcacaggaagtcacatgcccatgcaattaaggcaggattagtacctttcacagagtcagctgtatctaaattggacctagaggctggttttattgatgtagaagcagaaatacattcagatggtgaacagagtacagacacagatgaggagagttctttatttgccgaggcttctgacaaaatgagtcctggtccacccatcccactggacattgccagcagaggcggctatcatgggtcattggaagaatcattgggaggtccaatgaaggtgccgattttgattatccctaaaagtgggattcctctccctaatgaaagctctcagtatattggccctgatatgctaccaaatccatctttaaatactaaggctgatgattcgcacacagtcaaacagaaacttgcactaagactgtcagagaaaaaaggacaagattctgagccatcgctcaaccttctgagcccgcacagtaaaggaagcactgattctggttacttttctcgctcagaaagtgctgagcagcaaataagccctcccaacacaaatgcaaagtcttatgaagaaatcatctttggaaaatactgtcggcttagtccgagaaatgcactcagtgttacaaccacaagtcaggagcgtgccgcaatgggtaggaagggcataatggaaccattacctcacgttaacaccaggttagatgtcaagatgtttgaagatcctgtttcacagctgatcccaagcaagggagatgtcgaccccagtcaaacgagcatgctgaaatccactaagttcaacagtgagtccagacaaccccagattattccatcatctatcaggaacgaaggaaaactttatccagcaaacttccaaggcagcaacccggttctcttagaagctcctgtagactcttcaccccttattagaagcaactcagtgccaacttcttcagcaactaatctaactattcctccttctttgagaggaagtcactcatttgatgaaaggatgactggttccgacgatgtattctatccagggaccgtgggcataccccctcagcgcatgctaagaagacaagcggcatttgagctgccttcggtacaggagggccacgtggaagtcgagcaccatggcaggatgttgaagggtatcagcagttcatccctgaaggaaaagaaattgtctcctggggacagggttgggtatgactatgatgtctgtcggaaaccctataagaagtgggaggactctgaaacaccaaagcaaaactacagggacatttcctgcttgagttctttaaagcatggtggagaatatttcatggatcccgtggtgccattgcagggagtaccaagcatgtttggaactacctgtgaaaacaggaaacgccggaaagagaagagcgtaggggatgaagaggacacgcccatgatctgcagcagcattgtaagcactcctgtgggcatcatggcttccgattatgaccccaaactgcagatgcaggaaggagtcaggagtggatttgccatggctggacacgaaaacctttctcatggtcacacggaacgctttgacccatgtcggccccaactgcagcctggaagtccatctcttgtgtcagaggagtcaccttcagccattgattcagacaagatgtcagacctagggggcaggaaacctcctggaaatgtgatttctgtgattcagcacaccaactcactgagccgacccaattcatttgaaaggtctgagtcagccgaacttgtggcttgcacacaggataaagccccttccccttcagagacttgtgacagtgagatttcagaagccccagtgagtcctgagtgggctccacctggggatggtgcagaaagtggggggaaaccctctccatctcagcaggtgcagcagcagtcctatcacacacagcccaggctagttcggcaacacaacatccaggttcctgagattcgagtgaccgaggagcctgataaacctgagaaggagaaggaagcccagagcaaagagccagagaagcctgtggaagaatttcagtggccccagagaagtgagaccctttcccagctccccgcggagaagttgccacccaaaaagaagcgtctgcgacttgcagatatggagcactcctcaggggagtccagctttgaatccacaggcacaggcctctcccgcagccccagccaagaaagcaacttgtcccacagctccagtttctccatgtcttttgaaagagaagaaaccagtaagctttctgcacttcctaagcaggatgagtttgggaagcattcagagtttctgactgtccctgctggttcatactcattgtctgtcccaggccatcaccaccagaaagagatgcgacgctgctcatcagagcagatgccttgtcctcacccagcggaagtcccagaagttcggagcaaatcatttgattatgggaatctgtcccatgctcctgtgtcgggagcagcagcctccacggtatcaccgtccagggagaggaagaaatgctttctggtgcggcaagcttccttcagtggctccccagaaatctcccagggcgaggttggcatggatcagagcgtgaagcaagagcagctggagcacctgcatgctggcctccggtccgggtggcaccatggcccgcctgctgtgctgcctcctcttcagcaagaggacccagggaagcaggtggcgggtccttgtcccccgctgagctcggggccactgcacctggcccagccacagatcatgcacatggacagtcaggaatctttgagaaatcccttgatccaaccaacatcctatatgacaagcaagcacttacctgaacagccacacttatttccacatcaagagacaattccattttctccaatccagaatgccttgtttcagtttcagtatcctacagtttgtatggttcatttaccagctcagcagcctccctggtggcaggcacatttcccacatccctttgctcagcaccctcagaagagctatggcaagccctcttttcagacagaaatccattcgagctatcccttagagcatgtggcagagcacactggaaagaaacctgctgagtatgcacacacgaaagagcagacctacccatgttattcaggagcatcagggctacacccaaagaaccttcttccaaagtttccatcagaccagagcagtaagtcaactgaaacgccctctgagcaggttcttcaagaagattttgcctcggcaaatgctgggtctttgcagtccctcccaggaacagtggttcctgttcggatccagacgcacgtaccatcctatggaagtgtcatgtacacaagcatttctcagatacttgggcagaatagccctgccattgtcatatgcaaagtcgatgagaatatgacccaaaggacactggtcaccaacgcagccatgcaagggataggattcaacattgcccaggtgctggggcagcatgcgggcttggagaagtaccccatttggaaagcacctcagactttgcccctcggcttagaatcctccatccccttgtgtttaccttccacctctgacagcgtggccaccctgggaggtagcaagcgaatgctttctccagccagtagcttggagctcttcatggaaaccaagcagcagaaaagggtcaaagaagaaaagatgtacggacagattgtggaggagcttagtgctgtggagctgaccaactcagacatcaaaaaggacctctcccgcccccagaaaccccagctggttcgacaaggatgtgcttctgagccaaaagatggcttgcagtcagggtcatcttccttctcctcgctgtcgccctcctcatctcaagactatccttctgttagcccgtcttccagggagccattcccgcccagcaaggagatgctttccggttcccgggcaccacttccggggcagaagtccagtgggccttctgaaagcaaagaatcttcagatgaattagatatcgatgagacggcatcggacatgagcatgagcccacagagttcttcattaccagcaggagatggtcagctggaagaggaagggaagggccacaagcggcctgttggcatgctggtccgcatggcctctgcccccagcgggaacgtggcagactcaactcttcttctcacggacatggcagatttccagcagattcttcagttccccagtctgcggacaacaactactgtgagttggtgcttcttgaattatacaaaacccaattatgtgcaacaggccaccttcaaatcctcggtttatgcttcatggtgcattagttcctgtaatccaaacccatcaggattgaacaccaagaccacgctggctcttctgaggtccaagcaaaaaatcactgcagaaatttatactctggctgctatgcataggcctggaaccggcaagcttacatcatcaagtgcttggaagcagtttactcagatgaaacctgatgcgtcctttttatttggcagcaaactagaaaggaaactagtgggaaatatcttaaaggaaagagggaaaggagatattcatggagataaagatattggatccaaacaaactgagccaatccgaattaaaatatttgaaggagggtacaaatctaatttatctcactgagggcctttgagaaaaacgcttcaaggccaggctcagtggctcagccaatataatcccagtactgtgagaaggggatctctagac

SEQ ID NO: 368426 - DNA, 466 bp, Homo sapiens
  misc_feature (20)..(20): n is a, c, g, or t
  misc_feature (35)..(35): n is a, c, g, or t
  misc_feature (97)..(97): n is a, c, g, or t
  misc_feature (106)..(106): n is a, c, g, or t
  misc_feature (108)..(108): n is a, c, g, or t
  misc_feature (112)..(112): n is a, c, g, or t
  misc_feature (131)..(131): n is a, c, g, or t
  misc_feature (135)..(135): n is a, c, g, or t
  misc_feature (139)..(139): n is a, c, g, or t
ggtcaagtatgaacacaagntcaccctcccagagnccccagcaggaggaagagaaaccaaagacttctgaaacgactcccccaaaaaaaaggggaanaaacccacngncaanaagggcccgctgttgtgtnaaanaaancccccacaaaaaagaagtcaatagaacgcatgcctgctttgccctccaggacgagatcctccaacggctgttgttcagtgaaatgaagatgaaggtcctagaaaatcagatgttcatcatatggaataaaatgaatcaccacgggcggtcaagcagacatcggaattttcccatgaaaaaacacagaatgaggaggcatgagtcaatttgccccaccctgtctgactgtacttcgagttcccccagctaatgaggccgaggcgggctggcctctgccgatgttaccttttacctcagtaaaacccagtcacagcctaaaaaaaaaaa

SEQ ID NO: 368427 - DNA, 395 bp, Homo sapiens
atgagctataagccagccttgtttgggttcctattccttctgctgttgcttagcaactggttggtcaagtatgaacacaagctcaccctcccagagccccagcaggtgagcacaagatggggcttggcttcagctcagggataggggatatttgcagctagattaggtgggtagggaacagggtaggtgtcgaaataatggggcaagactggggaatccaagactggtctaaaccaccactctacagcttcctcttaggtggtgctgggtaaatcacttccctccacgaggcctcagttgcctcacctcagctgttaaatcaggaccaccccagactctcctatttcatgtttgatgtcaacatgctttggcaagagtaacaactactttaatgt

SEQ ID NO: 368428 - DNA, 519 bp, Homo sapiens
ctccgcaggcaccataggagcagtggcagcttggctgatgagctataagccagccttgtttgggttcctattccttctgctgttgcttagcaactggttggtcaagtatgaacacaagctcaccctcccagagccccagcaggaggaagagaaaccaaagacttctgaaaacgactccaagaacagcaaggccgtgaacacaaaagaagtcaatagaacgcatgcctgctttgccctccaggacgagatcctccaacggctgttgttcagtgaaatgaagatgaaggtcctagaaaatcagatgttcatcatatggaataaaatgaatcaccacgggcggtcaagcagacatcggaattttcccatgaaaaaacacagaatgaggaggcatgagtcaatttgccccaccctgtctgactgtacttcgagttcccccagctaatgaggccgaggcgggctggcctctgccgatgttaccttttacctcagtaaaacccagtcacagcctaaaaaaaaaaa

SEQ ID NO: 368429 - DNA, 1883 bp, Homo sapiens
ggcgcagcggggcggacggcggcggcgccgcgggggcgggcgccggtaggggccggacagggtagggcccggagggcggtggcggcggagcgggcggcatgggtcctggccgccggcttcgctgagacgcgctcgcgtgggctgccctcccgggcccgcagtggtcgcggcggcatgaagggcgctctggggagtcccgtggctgccgctggcgccgcgatgcaggagagtttcggctgcgtggtggccaaccgcttccatcagctgctggacgacgagtcggacccgttcgacatcctgcgcgaggccgagcgccggcgccagcagcagctgcagcgcaagaggcgcgacgaggcggcggcggcggccggggccggtccccgcggcggcaggagcccagccggggcctcgggccacagagccggcgcgggcggccggagggagtcgcagaaggagcgcaagagcctcccggcgcccgtcgctcagcggcccgatagccccgggggcggcctgcaggcgccgggccagaagcggactcctagaagaggggagcagcaaggatggaatgacagccgtgggccggaggggatgctcgaaagagctgagcggagatcctacagggaataccgaccctatgagacagagaggcaggcagacttcacagctgagaagtttccagatgaaaaaccaggtgataggtttgatcgagacagaccgttgagaggacgtggaggcccgagagggggtatgcgcggcagaggcagaggtggccctgggaacagagtttttgacgcttttgaccagagaggaaagcgagaatttgaaagatatggtgggaatgacaaaatagcagtcagaactgaagacaacatgggtggatgtggagttcgaacctggggatcgggtaaagataccagtgatgtggagccaactgcaccgatggaggaacccacagtggtggaggagtcccagggcaccccggaagaggagtctccagccaaagttcctgagttggaggtagaagaagaaacccaagttcaagagatgactttagatgagtggaaaaatcttcaagaacagaccagaccaaagcctgagtttaacatccggaaaccagaatccactgttccttccaaagccgtggtgattcacaagtcaaaatacagagatgatatggtaaaagatgactatgaggacgattcccatgttttccggaaacccgccaatgacatcacatcccagctggagattaattttggtaacctccctcgtcctgggcgtggagccagaggaggcacccggggaggccggggaaggatcaggagggcagagaactatggacccagagcagaagtggtgatgcaagatgttgcccccaacccagatgacccggaagatttccctgcgctgtcttgaaagagccctgtttcccagcaccgcggagctgcactgcacacctgtggggagacttttccagctgggccaagggagtcagactctaagaacaatagatgttgcttttcccgtgtcatgtaaatttgttgcacttttttgggctgagctgttagaggggcttctccagaggctcgagagcaggccatttcccaagaagatgaagaatggtgactgtgtttttattgaaggaatttcaaatgaagaataatgtttaaaatgtgtatatagagatagtatagactcctccgcggaagcatggagggaaaggaggttgtaaaatagactccatggagactcttaggaagcagtagattcccgggggctgtgcctttagcgttagaggaaacacatagagctggaactgttaatggaaagcagtcacagctgagttttcggagaccaagaaattaaaatacaattgcacttac

SEQ ID NO: 368430 - DNA, 2251 bp, Homo sapiens
  misc_feature (1478)..(1478): n is a, c, g, or t
  misc_feature (1525)..(1525): n is a, c, g, or t
ggcgcagcggggcggacggcggcggcgccgcgggggcgggcgccggtaggggccggacagggccagaagcggactcctagaagaggggagcagcaaggatggaatgacagccgtgggccggaggggatgctcgaaagagctgagcggagatcctacagggaataccgaccctatgagacagagaggcaggcagacttcacagctgagaagtttccagatgaaaaaccaggtgataggtttgatcgagacagaccgttgagaggacgtggaggcccgagagggggtatgcgcggcagaggcagaggtggccctgggaacagagtttttgacgcttttgaccagagaggaaagcgagaatttgaaagatatggtgggaatgacaaaatagcagtcagaactgaagacaacatgggtggatgtggagttcgaacctggggatcgggtaaagataccagtgatgtggagccaactgcaccgatggaggaacccacagtggtggaggagtcccagggcaccccggaagaggagtctccagccaaagttcctgagttggaggtagaagaagaaacccaagttcaagagatgactttagatgagtggaaaaatcttcaagaacagaccagaccaaagcctgagtttaacatccggaaaccagaatccactgttccttccaaagccgtggtgattcacaagtcaaaatacagagatgatatggtaaaagatgactatgaggacgattcccatgttttccggaaacccgccaatgacatcacatcccagctggagattaattttggtaacctccctcgtcctgggcgtggagccagaggaggcacccggggaggccggggaaggatcaggagggcagagaactatggacccagagcagaagtggtgatgcaagatgttgcccccaacccagatgacccggaagatttccctgcgctgtcttgaaagagccctgtttcccagcaccgcggagctgcactgcacacctgtggggagacttttccagctgggccaagggagtcagactctaagaacaatagatgttgcttttcccgtgtcatgtaaatttgttgcacttttttgggctgagctgttagaggggcttctccagaggctcgagagcaggccatttcccaagaagatgaagaatggtgactgtgtttttattgaaggaatttcaaatgaagaataatgtttaaaatgtgtatatagagatagtatagactcctccgcggaagcatggagggaaaggaggttgtaaaatagactccatggagactcttaggaagcagtagattcccgggggctgtgcctttagcgttagaggaaacacatagagctggaactgttaatggaaagcagtcacagctgagttttcggagaccaagaaattaaaatacaattgcacttactgtttacttgtaaatgttatcttctctcctggaatattttgagttctggttttcacntaaccaatcatttaaaaatcgctattgtgtagccactggccaccacnctgtgacacagaatcagagaaagcgttgatttttaatggtgatttaaactacctcgtggtttctgtgtgtgtgcacacacacatctagtgtttgggtggtttttaggaagaatattaagtatgtgacttcaaaaaccatgttatttaacctgccaatcaaatggaaagggatcatggcaaaagcaaataccgcatccttttcttccgcagaactagagtcagagttcggcagctgcgtacaaaggcctctgccctcggcttgagcaaaagttgtaaataactagtatttattaagcacttataagcagtttttctcacttagtcctggctccagttctagagttcctctttattgcttttggtgaaagtttggggttgggggtacacctcagaggttcagtaattcacctggagtcccaccctgaacagagctggacccagagccacacacgcccgggaacacacactgtgctggggaggaagtgggcctaggagggcctgcaggtccaggcagctgtagagctgctagaagctggggtgttgctctccccgctttctcatagacacagaggtactgtctgcctgttgtcacacagttcatatgctcgcttgagatggaatctgaaccttggtcccaggatctgtgctttttcccactttgccacactgtctaaggtggctttgaactggaacccaagtgcaaataaaggttggtattcgctcctg

SEQ ID NO: 368431 - DNA, 1216 bp, Homo sapiens
ggcgcagcggggcggacggcggcggcgccgcgggggcgggcgccggtaggggccggacagggtagggcccggagggcggtggcggcggagcgggcggcatgggtcctggccgccggcttcgctgagacgcgctcgcgtgggctgccctcccgggcccgcagtggtcgcggcggcatgaagggcgctctggggagtcccgtggctgccgctggcgccgcgatgcaggagagtttcggctgcgtggtggccaaccgcttccatcagctgctggacgacgagtcggacccgttcgacatcctgcgcgaggccgagcgccggcgccagcagcagctgcagcgcaagaggcgcgacgaggcggcggcggcggccggggccggtccccgcggcggcaggagcccagccggggcctcgggccacagagccggcgcgggcggccggagggagtcgcagaaggagcgcaagagcctcccggcgcccgtcgctcagcggcccgatagccccgggggcggcctgcaggcgccgggccagaagcggactcctagaagaggggagcagcaaggatggaatgacagccgtgggccggaggggatgctcgaaagagctgagcggagatcctacagggaataccgaccctatgagacagagaggcaggcagacttcacagctgagaagtttccagatgaaaaaccaggtgataggtttgatcgagacagaccgttgagaggacgtggaggcccgagagggggtatgcgcggcagaggcagaggtggccctgggaacagagtttttgacgcttttgaccagagaggaaagcgagaatttgaaagatatggtgggaatgacaaaatgtaagtttctttgtaaatgctattttcactttaagatggtgtcagcacgtggtatgaatctattatgtgttaatatttagttaactttatagtactgtgctgttattcttgtgagaagctgatcctgggacttttatgaaccactctttctgatttggagattgactggagactagcttctggtttaagggactattctttctttccgtagagcagtcagaactgaagacaacatgggtggatgtggagttcgaacctggggatcgggtaaagataccaggtacggtgtaagtgtgtgccctctgagaacctgcaattaagtggaaatctctggatctttgcttttcttgaaaatgatgtctaatagg

SEQ ID NO: 368432 - DNA, 1839 bp, Homo sapiens
  misc_feature (1066)..(1066): n is a, c, g, or t
  misc_feature (1113)..(1113): n is a, c, g, or t
gttggggcatttggacggtgttgtagcatcatggacatcttgcctagagaccgttctgtagccctggcttccagggtctgctgtgaaggcactcccgggatcagagagaaactcactgtcacccgcattagacaagatccccaggcttgggattgaactggagcacctgacgttttgcttactgtggcctgattgtgtgccttgggctcaggtgatgctgtcagagtggacagaatcctccctaagatctcaagccctttgtgaggggaccttcctcaacccctccccggctcacctgcctcacaccgtcctcagccaaggctgcctgattctagctctcaacacagcacgctccttacccctggcctctgcctgctggcctccattcatccttccagcctcacttcctcacaggtttctttgatcacatctcctagaccgatcaaggtctcggagcaaaggagtttcttttcattgaagcctgatctccgtgtgcggctgtattctcactggtgtggctatcggtcagcggctgcttttgctcattaccggtttacgcagtgccacgcagtgcctggcatgtagtaggtgcttcctaatgtggtatggacacttattcattggaaatcagccccgaggccccatggcacagaccccttctctgtggctggtcttggcaatgctcctctgttagaggggcttctccagaggctcgagagcaggccatttcccaagaagatgaagaatggtgactgtgtttttattgaaggaatttcaaatgaagaataatgtttaaaatgtgtatatagagatagtatagactcctccgcggaagcatggagggaaaggaggttgtaaaatagactccatggagactcttaggaagcagtagattcccgggggctgtgcctttagcgttagaggaaacacatagagctggaactgttaatggaaagcagtcacagctgagttttcggagaccaagaaattaaaatacaattgcacttactgtttacttgtaaatgttatcttctctcctggaatattttgagttctggttttcacntaaccaatcatttaaaaatcgctattgtgtagccactggccaccacnctgtgacacagaatcagagaaagcgttgatttttaatggtgatttaaactacctcgtggtttctgtgtgtgtgcacacacacatctagtgtttgggtggtttttaggaagaatattaagtatgtgacttcaaaaaccatgttatttaacctgccaatcaaatggaaagggatcatggcaaaagcaaataccgcatccttttcttccgcagaactagagtcagagttcggcagctgcgtacaaaggcctctgccctcggcttgagcaaaagttgtaaataactagtatttattaagcacttataagcagtttttctcacttagtcctggctccagttctagagttcctctttattgcttttggtgaaagtttggggttgggggtacacctcagaggttcagtaattcacctggagtcccaccctgaacagagctggacccagagccacacacgcccgggaacacacactgtgctggggaggaagtgggcctaggagggcctgcaggtccaggcagctgtagagctgctagaagctggggtgttgctctccccgctttctcatagacacagaggtactgtctgcctgttgtcacacagttcatatgctcgcttgagatggaatctgaaccttggtcccaggatctgtgctttttcccactttgccacactgtctaaggtggctttgaactggaacccaagtgcaaataaaggttggtattcgctcctg

SEQ ID NO: 368433 - DNA, 527 bp, Homo sapiens
ttagacctttaatttaccagtttttattatatccactccttcctagaccaggtgataggtttgatcgagacagaccgttgagaggacgtggaggcccgagagggggtatgcgcggcagaggcagaggtggccctgggaacagagtttttgacgcttttgaccagagaggaaagcgagaatttgaaagatatggtgggaatgacaaaatgtaagtttctttgtaaatgctattttcactttaagatggtgtcagcacgtggtatgaatctattatgtgttaatatttagttaactttatagtactgtgctgttattcttgtgagaagctgatcctgggacttttatgaaccactctttctgatttggagattgactggagactagcttctggtttaagggactattctttctttccgtagagcagtcagaactgaagacaacatgggtggatgtggagttcgaacctggggatcgggtaaagataccaggtacggtgtaagtgtgtgccctctgagaacctgcaatta

SEQ ID NO: 368434 - DNA, 2713 bp, Homo sapiens
  misc_feature (1940)..(1940): n is a, c, g, or t
  misc_feature (1987)..(1987): n is a, c, g, or t
ggcgcagcggggcggacggcggcggcgccgcgggggcgggcgccggtaggggccggacagggtagggcccggagggcggtggcggcggagcgggcggcatgggtcctggccgccggcttcgctgagacgcgctcgcgtgggctgccctcccgggcccgcagtggtcgcggcggcatgaagggcgctctggggagtcccgtggctgccgctggcgccgcgatgcaggagagtttcggctgcgtggtggccaaccgcttccatcagctgctggacgacgagtcggacccgttcgacatcctgcgcgaggccgagcgccggcgccagcagcagctgcagcgcaagaggcgcgacgaggcggcggcggcggccggggccggtccccgcggcggcaggagcccagccggggcctcgggccacagagccggcgcgggcggccggagggagtcgcagaaggagcgcaagagcctcccggcgcccgtcgctcagcggcccgatagccccgggggcggcctgcaggcgccgggccagaagcggactcctagaagaggggagcagcaaggatggaatgacagccgtgggccggaggggatgctcgaaagagctgagcggagatcctacagggaataccgaccctatgagacagagaggcaggcagacttcacagctgagaagtttccagatgaaaaaccaggtgataggtttgatcgagacagaccgttgagaggacgtggaggcccgagagggggtatgcgcggcagaggcagaggtggccctgggaacagagtttttgacgcttttgaccagagaggaaagcgagaatttgaaagatatggtgggaatgacaaaatagcagtcagaactgaagacaacatgggtggatgtggagttcgaacctggggatcgggtaaagataccagtgatgtggagccaactgcaccgatggaggaacccacagtggtggaggagtcccagggcaccccggaagaggagtctccagccaaagttcctgagttggaggtagaagaagaaacccaagttcaagagatgactttagatgagtggaaaaatcttcaagaacagaccagaccaaagcctgagtttaacatccggaaaccagaatccactgttccttccaaagccgtggtgattcacaagtcaaaatacagagatgatatggtaaaagatgactatgaggacgattcccatgttttccggaaacccgccaatgacatcacatcccagctggagattaattttggtaacctccctcgtcctgggcgtggagccagaggaggcacccggggaggccggggaaggatcaggagggcagagaactatggacccagagcagaagtggtgatgcaagatgttgcccccaacccagatgacccggaagatttccctgcgctgtcttgaaagagccctgtttcccagcaccgcggagctgcactgcacacctgtggggagacttttccagctgggccaagggagtcagactctaagaacaatagatgttgcttttcccgtgtcatgtaaatttgttgcacttttttgggctgagctgttagaggggcttctccagaggctcgagagcaggccatttcccaagaagatgaagaatggtgactgtgtttttattgaaggaatttcaaatgaagaataatgtttaaaatgtgtatatagagatagtatagactcctccgcggaagcatggagggaaaggaggttgtaaaatagactccatggagactcttaggaagcagtagattcccgggggctgtgcctttagcgttagaggaaacacatagagctggaactgttaatggaaagcagtcacagctgagttttcggagaccaagaaattaaaatacaattgcacttactgtttacttgtaaatgttatcttctctcctggaatattttgagttctggttttcacntaaccaatcatttaaaaatcgctattgtgtagccactggccaccacnctgtgacacagaatcagagaaagcgttgatttttaatggtgatttaaactacctcgtggtttctgtgtgtgtgcacacacacatctagtgtttgggtggtttttaggaagaatattaagtatgtgacttcaaaaaccatgttatttaacctgccaatcaaatggaaagggatcatggcaaaagcaaataccgcatccttttcttccgcagaactagagtcagagttcggcagctgcgtacaaaggcctctgccctcggcttgagcaaaagttgtaaataactagtatttattaagcacttataagcagtttttctcacttagtcctggctccagttctagagttcctctttattgcttttggtgaaagtttggggttgggggtacacctcagaggttcagtaattcacctggagtcccaccctgaacagagctggacccagagccacacacgcccgggaacacacactgtgctggggaggaagtgggcctaggagggcctgcaggtccaggcagctgtagagctgctagaagctggggtgttgctctccccgctttctcatagacacagaggtactgtctgcctgttgtcacacagttcatatgctcgcttgagatggaatctgaaccttggtcccaggatctgtgctttttcccactttgccacactgtctaaggtggctttgaactggaacccaagtgcaaataaaggttggtattcgctcctg

SEQ ID NO: 368435 - DNA, 2259 bp, Homo sapiens
  misc_feature (1486)..(1486): n is a, c, g, or t
  misc_feature (1533)..(1533): n is a, c, g, or t
tgcaacgatggaggcacccacagtggtggaggagtcccagtgcaccccggaagaggagtctccagccaagccagaagcggactcctagaagaggggagcagcaaggatggaatgacagccgtgggccggaggggatgctcgaaagagctgagcggagatcctacagggaataccgaccctatgagacagagaggcaggcagacttcacagctgagaagtttccagatgaaaaaccaggtgataggtttgatcgagacagaccgttgagaggacgtggaggcccgagagggggtatgcgcggcagaggcagaggtggccctgggaacagagtttttgacgcttttgaccagagaggaaagcgagaatttgaaagatatggtgggaatgacaaaatagcagtcagaactgaagacaacatgggtggatgtggagttcgaacctggggatcgggtaaagataccagtgatgtggagccaactgcaccgatggaggaacccacagtggtggaggagtcccagggcaccccggaagaggagtctccagccaaagttcctgagttggaggtagaagaagaaacccaagttcaagagatgactttagatgagtggaaaaatcttcaagaacagaccagaccaaagcctgagtttaacatccggaaaccagaatccactgttccttccaaagccgtggtgattcacaagtcaaaatacagagatgatatggtaaaagatgactatgaggacgattcccatgttttccggaaacccgccaatgacatcacatcccagctggagattaattttggtaacctccctcgtcctgggcgtggagccagaggaggcacccggggaggccggggaaggatcaggagggcagagaactatggacccagagcagaagtggtgatgcaagatgttgcccccaacccagatgacccggaagatttccctgcgctgtcttgaaagagccctgtttcccagcaccgcggagctgcactgcacacctgtggggagacttttccagctgggccaagggagtcagactctaagaacaatagatgttgcttttcccgtgtcatgtaaatttgttgcacttttttgggctgagctgttagaggggcttctccagaggctcgagagcaggccatttcccaagaagatgaagaatggtgactgtgtttttattgaaggaatttcaaatgaagaataatgtttaaaatgtgtatatagagatagtatagactcctccgcggaagcatggagggaaaggaggttgtaaaatagactccatggagactcttaggaagcagtagattcccgggggctgtgcctttagcgttagaggaaacacatagagctggaactgttaatggaaagcagtcacagctgagttttcggagaccaagaaattaaaatacaattgcacttactgtttacttgtaaatgttatcttctctcctggaatattttgagttctggttttcacntaaccaatcatttaaaaatcgctattgtgtagccactggccaccacnctgtgacacagaatcagagaaagcgttgatttttaatggtgatttaaactacctcgtggtttctgtgtgtgtgcacacacacatctagtgtttgggtggtttttaggaagaatattaagtatgtgacttcaaaaaccatgttatttaacctgccaatcaaatggaaagggatcatggcaaaagcaaataccgcatccttttcttccgcagaactagagtcagagttcggcagctgcgtacaaaggcctctgccctcggcttgagcaaaagttgtaaataactagtatttattaagcacttataagcagtttttctcacttagtcctggctccagttctagagttcctctttattgcttttggtgaaagtttggggttgggggtacacctcagaggttcagtaattcacctggagtcccaccctgaacagagctggacccagagccacacacgcccgggaacacacactgtgctggggaggaagtgggcctaggagggcctgcaggtccaggcagctgtagagctgctagaagctggggtgttgctctccccgctttctcatagacacagaggtactgtctgcctgttgtcacacagttcatatgctcgcttgagatggaatctgaaccttggtcccaggatctgtgctttttcccactttgccacactgtctaaggtggctttgaactggaacccaagtgcaaataaaggttggtattcgctcctg

SEQ ID NO: 368436 - DNA, 3487 bp, Homo sapiens
cagctaagacccggagaggtggaatttcactttgaaattcccttgcctcgtgagggccggcgctgggcatgctcagtagccgcggcgctgctgctgggctgctgggctggcgcggagtccaccctgccgtctccgccttggcttctgggcgtccagaaggccaggcatttgccgcctctgagcgcttctgttccccttacccgcaacctcctactgctcttcctctctccctctcttagggaggttgaagctggtgctggtttctgtcggcgccacagactgactgctctgcaaaccccagccgaggacctgaatcccggagactagaagacccttggcggtggctctttctaatagcactttacctgaagtggggtcgtggtggagtttctcctccacctctcaatgcaaacactatgcggagagcagtctgcttccctgcgctgtgcctgctccttaatcttcacgctgcagggtgcttttcaggaaacaatgatcattttttggcaattaatcagaagaagagtgggaagccggtattcatttataagcattcacaagacattgagaagagcctggatatagccccacaaaaaatctacagacatagctaccattcctcttccgaagctcaagtaagcaaacgccaccagattgtcaattcagcatttcctagacccgcatatgacccgtctctcaatctgctggccatggatggtcaagatcttgaagtggaaaatctcccaatcccagcagcaaatgtaattgtggtgacactgcaaatggatgtaaacaagctgaacataaccttgcttcggatcttccgccaaggagtggctgcagctttaggactcttaccccagcaagtgcacatcaatcgcctcattggaaagaagaacagtattgaactgtttgtgtctcccataaaccgaaaaacaggaatttctgatgctctgccctctgaggaagttcttcgttcacttaatatcaatgttttgcatcaaagtttatcccagtttggaattacagaagtctctcctgagaaaaatgttttacaagggcagcatgaagcggacaaaatctggagcaaagaaggattttatgctgttgtcatttttctcagcatctttgttattatagtaacgtgtttgatgattctttacagattaaaagaaagatttcagctttccttaagacaagacaaagagaaaaaccaggagatccacctatcgcccatcacattacagccagcactgtccgaggcaaagacagtccacagcatggtccaacctgagcaggccccaaaggtactgaatgttgtcgtggaccctcaaggccgaggtgctcctgagatcagagctaccaccgctacctctgtttgcccttctcctttcaaaatgaagcccataggacttcaagagagaagagggtccaacgtatctcttacattggacatgagtagcttggggaacattgaaccctttgtgtctataccaacaccacgggagaaggtagcaatggagtatctgcagtcagccagccgaattctcacaaggtctcagctgagggacgtcgtggcaagttcacatttactccaaagtgaattcatggaaataccaatgaactttgtggatcccaaagaaattgatattccgcgtcatggaactaaaaatcgctataagaccattttaccaaatcccctcagcagagtgtgtttaagaccaaaaaatgtaaccgattcattgagcacctacattaatgctaattatattaggggctacagtggcaaggagaaagccttcattgccacgcagggccccatgatcaacaccgtggatgatttctggcagatggtttggcaggaagacagccctgtgattgttatgatcacaaaactcaaagaaaaaaatgagaaatgtgtgctatactggccggaaaagagagggatatatggaaaagttgaggttctggttatcagtgtaaatgaatgtgataactacaccattcgaaaccttgtcttaaagcaaggaagccacacccaacatgtgaagcattactggtacacctcatggcctgatcacaagactccagacagtgcccagcccctcctacagctcatgctggatgtagaagaagacagacttgcttcccagggccgagggcctgtggttgtccactgcagtgcaggaataggtagaacagggtgttttattgctacatccattggctgtcaacagctgaaagaagaaggagttgtggatgcactaagcattgtctgccagcttcgtatggatagaggtggaatggtgcaaaccagtgagcagtatgaatttgtgcaccatgctctgtgcctgtatgagagcagactttcagcagagactgtccagtgagtcattgaagacttgtcagaccatcaatctcttggggtgattaatcaaattacccacccaaggcttctagaaggagcttcctgcaatggaaggaaggagaagctctgaagcccatgtatggcatggattgtggaagactgggcaacatatttaagatttccagctccttgtgtatatgaatgcatttgtaagcatcccccaaattattctgaaggttttttgatgatggaggtatgataggtttatcacacagcctaaggcagattttgttttgtctgtactgactctatctgccacacagaatgtatgtatgtaatattcagtaataaatgtcatcaggtgatgactggatgagctgctgaagacattcgtattatgtgttagatgctttaatgtttgcaaaatctgtcttgtgaatggactgtcagctgttaaactgttcctgttttgaagtgctattacctttctcagttaccagaatcttgctgctaaagttgcaagtgattgataatggatttttaacagagaagtctttgtttttgaaaaacaaaaatcaaaaacagtaactattttatatggaaatgtgtcttgataatattacctattaaatgtgtatttatagtccctcctatcaaacaattacagagcacaatgattgtcattgggtatatatgtatttactctctattattgggcataaaggtggcttctgctccagaactctatccactgtatttccacatcgtgagtcattttactttaaaagggaaaaacaaatttgtagcaactctgaagtatcaagagttttaactacttgtctctcttttgctaagaagggatttttgaatatgctatctacctggaatctctctctcaacaaaaggtatatgccttcaggaatgatataatctgtcccattttcgaggctccttataaggacatttccatgtatgtccttacatttctgaaagctttcaatcttcaagagacaaaaaaaattaaaataactaccctcagcaaacactagctgttctgctcatatatgaatttttaatgcagcaatgttgactttgtttcatactgccaataaactctta

SEQ ID NO: 368437 - DNA, 788 bp, Homo sapiens
cacatcgtgagtcattttactttaaaagggaaaaacagtggatgagctgctgaagacattcgtattatgtgttagatgctttaatgtttgcaaaatctgtcttgtgaatggactgtcagctgttaaactgttcctgttttgaagtgctattacctttctcagttaccagaatcttgctgctaaagttgcaagtgattgataatggatttttaacagagaagtctttgtttttgaaaaacaaaaatcaaaaacagtaactattttatatggaaatgtgtcttgataatattacctattaaatgtgtatttatagtccctcctatcaaacaattacagagcacaatgattgtcattgggtatatatgtatttactctctattattgggcataaaggtggcttctgctccagaactctatccactgtatttccacatcgtgagtcattttactttaaaagggaaaaacaaatttgtagcaactctgaagtatcaagagttttaactacttgtctctcttttgctaagaagggatttttgaatatgctatctacctggaatctctctctcaacaaaaggtatatgccttcaggaatgatataatctgtcccattttcgaggctccttataaggacatttccatgtatgtccttacatttctgaaagctttcaatcttcaagagacaaaaaaaattaaaataactaccctcagcaaacactagctgttctgctcatatatgaatttttaatgcagcaatgttgactttgtttcatactgccaataaactctta

SEQ ID NO: 368438 - DNA, 2473 bp, Homo sapiens
agaacagaactctcttacctatgaaccagaaaaatgttttacaagggcagcatgaagcggacaaaatctggagcaaagaaggattttatgctgttgtcatttttctcagcatctttgttattatagtaacgtgtttgatgattctttacagattaaaagaaagatttcagctttccttaagacaagacaaagagaaaaaccaggagatccacctatcgcccatcacattacagccagcactgtccgaggcaaagacagtccacagcatggtccaacctgagcaggccccaaaggtactgaatgttgtcgtggaccctcaaggccgaggtgctcctgagatcagagctaccaccgctacctctgtttgcccttctcctttcaaaatgaagcccataggacttcaagagagaagagggtccaacgtatctcttacattggacatgagtagcttggggaacattgaaccctttgtgtctataccaacaccacgggagaaggtagcaatggagtatctgcagtcagccagccgaattctcacaaggtctcagctgagggacgtcgtggcaagttcacatttactccaaagtgaattcatggaaataccaatgaactttgtggatcccaaagaaattgatattccgcgtcatggaactaaaaatcgctataagaccattttaccaaatcccctcagcagagtgtgtttaagaccaaaaaatgtaaccgattcattgagcacctacattaatgctaattatattaggggctacagtggcaaggagaaagccttcattgccacgcagggccccatgatcaacaccgtggatgatttctggcagatggtttggcaggaagacagccctgtgattgttatgatcacaaaactcaaagaaaaaaatgagaaatgtgtgctatactggccggaaaagagagggatatatggaaaagttgaggttctggttatcagtgtaaatgaatgtgataactacaccattcgaaaccttgtcttaaagcaaggaagccacacccaacatgtgaagcattactggtacacctcatggcctgatcacaagactccagacagtgcccagcccctcctacagctcatgctggatgtagaagaagacagacttgcttcccagggccgagggcctgtggttgtccactgcagtgcaggaataggtagaacagggtgttttattgctacatccattggctgtcaacagctgaaagaagaaggagttgtggatgcactaagcattgtctgccagcttcgtatggatagaggtggaatggtgcaaaccagtgagcagtatgaatttgtgcaccatgctctgtgcctgtatgagagcagactttcagcagagactgtccagtgagtcattgaagacttgtcagaccatcaatctcttggggtgattaatcaaattacccacccaaggcttctagaaggagcttcctgcaatggaaggaaggagaagctctgaagcccatgtatggcatggattgtggaagactgggcaacatatttaagatttccagctccttgtgtatatgaatgcatttgtaagcatcccccaaattattctgaaggttttttgatgatggaggtatgataggtttatcacacagcctaaggcagattttgttttgtctgtactgactctatctgccacacagaatgtatgtatgtaatattcagtaataaatgtcatcaggtgatgactggatgagctgctgaagacattcgtattatgtgttagatgctttaatgtttgcaaaatctgtcttgtgaatggactgtcagctgttaaactgttcctgttttgaagtgctattacctttctcagttaccagaatcttgctgctaaagttgcaagtgattgataatggatttttaacagagaagtctttgtttttgaaaaacaaaaatcaaaaacagtaactattttatatggaaatgtgtcttgataatattacctattaaatgtgtatttatagtccctcctatcaaacaattacagagcacaatgattgtcattgggtatatatgtatttactctctattattgggcataaaggtggcttctgctccagaactctatccactgtatttccacatcgtgagtcattttactttaaaagggaaaaacaaatttgtagcaactctgaagtatcaagagttttaactacttgtctctcttttgctaagaagggatttttgaatatgctatctacctggaatctctctctcaacaaaaggtatatgccttcaggaatgatataatctgtcccattttcgaggctccttataaggacatttccatgtatgtccttacatttctgaaagctttcaatcttcaagagacaaaaaaaattaaaataactaccctcagcaaacactagctgttctgctcatatatgaatttttaatgcagcaatgttgactttgtttcatactgccaataaactctta

SEQ ID NO: 368439 - DNA, 2696 bp, Homo sapiens
agaacagaactctcttacctatgaaccaggtagtttccaagagagacgctgagggatgtttagaaagcctgggacctgcagatgccatgtcaggcacgcttgctcctgcataggagactaaataatctcgatatataaggatggcagtctgttgtcttagatcagtttgagaagcagctctggcagcggggggtgtaggtgtgttgcactacactgaatggaataaggctaaaaatatgtttagtgtctgataagaacgccagttttctcaagctctcatttaacgtcggactttctgttttgcttttaaagaaaaatgttttacaagggcagcatgaagcggacaaaatctggagcaaagaaggattttatgctgttgtcatttttctcagcatctttgttattatagtaacgtgtttgatgattctttacagattaaaagaaagatttcagctttccttaagacaagacaaagagaaaaaccaggagatccacctatcgcccatcacattacagccagcactgtccgaggcaaagacagtccacagcatggtccaacctgagcaggccccaaaggtactgaatgttgtcgtggaccctcaaggccgaggtgctcctgagatcagagctaccaccgctacctctgtttgcccttctcctttcaaaatgaagcccataggacttcaagagagaagagggtccaacgtatctcttacattggacatgagtagcttggggaacattgaaccctttgtgtctataccaacaccacgggagaaggtagcaatggagtatctgcagtcagccagccgaattctcacaaggtctcagctgagggacgtcgtggcaagttcacatttactccaaagtgaattcatggaaataccaatgaactttgtggatcccaaagaaattgatattccgcgtcatggaactaaaaatcgctataagaccattttaccaaatcccctcagcagagtgtgtttaagaccaaaaaatgtaaccgattcattgagcacctacattaatgctaattatattaggggctacagtggcaaggagaaagccttcattgccacgcagggccccatgatcaacaccgtggatgatttctggcagatggtttggcaggaagacagccctgtgattgttatgatcacaaaactcaaagaaaaaaatgagaaatgtgtgctatactggccggaaaagagagggatatatggaaaagttgagcaaggaagccacacccaacatgtgaagcattactggtacacctcatggcctgatcacaagactccagacagtgcccagcccctcctacagctcatgctggatgtagaagaagacagacttgcttcccagggccgagggcctgtggttgtccactgcagtgcaggaataggtagaacagggtgttttattgctacatccattggctgtcaacagctgaaagaagaaggagttgtggatgcactaagcattgtctgccagcttcgtatggatagaggtggaatggtgcaaaccagtgagcagtatgaatttgtgcaccatgctctgtgcctgtatgagagcagactttcagcagagactgtccagtgagtcattgaagacttgtcagaccatcaatctcttggggtgattaatcaaattacccacccaaggcttctagaaggagcttcctgcaatggaaggaaggagaagctctgaagcccatgtatggcatggattgtggaagactgggcaacatatttaagatttccagctccttgtgtatatgaatgcatttgtaagcatcccccaaattattctgaaggttttttgatgatggaggtatgataggtttatcacacagcctaaggcagattttgttttgtctgtactgactctatctgccacacagaatgtatgtatgtaatattcagtaataaatgtcatcaggtgatgactggatgagctgctgaagacattcgtattatgtgttagatgctttaatgtttgcaaaatctgtcttgtgaatggactgtcagctgttaaactgttcctgttttgaagtgctattacctttctcagttaccagaatcttgctgctaaagttgcaagtgattgataatggatttttaacagagaagtctttgtttttgaaaaacaaaaatcaaaaacagtaactattttatatggaaatgtgtcttgataatattacctattaaatgtgtatttatagtccctcctatcaaacaattacagagcacaatgattgtcattgggtatatatgtatttactctctattattgggcataaaggtggcttctgctccagaactctatccactgtatttccacatcgtgagtcattttactttaaaagggaaaaacaaatttgtagcaactctgaagtatcaagagttttaactacttgtctctcttttgctaagaagggatttttgaatatgctatctacctggaatctctctctcaacaaaaggtatatgccttcaggaatgatataatctgtcccattttcgaggctccttataaggacatttccatgtatgtccttacatttctgaaagctttcaatcttcaagagacaaaaaaaattaaaataactaccctcagcaaacactagctgttctgctcatatatgaatttttaatgcagcaatgttgactttgtttcatactgccaataaactctta

SEQ ID NO: 368440 - DNA, 2756 bp, Homo sapiens
agaacagaactctcttacctatgaaccaggtagtttccaagagagacgctgagggatgtttagaaagcctgggacctgcagatgccatgtcaggcacgcttgctcctgcataggagactaaataatctcgatatataaggatggcagtctgttgtcttagatcagtttgagaagcagctctggcagcggggggtgtaggtgtgttgcactacactgaatggaataaggctaaaaatatgtttagtgtctgataagaacgccagttttctcaagctctcatttaacgtcggactttctgttttgcttttaaagaaaaatgttttacaagggcagcatgaagcggacaaaatctggagcaaagaaggattttatgctgttgtcatttttctcagcatctttgttattatagtaacgtgtttgatgattctttacagattaaaagaaagatttcagctttccttaagacaagacaaagagaaaaaccaggagatccacctatcgcccatcacattacagccagcactgtccgaggcaaagacagtccacagcatggtccaacctgagcaggccccaaaggtactgaatgttgtcgtggaccctcaaggccgaggtgctcctgagatcagagctaccaccgctacctctgtttgcccttctcctttcaaaatgaagcccataggacttcaagagagaagagggtccaacgtatctcttacattggacatgagtagcttggggaacattgaaccctttgtgtctataccaacaccacgggagaaggtagcaatggagtatctgcagtcagccagccgaattctcacaaggtctcagctgagggacgtcgtggcaagttcacatttactccaaagtgaattcatggaaataccaatgaactttgtggatcccaaagaaattgatattccgcgtcatggaactaaaaatcgctataagaccattttaccaaatcccctcagcagagtgtgtttaagaccaaaaaatgtaaccgattcattgagcacctacattaatgctaattatattaggggctacagtggcaaggagaaagccttcattgccacgcagggccccatgatcaacaccgtggatgatttctggcagatggtttggcaggaagacagccctgtgattgttatgatcacaaaactcaaagaaaaaaatgagaaatgtgtgctatactggccggaaaagagagggatatatggaaaagttgaggttctggttatcagtgtaaatgaatgtgataactacaccattcgaaaccttgtcttaaagcaaggaagccacacccaacatgtgaagcattactggtacacctcatggcctgatcacaagactccagacagtgcccagcccctcctacagctcatgctggatgtagaagaagacagacttgcttcccagggccgagggcctgtggttgtccactgcagtgcaggaataggtagaacagggtgttttattgctacatccattggctgtcaacagctgaaagaagaaggagttgtggatgcactaagcattgtctgccagcttcgtatggatagaggtggaatggtgcaaaccagtgagcagtatgaatttgtgcaccatgctctgtgcctgtatgagagcagactttcagcagagactgtccagtgagtcattgaagacttgtcagaccatcaatctcttggggtgattaatcaaattacccacccaaggcttctagaaggagcttcctgcaatggaaggaaggagaagctctgaagcccatgtatggcatggattgtggaagactgggcaacatatttaagatttccagctccttgtgtatatgaatgcatttgtaagcatcccccaaattattctgaaggttttttgatgatggaggtatgataggtttatcacacagcctaaggcagattttgttttgtctgtactgactctatctgccacacagaatgtatgtatgtaatattcagtaataaatgtcatcaggtgatgactggatgagctgctgaagacattcgtattatgtgttagatgctttaatgtttgcaaaatctgtcttgtgaatggactgtcagctgttaaactgttcctgttttgaagtgctattacctttctcagttaccagaatcttgctgctaaagttgcaagtgattgataatggatttttaacagagaagtctttgtttttgaaaaacaaaaatcaaaaacagtaactattttatatggaaatgtgtcttgataatattacctattaaatgtgtatttatagtccctcctatcaaacaattacagagcacaatgattgtcattgggtatatatgtatttactctctattattgggcataaaggtggcttctgctccagaactctatccactgtatttccacatcgtgagtcattttactttaaaagggaaaaacaaatttgtagcaactctgaagtatcaagagttttaactacttgtctctcttttgctaagaagggatttttgaatatgctatctacctggaatctctctctcaacaaaaggtatatgccttcaggaatgatataatctgtcccattttcgaggctccttataaggacatttccatgtatgtccttacatttctgaaagctttcaatcttcaagagacaaaaaaaattaaaataactaccctcagcaaacactagctgttctgctcatatatgaatttttaatgcagcaatgttgactttgtttcatactgccaataaactctta

SEQ ID NO: 368441 - DNA, 1510 bp, Homo sapiens
accgaggcggtagtgcgcgcagctcaggggcgggtattgccgcggcgttgcagtcccctcaaaacgcttcgttcatcatccctttctaacttctccctcggccttccttttgagctatggtctttttcccagacaggaagagaagagttgcccctacctccggagccgagggagaatgccgcaatagcgatggcggccctcggcgcagtggggcggcctcaacctaacccggggcggggcctcgggggcggggtctcggcggggcggtcgctttggagccgcaaagtttggctgtggcggcaaatgggcttgggcggctcctcggcgggtggcggtggtggccgtagcggttcctcctggccctgttaatgtcggggccaggccgggggaggatggcgccctagaacccggccttgctggggtaggggcgggaggggacggggtggggaccggccatgtcggaggtgacccggagtctgctgcagcgctggggcgccagttttaggagaggcgccgacttcgactcttggggccagctggtggaggcgatagacgagtatcagatgtgagtgactaaccgcgggagcagggccagaccggctccagtcgtgcgcctctcccttgtttctgtcggtgtctctcatcaccgtatctgcagccaaggcttctcagggtggggctccgcaggcactggggctgagatccctcgccaccagccccagcgaggctgctctagggacaacggctccgctctctggggtgactcgccttcttccctctccgcctccgcagggacagttccattcaacaggtagcccttctttcctggggcgcaggcacccagaggctatctgcttagttcctttccaccgtctcgcgggtcccccacttggcagtcagtttcctttcctcctcctctcccaggttgcttttcctcgatttccttttgaaattctctgaggaatacttgtgtgttctccgcccacgttccaaggatgagtggccttgctctgtgtgtgtcttccttcttccatgcgtaggaaaggagggaactgtttgcgattgaggggatgggggggagcccaggaagcaacgagggccagggatacctcttctgccaaaagaagggtctcctctcgcgctccttctccacccctctttctggtgagccgtgttttcagaattccacctcgatttcgtttcggtttctgggactgttatttggtaggctgtgagtcccacccaccccctcgctcggttgccttgggtggagtccgcgcaggatgtgaaccgaagagagcaaaatgtgaattaatggaccacgcacaggagctccacgccctccttggatccctcctccttttcctgtatataatgtatagccgcagggtacaagtgagtaccagtttccttgagcaacctaagaccaatttcttgccctttctggtttccacagaaaacttcagggttgtcttaaaaaataaaagacaagatttatatacacataaaa

SEQ ID NO: 368442 - DNA, 3262 bp, Homo sapiens
accgaggcggtagtgcgcgcagctcaggggcgggtattgccgcggcgttgcagtcccctcaaaacgcttcgttcatcatccctttctaacttctccctcggccttccttttgagctatggtctttttcccagacaggaagagaagagttgcccctacctccggagccgagggagaatgccgcaatagcgatggcggccctcggcgcagtggggcggcctcaacctaacccggggcggggcctcgggggcggggtctcggcggggcggtcgctttggagccgcaaagtttggctgtggcggcaaatgggcttgggcggctcctcggcgggtggcggtggtggccgtagcggttcctcctggccctgttaatgtcggggccaggccgggggaggatggcgccctagaacccggccttgctggggtaggggcgggaggggacggggtggggaccggccatgtcggaggtgacccggagtctgctgcagcgctggggcgccagttttaggagaggcgccgacttcgactcttggggccagctggtggaggcgatagacgagtatcagatattagcaagacatctacaaaaggaggcccaagctcaacacaataattctgaattcacagaagaacaaaagaaaaccataggcaaaattgcaacatgcttggaattgcgaagtgcagctttacagtccacacagtctcaagaagaatttaaactggaggacctgaagaagctagaaccaatcctaaagaatattcttacatataataaagaattcccatttgatgttcagcctgtcccattaagaagaattttggcacctggtgaagaagagaatttggaatttgaagaagatgaagaagagggtggtgctggagcagggtctcctgattcttttcctgctagagttcccggtactttattaccaaggttgccatcggaaccaggaatgacattactcactatcagaattgagaaaattggtttgaaagatgctgggcagtgcatcgatccctatattacagttagtgtaaaggatctgaatggcatagacttaactcctgtgcaagatactcctgtggcttcaagaaaagaagatacatatgttcattttaatgtggacattgagctccagaagcatgttgaaaaattaaccaaaggtgcagctatcttctttgaattcaaacactacaagcctaaaaaaaggtttaccagcaccaagtgttttgctttcatggagatggatgaaattaaacctgggccaattgtaatagaactatacaagaaacccactgactttaaaagaaagaaattgcaattattgaccaagaaaccactttatcttcatctacatcaaactttgcacaaggaatgatcctgacatgatgaacctggaacttctgtgaattttaccactcagtagaaaccatcatagctctgtgtagcatattcacccttcaacaggcaggaagcaagccgtacccagaccagtaggccggacggagtccaatgcaaagctgtaccacagaattcagagtccagcacatcacactgacgtataggactccttgggatacaggtttattgtagattttgaaacatgtttttacttttctattaattgtgcaattaatagtctattttctaatttaccactactcctaccctgcttcctggaacaatactgttgtgggtaggatgtgctcatcttcagacttaatacagcaataagaatgtgctagagtttacacatctgttcacttttgctccaatatgctcttttgacttaacgtcaagctttgggttgatgtgggtagggtagtgtcaaactgctttgagaggaatgggaccagttctgctgcctaagaaggtctgtctggatgtttataggcagcacctctgaagtggcctaaattcaccctgatctgatagttttcctgcttagaaagtgtgccttggccagatcagtatcccacatgggagtgttccctaggttgtagctgtgattgtttccagatgaccagattgtttttctgaaaatgagcatatttttagtcatgtcgattagctgttcttctacatcacattgttactctttctgatgatgattctagggttaacattggaaccatctcaaaataattacaaagttttagatgggtttacaatgtcttctaaacaatgtaatctaaaaataattgagtcagatgctaacgagatactgcaggcataactgctgtttttctgacaactgattgtgaaaccttaaaacctgcatacctcttcttacagtgaggagtatgcaaaatctggaaagatattctattttttttatataggtagataggatcgccatttatttcctatttagatatactgacattcatccatatgaaaatatgcaggtcattagcttactataatttacttttgacttaatggggcataaataaaactttcatagtacacatgaggtggatatttgatacacagaacatttgcggtgggctttctgtgggttagatgtaaagcccacatattttaatattcactattttaaatgagcaatgcatgaggggaatgcagtgtcagtacctggcctatttttaaactagtgtaatcaccctagtcataccattcagtatgtttgctttttaaaataagtaaccacaattaagttgttgtagcccttgcacttcaagagatctagtctttactttcagttgtctgttaggtccattctgtttactagacggatgttaataaaaactatgcgagcctgaatgaattctcagccaaatttagtcttgtctctcatcttgattggattaattccaaattctaaaatgattcagtccacaatagctctaggggatgaagaatttgccttactttgcccagttcctaagactgtgagttgtcaaatccctagactgtaagctcttcaaggagcaagaggcgcattttctccgtgtcatgtaatttttctaaggtgtttggcagcactctgtaccctgtggagtactcagtaccttttgtttgatgttgctgacaagacctgaaaaaaaatcccttaaaaaaaaaacccattaaagtgtagcaaaaccgatgtattattttttctcttttctcataaaccataagatatgtatatcaaaatgataatttatatgaagcatctgctatccttcacataagtatagtttatatgaactacaaatacctttcatcaacattaaagaagcttaaattgaaaaaaaa

SEQ ID NO: 368443 - DNA, 2975 bp, Homo sapiens
agcgggttcacctgcgtcgttccgggagcctcgtcgacggacggagcgccgcgcgcgtagcggttcctcctggccctgttaatgtcggggccaggccgggggaggatggcgccctagaacccggccttgctggggtaggggcgggaggggacggggtggggaccggccatgtcggaggtgacccggagtctgctgcagcgctggggcgccagttttaggagaggcgccgacttcgactcttggggccagctggtggaggcgatagacgagtatcagatattagcaagacatctacaaaaggaggcccaagctcaacacaataattctgaattcacagaagaacaaaagaaaaccataggcaaaattgcaacatgcttggaattgcgaagtgcagctttacagtccacacagtctcaagaagaatttaaactggaggacctgaagaagctagaaccaatcctaaagaatattcttacatataataaagaattcccatttgatgttcagcctgtcccattaagaagaattttggcacctggtgaagaagagaatttggaatttgaagaagatgaagaagagggtggtgctggagcagggtctcctgattcttttcctgctagagttcccggtactttattaccaaggttgccatcggaaccaggaatgacattactcactatcagaattgagaaaattggtttgaaagatgctgggcagtgcatcgatccctatattacagttagtgtaaaggatctgaatggcatagacttaactcctgtgcaagatactcctgtggcttcaagaaaagaagatacatatgttcattttaatgtggacattgagctccagaagcatgttgaaaaattaaccaaaggtgcagctatcttctttgaattcaaacactacaagcctaaaaaaaggtttaccagcaccaagtgttttgctttcatggagatggatgaaattaaacctgggccaattgtaatagaactatacaagaaacccactgactttaaaagaaagaaattgcaattattgaccaagaaaccactttatcttcatctacatcaaactttgcacaaggaatgatcctgacatgatgaacctggaacttctgtgaattttaccactcagtagaaaccatcatagctctgtgtagcatattcacccttcaacaggcaggaagcaagccgtacccagaccagtaggccggacggagtccaatgcaaagctgtaccacagaattcagagtccagcacatcacactgacgtataggactccttgggatacaggtttattgtagattttgaaacatgtttttacttttctattaattgtgcaattaatagtctattttctaatttaccactactcctaccctgcttcctggaacaatactgttgtgggtaggatgtgctcatcttcagacttaatacagcaataagaatgtgctagagtttacacatctgttcacttttgctccaatatgctcttttgacttaacgtcaagctttgggttgatgtgggtagggtagtgtcaaactgctttgagaggaatgggaccagttctgctgcctaagaaggtctgtctggatgtttataggcagcacctctgaagtggcctaaattcaccctgatctgatagttttcctgcttagaaagtgtgccttggccagatcagtatcccacatgggagtgttccctaggttgtagctgtgattgtttccagatgaccagattgtttttctgaaaatgagcatatttttagtcatgtcgattagctgttcttctacatcacattgttactctttctgatgatgattctagggttaacattggaaccatctcaaaataattacaaagttttagatgggtttacaatgtcttctaaacaatgtaatctaaaaataattgagtcagatgctaacgagatactgcaggcataactgctgtttttctgacaactgattgtgaaaccttaaaacctgcatacctcttcttacagtgaggagtatgcaaaatctggaaagatattctattttttttatataggtagataggatcgccatttatttcctatttagatatactgacattcatccatatgaaaatatgcaggtcattagcttactataatttacttttgacttaatggggcataaataaaactttcatagtacacatgaggtggatatttgatacacagaacatttgcggtgggctttctgtgggttagatgtaaagcccacatattttaatattcactattttaaatgagcaatgcatgaggggaatgcagtgtcagtacctggcctatttttaaactagtgtaatcaccctagtcataccattcagtatgtttgctttttaaaataagtaaccacaattaagttgttgtagcccttgcacttcaagagatctagtctttactttcagttgtctgttaggtccattctgtttactagacggatgttaataaaaactatgcgagcctgaatgaattctcagccaaatttagtcttgtctctcatcttgattggattaattccaaattctaaaatgattcagtccacaatagctctaggggatgaagaatttgccttactttgcccagttcctaagactgtgagttgtcaaatccctagactgtaagctcttcaaggagcaagaggcgcattttctccgtgtcatgtaatttttctaaggtgtttggcagcactctgtaccctgtggagtactcagtaccttttgtttgatgttgctgacaagacctgaaaaaaaatcccttaaaaaaaaaacccattaaagtgtagcaaaaccgatgtattattttttctcttttctcataaaccataagatatgtatatcaaaatgataatttatatgaagcatctgctatccttcacataagtatagtttatatgaactacaaatacctttcatcaacattaaagaagcttaaattgaaaaaaaa

SEQ ID NO: 368444 - DNA, 2245 bp, Homo sapiens
aaagatggccactgactttaaaagaaagaaattgcaattattgaccaagaaaccactttatcttcatctacatcaaactttgcacaaggaatgatcctgacatgatgaacctggaacttctgtgaattttaccactcagtggccgtgcagctatcttctttgaattcaaacactacaagcctaaaaaaaggtttaccagcaccaagtgttttgctttcatggagatggatgaaattaaacctgggccaattgtaatagaactatacaagaaacccactgactttaaaagaaagaaattgcaattattgaccaagaaaccactttatcttcatctacatcaaactttgcacaaggaatgatcctgacatgatgaacctggaacttctgtgaattttaccactcagtagaaaccatcatagctctgtgtagcatattcacccttcaacaggcaggaagcaagccgtacccagaccagtaggccggacggagtccaatgcaaagctgtaccacagaattcagagtccagcacatcacactgacgtataggactccttgggatacaggtttattgtagattttgaaacatgtttttacttttctattaattgtgcaattaatagtctattttctaatttaccactactcctaccctgcttcctggaacaatactgttgtgggtaggatgtgctcatcttcagacttaatacagcaataagaatgtgctagagtttacacatctgttcacttttgctccaatatgctcttttgacttaacgtcaagctttgggttgatgtgggtagggtagtgtcaaactgctttgagaggaatgggaccagttctgctgcctaagaaggtctgtctggatgtttataggcagcacctctgaagtggcctaaattcaccctgatctgatagttttcctgcttagaaagtgtgccttggccagatcagtatcccacatgggagtgttccctaggttgtagctgtgattgtttccagatgaccagattgtttttctgaaaatgagcatatttttagtcatgtcgattagctgttcttctacatcacattgttactctttctgatgatgattctagggttaacattggaaccatctcaaaataattacaaagttttagatgggtttacaatgtcttctaaacaatgtaatctaaaaataattgagtcagatgctaacgagatactgcaggcataactgctgtttttctgacaactgattgtgaaaccttaaaacctgcatacctcttcttacagtgaggagtatgcaaaatctggaaagatattctattttttttatataggtagataggatcgccatttatttcctatttagatatactgacattcatccatatgaaaatatgcaggtcattagcttactataatttacttttgacttaatggggcataaataaaactttcatagtacacatgaggtggatatttgatacacagaacatttgcggtgggctttctgtgggttagatgtaaagcccacatattttaatattcactattttaaatgagcaatgcatgaggggaatgcagtgtcagtacctggcctatttttaaactagtgtaatcaccctagtcataccattcagtatgtttgctttttaaaataagtaaccacaattaagttgttgtagcccttgcacttcaagagatctagtctttactttcagttgtctgttaggtccattctgtttactagacggatgttaataaaaactatgcgagcctgaatgaattctcagccaaatttagtcttgtctctcatcttgattggattaattccaaattctaaaatgattcagtccacaatagctctaggggatgaagaatttgccttactttgcccagttcctaagactgtgagttgtcaaatccctagactgtaagctcttcaaggagcaagaggcgcattttctccgtgtcatgtaatttttctaaggtgtttggcagcactctgtaccctgtggagtactcagtaccttttgtttgatgttgctgacaagacctgaaaaaaaatcccttaaaaaaaaaacccattaaagtgtagcaaaaccgatgtattattttttctcttttctcataaaccataagatatgtatatcaaaatgataatttatatgaagcatctgctatccttcacataagtatagtttatatgaactacaaatacctttcatcaacattaaagaagcttaaattgaaaaaaaa

SEQ ID NO: 368445 - DNA, 1867 bp, Homo sapiens
gcacgagctcgtgccgattcggcacgaggaaaccatcatagctctgtgtagcatattcacccttcaacaggcaggaagcaagccgtacccagaccagtaggccggacggagtccaatgcaaagctgtaccacagaattcagagtccagcacatcacactgacgtataggactccttgggatacaggtttattgtagattttgaaacatgtttttacttttctattaattgtgcaattaatagtctattttctaatttaccactactcctaccctgcttcctggaacaatactgttgtgggtaggatgtgctcatcttcagacttaatacagcaataagaatgtgctagagtttacacatctgttcacttttgctccaatatgctcttttgacttaacgtcaagctttgggttgatgtgggtagggtagtgtcaaactgctttgagaggaatgggaccagttctgctgcctaagaaggtctgtctggatgtttataggcagcacctctgaagtggcctaaattcaccctgatctgatagttttcctgcttagaaagtgtgccttggccagatcagtatcccacatgggagtgttccctaggttgtagctgtgattgtttccagatgaccagattgtttttctgaaaatgagcatatttttagtcatgtcgattagctgttcttctacatcacattgttactctttctgatgatgattctagggttaacattggaaccatctcaaaataattacaaagttttagatgggtttacaatgtcttctaaacaatgtaatctaaaaataattgagtcagatgctaacgagatactgcaggcataactgctgtttttctgacaactgattgtgaaaccttaaaacctgcatacctcttcttacagtgaggagtatgcaaaatctggaaagatattctattttttttatataggtagataggatcgccatttatttcctatttagatatactgacattcatccatatgaaaatatgcaggtcattagcttactataatttacttttgacttaatggggcataaataaaactttcatagtacacatgaggtggatatttgatacacagaacatttgcggtgggctttctgtgggttagatgtaaagcccacatattttaatattcactattttaaatgagcaatgcatgaggggaatgcagtgtcagtacctggcctatttttaaactagtgtaatcaccctagtcataccattcagtatgtttgctttttaaaataagtaaccacaattaagttgttgtagcccttgcacttcaagagatctagtctttactttcagttgtctgttaggtccattctgtttactagacggatgttaataaaaactatgcgagcctgaatgaattctcagccaaatttagtcttgtctctcatcttgattggattaattccaaattctaaaatgattcagtccacaatagctctaggggatgaagaatttgccttactttgcccagttcctaagactgtgagttgtcaaatccctagactgtaagctcttcaaggagcaagaggcgcattttctccgtgtcatgtaatttttctaaggtgtttggcagcactctgtaccctgtggagtactcagtaccttttgtttgatgttgctgacaagacctgaaaaaaaatcccttaaaaaaaaaacccattaaagtgtagcaaaaccgatgtattattttttctcttttctcataaaccataagatatgtatatcaaaatgataatttatatgaagcatctgctatccttcacataagtatagtttatatgaactacaaatacctttcatcaacattaaagaagcttaaattgaaaaaaaa

SEQ ID NO: 368446 - DNA, 1203 bp, Homo sapiens
gtaccccacaccacctgagtccatcacattgttactctttctgatgatgattctagggttaacattggaaccatctcaaaataattacaaagttttagatgggtttacaatgtcttctaaacaatgtaatctaaaaataattgagtcagatgctaacgagatactgcaggcataactgctgtttttctgacaactgattgtgaaaccttaaaacctgcatacctcttcttacagtgaggagtatgcaaaatctggaaagatattctattttttttatataggtagataggatcgccatttatttcctatttagatatactgacattcatccatatgaaaatatgcaggtcattagcttactataatttacttttgacttaatggggcataaataaaactttcatagtacacatgaggtggatatttgatacacagaacatttgcggtgggctttctgtgggttagatgtaaagcccacatattttaatattcactattttaaatgagcaatgcatgaggggaatgcagtgtcagtacctggcctatttttaaactagtgtaatcaccctagtcataccattcagtatgtttgctttttaaaataagtaaccacaattaagttgttgtagcccttgcacttcaagagatctagtctttactttcagttgtctgttaggtccattctgtttactagacggatgttaataaaaactatgcgagcctgaatgaattctcagccaaatttagtcttgtctctcatcttgattggattaattccaaattctaaaatgattcagtccacaatagctctaggggatgaagaatttgccttactttgcccagttcctaagactgtgagttgtcaaatccctagactgtaagctcttcaaggagcaagaggcgcattttctccgtgtcatgtaatttttctaaggtgtttggcagcactctgtaccctgtggagtactcagtaccttttgtttgatgttgctgacaagacctgaaaaaaaatcccttaaaaaaaaaacccattaaagtgtagcaaaaccgatgtattattttttctcttttctcataaaccataagatatgtatatcaaaatgataatttatatgaagcatctgctatccttcacataagtatagtttatatgaactacaaatacctttcatcaacattaaagaagcttaaattgaaaaaaaa

SEQ ID NO: 368447 - DNA, 369 bp, Homo sapiens
gctgaagtttgtcccagtgaaatggtatgaaaagtattgtatcttattttcatcatcattgtataaagagtttttttttttttgagaagaatttggttctcaatgtagatttgtattttaaaaacaggacaataattgtacttcacatgttaaaaagctttaaattgttacactttgttgcagtagtttgcttttcttccattctaaagaatatgttttcttcttacagattagcaagacatctacaaaaggaggcccaagctcaacacaataattctgaattcacagaagaacaaaaggtaccataaaataatctctagatatatcagattccaaacaaaaagtgttttgtcttttgagttcattaag

SEQ ID NO: 368448 - DNA, 280 bp, Homo sapiens
aagatataatttttgattttgcttcatggaagaattcttatcttcttattctagtcctaaagaatattcttacatataataaagaattcccatttgatgttcagcctgtcccattaaggtaaaagaaacatttatatttgttttcttattttattttatacctctctttcagatagttctgggttttcttaaatatcaactttggtattattgatatcattgacatcaacaatgataacagtatatcagcattttattttatttcagtattattattttt

SEQ ID NO: 368449 - DNA, 1739 bp, Homo sapiens
accgaggcggtagtgcgcgcagctcaggggcgggtattgccgcggcgttgcagtcccctcaaaacgcttcgttcatcatccctttctaacttctccctcggccttccttttgagctatggtctttttcccagacaggaagagaagagttgcccctacctccggagccgagggagaatgccgcaatagcgatggcggccctcggcgcagtggggcggcctcaacctaacccggggcggggcctcgggggcggggtctcggcggggcggtcgctttggagccgcaaagtttggctgtggcggcaaatgggcttgggcggctcctcggcgggtggcggtggtggccgtagcggttcctcctggccctgttaatgtcggggccaggccgggggaggatggcgccctagaacccggccttgctggggtaggggcgggaggggacggggtggggaccggccatgtcggaggtgacccggagtctgctgcagcgctggggcgccagttttaggagaggcgccgacttcgactcttggggccagctggtggaggcgatagacgagtatcagatattagcaagacatctacaaaaggaggcccaagctcaacacaataattctgaattcacagaagaacaaaagaaaaccataggcaaaattgcaacatgcttggaattgcgaagtgcagctttacagtccacacagtctcaagaagaatttaaactggaggacctgaagaagctagaaccaatcctaaagaatattcttacatataataaagaattcccatttgatgttcagcctgtcccattaagaagaattttggcacctggtgaagaagagaatttggaatttgaagaagatgaagaagagggtggtgctggagcagggtctcctgattcttttcctgctagagttcccggtactttattaccaaggttgccatcggaaccaggaatgacattactcactatcagaattgagaaaattggtttgaaagatgctgggcagtgcatcgatccctatattacagttagtgtaaaggatctgaatggcatagacttaactcctgtgcaagatactcctgtggcttcaagaaaagaagatacatatgttcattttaatgtggacattgagctccagaagcatgttgaaaaattaaccaaaggtgcagctatcttctttgaattcaaacactacaagcctaaaaaaaggtttaccagcaccaagtgttttgctttcatggagatggatgaaattaaacctgggccaattgtaatagaactatacaagaaacccactgactttaaaagaaagaaattgcaattattgaccaagaaaccactttatcttcatctacatcaaactttgcacaaggaatgatcctgacatgatgaacctggaacttctgtgaattttaccactcagtagaaaccatcatagctctgtgtagcatattcacccttcaacaggcaggaagcaagccgtacccagaccagtaggccggacggagtccaatgcaaagctgtaccacagaattcagagtccagcacatcacactgacgtataggactccttgggatacaggtttattgtagattttgaaacatgtttttacttttctattaattgtgcaattaatagtctattttctaatttaccactactcctaccctgcttcctggaacaatactgttgtgggtaggatgtgctcatcttcagacttaatacagcaataagaatgtg

SEQ ID NO: 368450 - DNA, 3208 bp, Homo sapiens
accgaggcggtagtgcgcgcagctcaggggcgggtattgccgcggcgttgcagtcccctcaaaacgcttcgttcatcatccctttctaacttctccctcggccttccttttgagctatggtctttttcccagacaggaagagaagagttgcccctacctccggagccgagggagaatgccgcaatagcgatggcggccctcggcgcagtggggcggcctcaacctaacccggggcggggcctcgggggcggggtctcggcggggcggtcgctttggagccgcaaagtttggctgtggcggcaaatgggcttgggcggctcctcggcgggtggcggtggtggccgtagcggttcctcctggccctgttaatgtcggggccaggccgggggaggatggcgccctagaacccggccttgctggggtaggggcgggaggggacggggtggggaccggccatgtcggaggtgacccggagtctgctgcagcgctggggcgccagttttaggagaggcgccgacttcgactcttggggccagctggtggaggcgatagacgagtatcagatattagcaagacatctacaaaaggaggcccaagctcaacacaataattctgaattcacagaagaacaaaagaaaaccataggcaaaattgcaacatgcttggaattgcgaagtgcagctttacagtccacacagtctcaagaagaatttaaactggaggacctgaagaagctagaaccaatcctaaagaatattcttacatataataaagaattcccatttgatgttcagcctgtcccattaagaagaattttggcacctggtgaagaagagaatttggaatttgaagaagatgaagaagagggtggtgctggagcagggtctcctgattcttttcctgctagagttcccggtactttattaccaaggttgccatcggaaccaggaatgacattactcactatcagaattgagaaaattggtttgaaagatgctgggcagtgcatcgatccctatattacagttagtgtaaaggatctgaatggcatagacttaactcctgtgcaagatactcctgtggcttcaagaaaagaagatacatatgttcattttaatgtggacattgagctccagaagcatgttgaaaaattaaccaaaggtgcagctatcttctttgaattcaaacactacaagcctaaaaaaaggtttaccagcaccaagtgttttgctttcatggagatggatgaaattaaacctgggccaattgtaatagaactatacaagaaacccactgactttaaaagaaagaaattgcaattattgaccaagaaaccactttatcttcatctacatcaaactttgcacaaggaatgatcctgacatgatgaacctggaacttctgtgaattttaccactcagtagaaaccatcatagctctgtgtagcatattcacccttcaacaggcaggaagcaagccgtacccagaccagtaggccggacggagtccaatgcaaagctgtaccacagaattcagagtccagcacatcacactgacgtataggactccttgggatacaggtttattgtagattttgaaacatgtttttacttttctattaattgtgcaattaatagtctattttctaatttaccactactcctaccctgcttcctggaacaatactgttgtgggtaggatgtgctcatcttcagacttaatacagcaataagaatgtgctagagtttacacatctgttcacttttgctccaatatgctcttttgacttaacgtcaagctttgggttgatgtgggtagggtagtgtcaaactgctttgagaggaatgggaccagttctgctgcctaagaaggtctgtctggatgtttataggcagcacctctgaagtggcctaaattcaccctgatctgatagttttcctgcttagaaagtgtgccttggccagatcagtatcccacatgggagtgttccctaggttgtagctgtgattgtttccagatgaccagattgtttttctgaaaatgagcatatttttagtcatgtcgattagctgttcttctacatcacattgttactctttctgatgatgattctagggttaacattggaaccatctcaaaataattacaaagttttagatgggtttacaatgtcttctaaacaatgtaatctaaaaataattgagtcagatgctaacgagatactgcaggcataactgctgtttttctgacaactgattgtgaaaccttaaaacctgcatacctcttcttacagtgaggagtatgcaaaatctggaaagatattctattttttttatataggtagataggatcgccatttatttcctatttagatatactgacattcatccatatgaaaatatgcaggtcattagcttactataatttacttttgacttaatggggcataaatgggctttctgtgggttagatgtaaagcccacatattttaatattcactattttaaatgagcaatgcatgaggggaatgcagtgtcagtacctggcctatttttaaactagtgtaatcaccctagtcataccattcagtatgtttgctttttaaaataagtaaccacaattaagttgttgtagcccttgcacttcaagagatctagtctttactttcagttgtctgttaggtccattctgtttactagacggatgttaataaaaactatgcgagcctgaatgaattctcagccaaatttagtcttgtctctcatcttgattggattaattccaaattctaaaatgattcagtccacaatagctctaggggatgaagaatttgccttactttgcccagttcctaagactgtgagttgtcaaatccctagactgtaagctcttcaaggagcaagaggcgcattttctccgtgtcatgtaatttttctaaggtgtttggcagcactctgtaccctgtggagtactcagtaccttttgtttgatgttgctgacaagacctgaaaaaaaatcccttaaaaaaaaaacccattaaagtgtagcaaaaccgatgtattattttttctcttttctcataaaccataagatatgtatatcaaaatgataatttatatgaagcatctgctatccttcacataagtatagtttatatgaactacaaatacctttcatcaacattaaagaagcttaaattgaaaaaaaa

SEQ ID NO: 368451 - DNA, 2890 bp, Homo sapiens
gaacgaaccccagtttagcttgtattataagctctccaatgaccaatggagatgcggggcaaggggattcagcggatctagctgttaatgccactgatttgtggtgaccaatatggattttctttctgtcgtttgtttcaaggcactagaaggagacttttggtccactgtccaggggtctatggagactaatattagcaagacatctacaaaaggaggcccaagctcaacacaataattctgaattcacagaagaacaaaagaaaaccataggcaaaattgcaacatgcttggaattgcgaagtgcagctttacagtccacacagtctcaagaagaatttaaactggaggacctgaagaagctagaaccaatcctaaagaatattcttacatataataaagaattcccatttgatgttcagcctgtcccattaagaagaattttggcacctggtgaagaagagaatttggaatttgaagaagatgaagaagagggtggtgctggagcagggtctcctgattcttttcctgctagagttcccggtactttattaccaaggttgccatcggaaccaggaatgacattactcactatcagaattgagaaaattggtttgaaagatgctgggcagtgcatcgatccctatattacagttagtgtaaaggatctgaatggcatagacttaactcctgtgcaagatactcctgtggcttcaagaaaagaagatacatatgttcattttaatgtggacattgagctccagaagcatgttgaaaaattaaccaaaggtgcagctatcttctttgaattcaaacactacaagcctaaaaaaaggtttaccagcaccaagtgttttgctttcatggagatggatgaaattaaacctgggccaattgtaatagaactatacaagaaacccactgactttaaaagaaagaaattgcaattattgaccaagaaaccactttatcttcatctacatcaaactttgcacaaggaatgatcctgacatgatgaacctggaacttctgtgaattttaccactcagtagaaaccatcatagctctgtgtagcatattcacccttcaacaggcaggaagcaagccgtacccagaccagtaggccggacggagtccaatgcaaagctgtaccacagaattcagagtccagcacatcacactgacgtataggactccttgggatacaggtttattgtagattttgaaacatgtttttacttttctattaattgtgcaattaatagtctattttctaatttaccactactcctaccctgcttcctggaacaatactgttgtgggtaggatgtgctcatcttcagacttaatacagcaataagaatgtgctagagtttacacatctgttcacttttgctccaatatgctcttttgacttaacgtcaagctttgggttgatgtgggtagggtagtgtcaaactgctttgagaggaatgggaccagttctgctgcctaagaaggtctgtctggatgtttataggcagcacctctgaagtggcctaaattcaccctgatctgatagttttcctgcttagaaagtgtgccttggccagatcagtatcccacatgggagtgttccctaggttgtagctgtgattgtttccagatgaccagattgtttttctgaaaatgagcatatttttagtcatgtcgattagctgttcttctacatcacattgttactctttctgatgatgattctagggttaacattggaaccatctcaaaataattacaaagttttagatgggtttacaatgtcttctaaacaatgtaatctaaaaataattgagtcagatgctaacgagatactgcaggcataactgctgtttttctgacaactgattgtgaaaccttaaaacctgcatacctcttcttacagtgaggagtatgcaaaatctggaaagatattctattttttttatataggtagataggatcgccatttatttcctatttagatatactgacattcatccatatgaaaatatgcaggtcattagcttactataatttacttttgacttaatggggcataaataaaactttcatagtacacatgaggtggatatttgatacacagaacatttgcggtgggctttctgtgggttagatgtaaagcccacatattttaatattcactattttaaatgagcaatgcatgaggggaatgcagtgtcagtacctggcctatttttaaactagtgtaatcaccctagtcataccattcagtatgtttgctttttaaaataagtaaccacaattaagttgttgtagcccttgcacttcaagagatctagtctttactttcagttgtctgttaggtccattctgtttactagacggatgttaataaaaactatgcgagcctgaatgaattctcagccaaatttagtcttgtctctcatcttgattggattaattccaaattctaaaatgattcagtccacaatagctctaggggatgaagaatttgccttactttgcccagttcctaagactgtgagttgtcaaatccctagactgtaagctcttcaaggagcaagaggcgcattttctccgtgtcatgtaatttttctaaggtgtttggcagcactctgtaccctgtggagtactcagtaccttttgtttgatgttgctgacaagacctgaaaaaaaatcccttaaaaaaaaaacccattaaagtgtagcaaaaccgatgtattattttttctcttttctcataaaccataagatatgtatatcaaaatgataatttatatgaagcatctgctatccttcacataagtatagtttatatgaactacaaatacctttcatcaacattaaagaagcttaaattgaaaaaaaa

SEQ ID NO: 368452 - DNA, 1713 bp, Homo sapiens
actgtagaactaaaatttgacttcagtctagcgtttccttggtgtttttaggttgctttggtaagtttaggtttgctatatttctgattgcttagaattttgttttagccctttaaaatcagatcataaatatgaattcatacttctaaggaattttcttgctataagctggagtttaggtgatgtataggttcagttgagacatttttggaacaggcaaatccttagttaacataagatatttaacagttgaagatagtgtcatggatttttatcttttttagcaagtaatgctaagaaccactggcctgagctactactcttcagtatacattattaggattgcatagacttactagaggaacagtttcaggttttgatgctaatcagtgttgtgtcctaaagttgtcctttgtgcctttaaaaagttttggatatatcttctagtttaaaattgcttattaaggaattcattttataattgcagtgggaaagtaatggtcaagtaacactaggtagactatcatgcctgtttagcccagagaatttggggggagagagaatagataaaaatggcacccagaaaaatgttaaaatctttagtcaagactagaattaatacaattgtctacacttgtatggcagaaataaccttataaagtgtttaaggaattcagagaagggaatgtaccaaataagcaacagggagaaaattaggtaagaagtaagatacgaacgagaaacctgatttattgctcatccttcccttgcctccctaatggcaagcaaaactctgaacatctgaaaaggatgtagttctggacaaatcctgactacccagaggaaactcactgtgagattgctgttgatttgaagggtgctttcactaaggttatattttaaagtagaataacacatgctgagtgtaaactggctttggattggtcagctgcagtagtacaaaaacagcatagaatttgagaaaactaaaactgctatgagatagctatgagaaaactaaaactgctatgagatagaaatgatgtaaaattatgtggaaagttttccctcatatactcacatacagcctttgaagggctctggctctgaccggttgatggccttgagcgagatgaaatcatgaaattgagtcaaatcaatttgacattgaaatgacaagaggaaactcttaaatacataaaaacaagctctcatttgcctaggatagatactgtcttaaaaataaagactgaacctagatgttctgagcactagcaacaaggtattttaacaagtttaaaggaattctctgaaaaagttataaaattattctaggaaacataaccataatagtgttttaagggactttcacctggggattttatattcatgaacagagtgtattctgtatttaaaatgtctcatttgtgggaattggatgacatgttttttgataaatttattcacaatataaattgactttttattctaggaccatgtgaataatgggttccattgcacaaatacaaatattttaatagcttcttaggcagtggtgtagacatcttggatataaataattgtagatcttgtatatttgatttttaaaaaactagaataaacagagaggcataaacatatcttagagtccaagtggtagtgtttagcattggatataataaatggatgttttacaaagtgtttccataattc

SEQ ID NO: 368453 - DNA, 1642 bp, Homo sapiens
actgtagaactaaaatttgacttcagtctagcgtttccttggtgtttttaggttgctttggtaagtttaggtttgctatatttctgattgcttagaattttgttttagccctttaaaatcagatcataaatatgaattcatacttctaaggaattttcttgctataagctggagtttaggtgatgtataggttcagttgagacatttttggaacaggcaaatccttagttaacataagatatttaacagttgaagatagtgtcatggatttttatcttttttagcaagtaatgctaagaaccactggcctgagctactactcttcagtatacattattaggattgcatagacttactagaggaacagtttcaggttttgatgctaatcagtgttgtgtcctaaagttgtcctttgtgcctttaaaaagttttggatatatcttctagtttaaaattgcttattaaggaattcattttataattgcagtgggaaagtaatggtcaagtaacactaggtagactatcatgcctgtttagcccagagaatttggggggagagagaatagataaaaatggcacccagaaaaatgttaaaatctttagtcaagactagaattaatacaattgtctacacttgtatggcagaaataaccttataaagtgtttaaggaattcagagaagggaatgtaccaaataagcaacagggagaaaattaggtaagaagtaagatacgaacgagaaacctgatttattgctcatccttcccttgcctccctaatggcaagcaaaactctgaacatctgaaaaggatgtagttctggacaaatcctgactacccagaggaaactcactgtgagattgctgttgatttgaagggtgctttcactaaggttatattttaaagtagaataacacatgctgagtgtaaactggctttggattggtcagctgcagtagtacaaaaacagcatagaatttgagaaaactaaaactgctatgagatagctatgagaaaactaaaactgctatgagatagaaatgatgtaaaattatgtggaaagttttccctcatatactcacatacagcctttgaagggctctggctctgaccggttgatggccttgagcgagatgaaatcatgaaattgagtcaaatcaatttgacattgaaatgacaagaggaaactcttaaatacataaaaacaagctctcatttgcctaggatagatactgtcttaaaaataaagactgaacctagatgttctgagcactagcaacaaggtattttaacaagtttaaaggaattctctgaaaaagttataaaattattctaggaaacataaccataatagtgttttaagggactttcacctggggattttatattcatgaacagagtgtattctgtatttaaaatgtctcatttgtgggaattggatgacatgttttttgataaatttattcacaatataaattgactttttattctaggaccatgtgaataatgggttccattgcacaaatacaaatattttaatagcttcttaggcagtggtgtagacatcttggatataaataattgtagatcttgtatatttgatttttaaaaaactagcatcccccccccggcctccccctcac

SEQ ID NO: 368454 - DNA, 921 bp, Homo sapiens
gacgctcaagagagcaagatgttctcgtgttgcttctccactttgagaggttgctgcttcaggaacggagggagtgagagccttttctgacgatgccgaagaaggctcatccctcaccccagacgcctgtcgcccgttgtaataaggcgcatccaggtaccacaggacagcctggggcaggccctagcaggccaggccacaccagagatcccattggggctgcagctgcacactgtccttgtccaggagattcaggagctcattgaggcacagacacgtggtgaggtggcctgcagcctggaagactttgcaggggcggtgcttttgggctggaattcccttaaattcagtgaggtcgtttctgtgtttggaaattccagtggaaagtgactgatgctggtgaccctttctcctttctcagctcctggtccatgtgcagaagtaagagcactgccagcaccagcggcggagccagagccagcatgggaagaggcccctccagagagagcactggagctggagggagctccagccaaggaccagaccaatgaggagctgcctgaaatcacggaggtgccggagagcattaaaagaaggctgggaggaagagttccagcagctacgcctgctcccagaggcaacctcctcctccaggcatggatgcgggtccacagctgggcatccaggctgtttgcccctaatgtgctgcccgggacaggcccttaacaggcgggcagtgggtgaggggaccaggaggtggctccaaagggtaaagcaaacaaagcttttaacgacagccgttgtgccccaggctctccatgccaccacctgccctaccatttattaatagtgttagaattacaagttgatgaaacgagattacaataaagtttgatttctgaaacttcatgcctttttgaa

SEQ ID NO: 368455 - DNA, 780 bp, Homo sapiens
gacgctcaagagagcaagatgttctcgtgttgcttctccactttgagaggttgctgcttcaggaacggagggagtgagagccttttctgacgatgccgaagaaggctcatccctcaccccagacgcctgtcgcccgttgtaataaggcgcatccaggtaccacaggacagcctggggcaggccctagcaggccaggccacaccagagatcccattggggctgcagctgcacactgtccttgtccaggagattcaggagctcattgaggcacagacacgtgctcctggtccatgtgcagaagtaagagcactgccagcaccagcggcggagccagagccagcatgggaagaggcccctccagagagagcactggagctggagggagctccagccaaggaccagaccaatgaggagctgcctgaaatcacggaggtgccggagagcattaaaagaaggctgggaggaagagttccagcagctacgcctgctcccagaggcaacctcctcctccaggcatggatgcgggtccacagctgggcatccaggctgtttgcccctaatgtgctgcccgggacaggcccttaacaggcgggcagtgggtgaggggaccaggaggtggctccaaagggtaaagcaaacaaagcttttaacgacagccgttgtgccccaggctctccatgccaccacctgccctaccatttattaatagtgttagaattacaagttgatgaaacgagattacaataaagtttgatttctgaaacttcatgcctttttgaa

SEQ ID NO: 368456 - DNA, 4079 bp, Homo sapiens
ataatacctaccttgcaggaccacgacaggattaagtgaggaaaaacccccatgagagtgttttgccattgtcaagtgagcctgagggaggctgaggggggatcaggctgtatcatgcccccgaggacaaactttccagtttaccctgctccctctctctgtccctaggctgccccaggccctgtgcagacacaccaggccctcagccgcagcccatggacctgcgggtgggccagcggcccccagtggagcccccaccagagcccacattgctggccctgcagcgtccccagcgcctgcaccaccacctcttcctagcaggcctgcagcagcagcgctcggtggagcccatgaggctctccatggacacgccgatgcccgagttgcaggtgggaccccaggaacaagagctgcggcagcttctccacaaggacaagagcaagcgaagtgctgtagccagcagcgtggtcaagcagaagctagcggaggtgattctgaaaaaacagcaggcggccctagaaagaacagtccatcccaacagccccggcattccctacagaaccctggagcccctggagacggaaggagccacccgctccatgctcagcagctttttgcctcctgttcccagcctgcccagtgaccccccagagcacttccctctgcgcaagacagtctctgagcccaacctgaagctgcgctataagcccaagaagtccctggagcggaggaagaatccactgctccgaaaggagagtgcgccccccagcctccggcggcggcccgcagagaccctcggagactcctccccaagtagtagcagcacgcccgcatcagggtgcagctcccccaatgacagcgagcacggccccaatcccatcctgggctcggaggctgacagtgaccgcaggacccatccgactctgggccctcgggggccaatcctggggagcccccacactcccctcttcctgccccatggcttggagcccgaggctgggggcaccttgccctctcgcctgcagcccattctcctcctggacccctcaggctctcatgccccgctgctgactgtgcccgggcttgggcccttgcccttccactttgcccagtccttaatgaccaccgagcggctctctgggtcaggcctccactggccactgagccggactcgctcagagcccctgccccccagtgccaccgctcccccaccgccgggccccatgcagccccgcctggagcagctcaaaactcacgtccaggtgatcaagaggtcagccaagccgagtgagaagccccggctgcggcagataccctcggctgaagacctggagacagatggcgggggaccgggccaggtggtggacgatggcctggagcacagggagctgggccatgggcagcctgaggccagaggccccgctcctctccagcagcaccctcaggtgttgctctgggaacagcagcgactggctgggcggctcccccggggcagcaccggggacactgtgctgcttcctctggcccagggtgggcaccggcctctgtcccgggctcagtcttccccagccgcacctgcctcactgtcagccccagagcctgccagccaggcccgagtcctctccagctcagagacccctgccaggaccctgcccttcaccacagggctgatctatgactcggtcatgctgaagcaccagtgctcctgcggtgacaacagcaggcacccggagcacgccggccgcatccagagcatctggtcccggctgcaggagcgggggctccggagccagtgtgagtgtctccgaggccggaaggcctccctggaagagctgcagtcggtccactctgagcggcacgtgctcctctacggcaccaacccgctcagccgcctcaaactggacaacgggaagctggcagggctcctggcacagcggatgtttgtgatgctgccctgtggtggggttggggtggacactgacaccatctggaatgagcttcattcctccaatgcagcccgctgggccgctggcagtgtcactgacctcgccttcaaagtggcttctcgtgagctaaagaatggtttcgctgtggtgcggcccccaggacaccatgcagatcattcaacagccatgggcttctgcttcttcaactcagtggccatcgcctgccggcagctgcaacagcagagcaaggccagcaagatcctcattgtagactgggacgtgcaccatggcaacggcacccagcaaaccttctaccaagaccccagtgtgctctacatctccctgcatcgccatgacgacggcaacttcttcccggggagtggggctgtggatgaggtaggggctggcagcggtgagggcttcaatgtcaatgtggcctgggctggaggtctggacccccccatgggggatcctgagtacctggctgctttcaggatagtcgtgatgcccatcgcccgagagttctctccagacctagtcctggtgtctgctggatttgatgctgctgagggtcacccggccccactgggtggctaccatgtttctgccaaatgttttggatacatgacgcagcaactgatgaacctggcaggaggcgcagtggtgctggccttggagggtggccatgacctcacagccatctgtgacgcctctgaggcctgtgtggctgctcttctgggtaacagggtggatcccctttcagaagaaggctggaaacagaaacccaacctcaatgccatccgctctctggaggccgtgatccgggtgcacagtaaatactggggctgcatgcagcgcctggcctcctgtccagactcctgggtgcctagagtgccaggggctgacaaagaagaagtggaggcagtgaccgcactggcgtccctctctgtgggcatcctggctgaagataggccctcggagcagctggtggaggaggaagaacctatgaatctctaaggctctggaaccatctgcccgcccaccatgcccttgggacctggttctcttctaacccctggcaatagcccccattcctgggtctttagagatcctgtgggcaagtagttggaaccagagaacagcctgcctgctttgacagttatcccagggagcgtgagaaaatccctgggtctagaatgggaactggagaggaccctgagaggagacgggctgggcggcgacccccacagggctctcgagaacagattctcccctccagtatgggccctggctgtggcccccattcctcaggactgcacagaggaggactggctccggctccgtcgggctcacccttaaccactattcctggctctgcaaaccccagactttgcacacagccccaggctccacacagaaatgtgaacttggcctcagacaggctggcccttcctaggctctaggggctaggggggagtggggagccaagaggtcccatattcctgagtgcaggggtagtccctctcacctgcttcctcagacgactctggaagcttccctctaccaccgggcactgagacgaagctccctgacagccgagactggcagccctccatctggtccgtaccctcgccagaggcccccctacatcaacctcctggcgatgccctggtggagcagatgggtgctctgggagtcctgtgcttcctgatccaatggtgccaaacccttcatctcccccagaagcgcagcatacccctgggacccctcggccactgcccactcggggagccttctctgtttctggggcctcccccaccatagctctgattcccaccccacataggaatagcctgactgagggggaaggggtgggagagaagatacagacatggaggaggggaggctgctctggcaaagtcttcaaggcttttgggggtccaggcctggggtcaagaaggaaaatgtgtgtgagcatgtgtgtgagtgaggcgtgtgtgtgagcgtgtgtgtgagtgaggcgtgtgtgtgtgtctttcctaggacccaccataccctgtgtatgtatgcatgtttttgtaaaaaggaagaaaatggaaaaaaatctgaacaataaatgttttatttgcttta

SEQ ID NO: 368457 - DNA, 4168 bp, Homo sapiens
aagttcagtttccccatcagtaaaatggggagaaaattccaagcacacttctcagagcagagcagaagaggttgactatggagaggagaatgaagatgggacccaggtgagcccgggtgcccactactgcagccccactggcgcaggctgccccaggccctgtgcagacacaccaggccctcagccgcagcccatggacctgcgggtgggccagcggcccccagtggagcccccaccagagcccacattgctggccctgcagcgtccccagcgcctgcaccaccacctcttcctagcaggcctgcagcagcagcgctcggtggagcccatgaggctctccatggacacgccgatgcccgagttgcaggtgggaccccaggaacaagagctgcggcagcttctccacaaggacaagagcaagcgaagtgctgtagccagcagcgtggtcaagcagaagctagcggaggtgattctgaaaaaacagcaggcggccctagaaagaacagtccatcccaacagccccggcattccctacagaaccctggagcccctggagacggaaggagccacccgctccatgctcagcagctttttgcctcctgttcccagcctgcccagtgaccccccagagcacttccctctgcgcaagacagtctctgagcccaacctgaagctgcgctataagcccaagaagtccctggagcggaggaagaatccactgctccgaaaggagagtgcgccccccagcctccggcggcggcccgcagagaccctcggagactcctccccaagtagtagcagcacgcccgcatcagggtgcagctcccccaatgacagcgagcacggccccaatcccatcctgggctcggaggcgctcttgggccagcggctgcggctgcaggagacttctgtggccccgttcgccttgccgacagtgtccttgctgcccgcaatcactctggggctgcccgcccctgccagggctgacagtgaccgcaggacccatccgactctgggccctcgggggccaatcctggggagcccccacactcccctcttcctgccccatggcttggagcccgaggctgggggcaccttgccctctcgcctgcagcccattctcctcctggacccctcaggctctcatgccccgctgctgactgtgcccgggcttgggcccttgcccttccactttgcccagtccttaatgaccaccgagcggctctctgggtcaggcctccactggccactgagccggactcgctcagagcccctgccccccagtgccaccgctcccccaccgccgggccccatgcagccccgcctggagcagctcaaaactcacgtccaggtgatcaagaggtcagccaagccgagtgagaagccccggctgcggcagataccctcggctgaagacctggagacagatggcgggggaccgggccaggtggtggacgatggcctggagcacagggagctgggccatgggcagcctgaggccagaggccccgctcctctccagcagcaccctcaggtgttgctctgggaacagcagcgactggctgggcggctcccccggggcagcaccggggacactgtgctgcttcctctggcccagggtgggcaccggcctctgtcccgggctcagtcttccccagccgcacctgcctcactgtcagccccagagcctgccagccaggcccgagtcctctccagctcagagacccctgccaggaccctgcccttcaccacagggctgatctatgactcggtcatgctgaagcaccagtgctcctgcggtgacaacagcaggcacccggagcacgccggccgcatccagagcatctggtcccggctgcaggagcgggggctccggagccagtgtgagtgtctccgaggccggaaggcctccctggaagagctgcagtcggtccactctgagcggcacgtgctcctctacggcaccaacccgctcagccgcctcaaactggacaacgggaagctggcagggctcctggcacagcggatgtttgtgatgctgccctgtggtggggttggggtggacactgacaccatctggaatgagcttcattcctccaatgcagcccgctgggccgctggcagtgtcactgacctcgccttcaaagtggcttctcgtgagctaaagaatggtttcgctgtggtgcggcccccaggacaccatgcagatcattcaacagccatgggcttctgcttcttcaactcagtggccatcgcctgccggcagctgcaacagcagagcaaggccagcaagatcctcattgtagactgggacgtgcaccatggcaacggcacccagcaaaccttctaccaagaccccagtgtgctctacatctccctgcatcgccatgacgacggcaacttcttcccggggagtggggctgtggatgaggtaggggctggcagcggtgagggcttcaatgtcaatgtggcctgggctggaggtctggacccccccatgggggatcctgagtacctggctgctttcaggatagtcgtgatgcccatcgcccgagagttctctccagacctagtcctggtgtctgctggatttgatgctgctgagggtcacccggccccactgggtggctaccatgtttctgccaaatgttttggatacatgacgcagcaactgatgaacctggcaggaggcgcagtggtgctggccttggagggtggccatgacctcacagccatctgtgacgcctctgaggcctgtgtggctgctcttctgggtaacagggtggatcccctttcagaagaaggctggaaacagaaacccaacctcaatgccatccgctctctggaggccgtgatccgggtgcacagtaaatactggggctgcatgcagcgcctggcctcctgtccagactcctgggtgcctagagtgccaggggctgacaaagaagaagtggaggcagtgaccgcactggcgtccctctctgtgggcatcctggctgaagataggccctcggagcagctggtggaggaggaagaacctatgaatctctaaggctctggaaccatctgcccgcccaccatgcccttgggacctggttctcttctaacccctggcaatagcccccattcctgggtctttagagatcctgtgggcaagtagttggaaccagagaacagcctgcctgctttgacagttatcccagggagcgtgagaaaatccctgggtctagaatgggaactggagaggaccctgagaggagacgggctgggcggcgacccccacagggctctcgagaacagattctcccctccagtatgggccctggctgtggcccccattcctcaggactgcacagaggaggactggctccggctccgtcgggctcacccttaaccactattcctggctctgcaaaccccagactttgcacacagccccaggctccacacagaaatgtgaacttggcctcagacaggctggcccttcctaggctctaggggctaggggggagtggggagccaagaggtcccatattcctgagtgcaggggtagtccctctcacctgcttcctcagacgactctggaagcttccctctaccaccgggcactgagacgaagctccctgacagccgagactggcagccctccatctggtccgtaccctcgccagaggcccccctacatcaacctcctggcgatgccctggtggagcagatgggtgctctgggagtcctgtgcttcctgatccaatggtgccaaacccttcatctcccccagaagcgcagcatacccctgggacccctcggccactgcccactcggggagccttctctgtttctggggcctcccccaccatagctctgattcccaccccacataggaatagcctgactgagggggaaggggtgggagagaagatacagacatggaggaggggaggctgctctggcaaagtcttcaaggcttttgggggtccaggcctggggtcaagaaggaaaatgtgtgtgagcatgtgtgtgagtgaggcgtgtgtgtgagcgtgtgtgtgagtgaggcgtgtgtgtgtgtctttcctaggacccaccataccctgtgtatgtatgcatgtttttgtaaaaaggaagaaaatggaaaaaaatctgaacaataaatgttttatttgcttta

SEQ ID NO: 368458 - DNA, 4722 bp, Homo sapiens
aagttcagtttccccatcagtaaaatggggagaaaattccaagcacacttctcagagcagagcagaagaggttgactatggagaggagaatgaagatgggacccaggtgagcccgggtgcccactactgcagccccactggcgcaggctgccccaggccctgtgcagacacaccaggccctcagccgcagcccatggacctgcgggtgggccagcggcccccagtggagcccccaccagagcccacattgctggccctgcagcgtccccagcgcctgcaccaccacctcttcctagcaggcctgcagcagcagcgctcggtggagcccatgaggctctccatggacacgccgatgcccgagttgcaggtgggaccccaggaacaagagctgcggcagcttctccacaaggacaagagcaagcgaagtgctgtagccagcagcgtggtcaagcagaagctagcggaggtgattctgaaaaaacagcaggcggccctagaaagaacagtccatcccaacagccccggcattccctacagaaccctggagcccctggagacggaaggagccacccgctccatgctcagcagctttttgcctcctgttcccagcctgcccagtgaccccccagagcacttccctctgcgcaagacagtctctgagcccaacctgaagctgcgctataagcccaagaagtccctggagcggaggaagaatccactgctccgaaaggagagtgcgccccccagcctccggcggcggcccgcagagaccctcggagactcctccccaagtagtagcagcacgcccgcatcagggtgcagctcccccaatgacagcgagcacggccccaatcccatcctgggctcggaggctgacagtgaccgcaggacccatccgactctgggccctcgggggccaatcctggggagcccccacactcccctcttcctgccccatggcttggagcccgaggctgggggcaccttgccctctcgcctgcagcccattctcctcctggacccctcaggctctcatgccccgctgctgactgtgcccgggcttgggcccttgcccttccactttgcccagtccttaatgaccaccgagcggctctctgggtcaggcctccactggccactgagccggactcgctcagagcccctgccccccagtgccaccgctcccccaccgccgggccccatgcagccccgcctggagcagctcaaaactcacgtccaggtgatcaagaggtcagccaagccgagtgagaagccccggctgcggcagataccctcggctgaagacctggagacagatggcgggggaccgggccaggtggtggacgatggcctggagcacagggagctgggccatgggcagcctgaggccagaggccccgctcctctccagcagcaccctcaggtgttgctctgggaacagcagcgactggctgggcggctcccccggggcagcaccggggacactgtgctgcttcctctggcccagggtgggcaccggcctctgtcccgggctcagtcttccccagccgcacctgcctcactgtcagccccagagcctgccagccaggcccgagtcctctccagctcagagacccctgccaggaccctgcccttcaccacaggttcactctaaagaagtagcattcctgggtcacatggtgtgagcattttgagagtcgttggtgtcctagacgcacagaaattgaccctcccacccgcaatgagcaggaccctcctctgaagacttcccacgggtcagactgaaatagtcacttctccaaagctggatttgtctatcacatggtccagtgtcatcgtgggcttcttagctcccggtttgggggtttcctaggaattcttttccctcctgctgccccttggtagcctctctgggttcatgacacgtgtgtgagatgctgtacgttaggcctcatgctttgctctgagcacttgagggcctggtgctgggccctcgagtcctgggccacccagcagtcgtgtccgcatgtgggaaggccgtggctctgtggcagccatgttggctggagctgtgttgatgtgttggctgctgccacctggggaagtgtctgggcgtgtgtggacaggtgtgaggggctggggctggggtaggggcaggatgaaatgcaggcctgtgtgggtgtgaggggtgtgtacccgcccggctccatgtgggtgcctgctgtggcggtgctggcgtgttctctgcagccaaggccatggggcgtgaggactccctgggtccccgctctgacccttgctcctgcagggctgatctatgactcggtcatgctgaagcaccagtgctcctgcggtgacaacagcaggcacccggagcacgccggccgcatccagagcatctggtcccggctgcaggagcgggggctccggagccagtgtgagtgtctccgaggccggaaggcctccctggaagagctgcagtcggtccactctgagcggcacgtgctcctctacggcaccaacccgctcagccgcctcaaactggacaacgggaagctggcagggctcctggcacagcggatgtttgtgatgctgccctgtggtggggttggggtggacactgacaccatctggaatgagcttcattcctccaatgcagcccgctgggccgctggcagtgtcactgacctcgccttcaaagtggcttctcgtgagctaaagaatggtttcgctgtggtgcggcccccaggacaccatgcagatcattcaacagccatgggcttctgcttcttcaactcagtggccatcgcctgccggcagctgcaacagcagagcaaggccagcaagatcctcattgtagactgggacgtgcaccatggcaacggcacccagcaaaccttctaccaagaccccagtgtgctctacatctccctgcatcgccatgacgacggcaacttcttcccggggagtggggctgtggatgaggtaggggctggcagcggtgagggcttcaatgtcaatgtggcctgggctggaggtctggacccccccatgggggatcctgagtacctggctgctttcaggatagtcgtgatgcccatcgcccgagagttctctccagacctagtcctggtgtctgctggatttgatgctgctgagggtcacccggccccactgggtggctaccatgtttctgccaaatgttttggatacatgacgcagcaactgatgaacctggcaggaggcgcagtggtgctggccttggagggtggccatgacctcacagccatctgtgacgcctctgaggcctgtgtggctgctcttctgggtaacagggtggatcccctttcagaagaaggctggaaacagaaacccaacctcaatgccatccgctctctggaggccgtgatccgggtgcacagtaaatactggggctgcatgcagcgcctggcctcctgtccagactcctgggtgcctagagtgccaggggctgacaaagaagaagtggaggcagtgaccgcactggcgtccctctctgtgggcatcctggctgaagataggccctcggagcagctggtggaggaggaagaacctatgaatctctaaggctctggaaccatctgcccgcccaccatgcccttgggacctggttctcttctaacccctggcaatagcccccattcctgggtctttagagatcctgtgggcaagtagttggaaccagagaacagcctgcctgctttgacagttatcccagggagcgtgagaaaatccctgggtctagaatgggaactggagaggaccctgagaggagacgggctgggcggcgacccccacagggctctcgagaacagattctcccctccagtatgggccctggctgtggcccccattcctcaggactgcacagaggaggactggctccggctccgtcgggctcacccttaaccactattcctggctctgcaaaccccagactttgcacacagccccaggctccacacagaaatgtgaacttggcctcagacaggctggcccttcctaggctctaggggctaggggggagtggggagccaagaggtcccatattcctgagtgcaggggtagtccctctcacctgcttcctcagacgactctggaagcttccctctaccaccgggcactgagacgaagctccctgacagccgagactggcagccctccatctggtccgtaccctcgccagaggcccccctacatcaacctcctggcgatgccctggtggagcagatgggtgctctgggagtcctgtgcttcctgatccaatggtgccaaacccttcatctcccccagaagcgcagcatacccctgggacccctcggccactgcccactcggggagccttctctgtttctggggcctcccccaccatagctctgattcccaccccacataggaatagcctgactgagggggaaggggtgggagagaagatacagacatggaggaggggaggctgctctggcaaagtcttcaaggcttttgggggtccaggcctggggtcaagaaggaaaatgtgtgtgagcatgtgtgtgagtgaggcgtgtgtgtgagcgtgtgtgtgagtgaggcgtgtgtgtgtgtctttcctaggacccaccataccctgtgtatgtatgcatgtttttgtaaaaaggaagaaaatggaaaaaaatctgaacaataaatgttttatttgcttta

SEQ ID NO: 368459 - DNA, 4576 bp, Homo sapiens
ataatacctaccttgcaggaccacgacaggattaagtgaggaaaaacccccatgagagtgttttgccattgtcaagtgagcctgagggaggctgaggggggatcaggctgtatcatgcccccgaggacaaactttccagtttaccctgctccctctctctgtccctaggctgccccaggccctgtgcagacacaccaggccctcagccgcagcccatggacctgcgggtgggccagcggcccccagtggagcccccaccagagcccacattgctggccctgcagcgtccccagcgcctgcaccaccacctcttcctagcaggcctgcagcagcagcgctcggtggagcccatgaggctctccatggacacgccgatgcccgagttgcaggtgggaccccaggaacaagagctgcggcagcttctccacaaggacaagagcaagcgaagtgctgtagccagcagcgtggtcaagcagaagctagcggaggtgattctgaaaaaacagcaggcggccctagaaagaacagtccatcccaacagccccggcattccctacagaaccctggagcccctggagacggaaggagccacccgctccatgctcagcagctttttgcctcctgttcccagcctgcccagtgaccccccagagcacttccctctgcgcaagacagtctctgagcccaacctgaagctgcgctataagcccaagaagtccctggagcggaggaagaatccactgctccgaaaggagagtgcgccccccagcctccggcggcggcccgcagagaccctcggagactcctccccaagtagtagcagcacgcccgcatcagggtgcagctcccccaatgacagcgagcacggccccaatcccatcctgggctcggaggctgacagtgaccgcaggacccatccgactctgggccctcgggggccaatcctggggagcccccacactcccctcttcctgccccatggcttggagcccgaggctgggggcaccttgccctctcgcctgcagcccattctcctcctggacccctcaggctctcatgccccgctgctgactgtgcccgggcttgggcccttgcccttccactttgcccagtccttaatgaccaccgagcggctctctgggtcaggcctccactggccactgagccggactcgctcagagcccctgccccccagtgccaccgctcccccaccgccgggccccatgcagccccgcctggagcagctcaaaactcacgtccaggtgatcaagaggtcagccaagccgagtgagaagccccggctgcggcagataccctcggctgaagacctggagacagatggcgggggaccgggccaggtggtggacgatggcctggagcacagggagctgggccatgggcagcctgaggccagaggccccgctcctctccagcagcaccctcaggtgttgctctgggaacagcagcgactggctgggcggctcccccggggcagcaccggggacactgtgctgcttcctctggcccagggtgggcaccggcctctgtcccgggctcagtcttccccagccgcacctgcctcactgtcagccccagagcctgccagccaggcccgagtcctctccagctcagagacccctgccaggaccctgcccttcaccacagggctgatctatgactcggtcatgctgaagcaccagtgctcctgcggtgacaacagcaggcacccggagcacgccggccgcatccagagcatctggtcccggctgcaggagcgggggctccggagccagtgtgagtgtctccgaggccggaaggcctccctggaagagctgcagtcggtccactctgagcggcacgtgctcctctacggcaccaacccgctcagccgcctcaaactggacaacgggaagctggcagggctcctggcacagcggatgtttgtgatgctgccctgtggtggggttggggtggacactgacaccatctggaatgagcttcattcctccaatgcagcccgctgggccgctggcagtgtcactgacctcgccttcaaagtggcttctcgtgagctaaagaatggtttcgctgtggtgcggcccccaggacaccatgcagatcattcaacagccatgggcttctgcttcttcaactcagtggccatcgcctgccggcagctgcaacagcagagcaaggccagcaagatcctcattgtagactgggacgtgcaccatggcaacggcacccagcaaaccttctaccaagaccccagtgtgctctacatctccctgcatcgccatgacgacggcaacttcttcccggggagtggggctgtggatgaggtaggggctggcagcggtgagggcttcaatgtcaatgtggcctgggctggaggtctggacccccccatgggggatcctgagtacctggctgctttcaggatagtcgtgatgcccatcgcccgagagttctctccagacctagtcctggtgtctgctggatttgatgctgctgagggtcacccggccccactgggtggctaccatgtttctgccaaatgttttggatacatgacgcagcaactgatgaacctggcaggaggcgcagtggtgctggccttggagggtggccatgacctcacagccatctgtgacgcctctgaggcctgtgtggctgctcttctgggtaacagggtggatcccctttcagaagaaggctggaaacagaaacccaacctcaatgccatccgctctctggaggccgtgatccgggtgcacagtaaatactggggctgcatgcagcgcctggcctcctgtccagactcctgggtgcctagagtgccaggggctgacaaagaagaagtggaggcagtgaccgcactggcgtccctctctgtgggcatcctggctgaagataggccctcggagcagctggtggaggaggaagaacctatgaatctctaaggctctggaaccatctgcccgcccaccatgcccttgggacctggttctcttctaacccctggcaatagcccccattcctgggtctttagagatcctgtgggcaagtagttggaaccagagaacagcctgcctgctttgacagttatcccagggagcgtgagaaaatccctgggtctagaatgggaactggagaggaccctgagaggagacgggctgggcggcgacccccacagggctctcgagaacagattctcccctccagtatgggccctggctgtggcccccattcctcaggactgcacagaggaggactggctccggctccgtcgggctcacccttaaccactattcctggctctgcaaaccccagactttgcacacagccccaggctccacacagaaatgtgaacttggcctcagacaggctggcccttcctaggctctaggggctaggggggagtggggagccaagaggtcccatattcctgagtgcaggggtagtccctctcacctgcttcctcagacgactctggaagcttccctctaccaccgggcactgagacgaagctccctgacagccgagactggcagccctccatctggtccgtaccctcgccagaggcccccctacatcaacctcctggcgatgccctggtggagcagatgggtgctctgggagtcctgtgcttcctgatccaatggtgccaaacccttcatctcccccagaagcgcagcatacccctgggacccctcggccactgcccactcggggagccttctctgtttctggggcctcccccaccatagctctgattcccaccccacataggaatagcctgactgagggggaaggggtgggagagaagatacagacatggaggaggggaggctgctctggcaaagtcttcaaggcttttgggggtccaggcctggggtcaagaaggaaaatgtgtgtgagcatgtgtgtgagtgaggcgtgtgtgtgagcgtgtgtgtgagtgaggcgtgtgtgtgtgtctttcctaggacccaccataccctgtgtatgtatgcatgtttttgtaaaaaggaagaaaatggaaaaaaatctgaacaataaatgttttatttgctttaaaagtgcctctgaaagggccccccagaagtgagcagtgcgccgtcaagcgggtgtgcagggcacacagctgcacggcacagtgtgggtctgagtcactgccggaggagggaccagggtggtctgggccgcagcccctttaacaatctgcccttcctgccctgcaggaagaacccattctgaacacaccctggctgtccctggctgccccactttggggtgacaaagaggaggcagccctgggctgagtccacagagaccagccctgatatggcaggagtgggggtggggtgggggagtgggaatacaggagctcagccccagctcaccacggcatccccgaagagttgtgactcagacacacctgggtttaagtcccagctgggagctcaggtaagtcaaatcgtcttctggggcctctgtttatcagtagaaggctccagaagtatacactgttgatggctccttcccgctctgatgcaccatgcctgattaagca

SEQ ID NO: 368460 - DNA, 6590 bp, Homo sapiens
aagttcagtttccccatcagtaaaatggggagaaaattccaagcacacttctcagagcagagcagaagaggttgactatggagaggagaatgaagatgggacccaggtgagcccgggtgcccactactgcagccccactggcgcaggctgccccaggccctgtgcagacacaccaggccctcagccgcagcccatggacctgcgggtgggccagcggcccccagtggagcccccaccagagcccacattgctggccctgcagcgtccccagcgcctgcaccaccacctcttcctagcaggcctgcagcagcagcgctcggtggagcccatgaggctctccatggacacgccgatgcccgagttgcaggtgggaccccaggaacaagagctgcggcagcttctccacaaggacaagagcaagcgaagtgctgtagccagcagcgtggtcaagcagaagctagcggaggtgattctgaaaaaacagcaggcggccctagaaagaacagtccatcccaacagccccggcattccctacagaaccctggagcccctggagacggaaggagccacccgctccatgctcagcagctttttgcctcctgttcccagcctgcccagtgaccccccagagcacttccctctgcgcaagacagtctctgagcccaacctgaagctgcgctataagcccaagaagtccctggagcggaggaagaatccactgctccgaaaggagagtgcgccccccagcctccggcggcggcccgcagagaccctcggagactcctccccaagtagtagcagcacgcccgcatcagggtgcagctcccccaatgacagcgagcacggccccaatcccatcctgggctcggaggctgacagtgaccgcaggacccatccgactctgggccctcgggggccaatcctggggagcccccacactcccctcttcctgccccatggcttggagcccgaggctgggggcaccttgccctctcgcctgcagcccattctcctcctggacccctcaggctctcatgccccgctgctgactgtgcccgggcttgggcccttgcccttccactttgcccagtccttaatgaccaccgagcggctctctgggtcaggcctccactggccactgagccggactcgctcagagcccctgccccccagtgccaccgctcccccaccgccgggccccatgcagccccgcctggagcagctcaaaactcacgtccaggtgatcaagaggtcagccaagccgagtgagaagccccggctgcggcagataccctcggctgaagacctggagacagatggcgggggaccgggccaggtggtggacgatggcctggagcacagggagctgggccatgggcagcctgaggccagaggccccgctcctctccagcagcaccctcaggtgttgctctgggaacagcagcgactggctgggcggctcccccggggcagcaccggggacactgtgctgcttcctctggcccagggtgggcaccggcctctgtcccgggctcagtcttccccagccgcacctgcctcactgtcagccccagagcctgccagccaggcccgagtcctctccagctcagagacccctgccaggaccctgcccttcaccacaggtgagaccgggaggagggtggcgggtggagggaggggctcggctgcacgagtccatgtgggtgtcttggtgtcacttgggacatttttagaggccacagagtgcttagccttgttaggcccacgtagtacccatggagcacatggaacagctggttattgcatttggccgatgaggaccaaggctcacgaaatctaaggtgacaagcctgtggtcaaatagcaagtggtagtcaagccaggataagaattccagtctcctgccaatgcactcagcccttttaaaaaatgatatttattactgttgctctgcttgtaaaaagagctcagaagtattttagacattttgaagagtacagaaaaacctaagaagaaaagaaaaatcaccaaccagtatcccaccacccagaagtaacccctctgaaattctgctgtatttcagtccaggctttgttctggccatatgtacatgtacagatgccatgaacacatgaactacgttttgtatcctgctttacttagttaacatattatgaatccttcttggcataattagtctttaaaactgagagtctcatagtatttcattaatgtatttcatttttactgagggatcccttatcagttagacatttagattatagcttatttgaatttccttatgcataaatctttcctcatgcttgggattatttcccaaggttcactctaaagaagtagcattcctgggtcacatggtgtgagcattttgagagtcgttggtgtcctagacgcacagaaattgaccctcccacccgcaatgagcaggaccctcctctgaagacttcccacgggtcagactgaaatagtcacttctccaaagctggatttgtctatcacatggtccagtgtcatcgtgggcttcttagctcccggtttgggggtttcctaggaattcttttccctcctgctgccccttggtagcctctctgggttcatgacacgtgtgtgagatgctgtacgttaggcctcatgctttgctctgagcacttgagggcctggtgctgggccctcgagtcctgggccacccagcagtcgtgtccgcatgtgggaaggccgtggctctgtggcagccatgttggctggagctgtgttgatgtgttggctgctgccacctggggaagtgtctgggcgtgtgtggacaggtgtgaggggctggggctggggtaggggcaggatgaaatgcaggcctgtgtgggtgtgaggggtgtgtacccgcccggctccatgtgggtgcctgctgtggcggtgctggcgtgttctctgcagccaaggccatggggcgtgaggactccctgggtccccgctctgacccttgctcctgcagggctgatctatgactcggtcatgctgaagcaccagtgctcctgcggtgacaacagcaggcacccggagcacgccggccgcatccagagcatctggtcccggctgcaggagcgggggctccggagccagtgtgagtgtctccgaggccggaaggcctccctggaagagctgcagtcggtccactctgagcggcacgtgctcctctacggcaccaacccgctcagccgcctcaaactggacaacgggaagctggcagggctcctggcacagcggatgtttgtgatgctgccctgtggtggggttggggtggacactgacaccatctggaatgagcttcattcctccaatgcagcccgctgggccgctggcagtgtcactgacctcgccttcaaagtggcttctcgtgagctaaagaatggtttcgctgtggtgcggcccccaggacaccatgcagatcattcaacagccatgggcttctgcttcttcaactcagtggccatcgcctgccggcagctgcaacagcagagcaaggccagcaagatcctcattgtagactgggacgtgcaccatggcaacggcacccagcaaaccttctaccaagaccccagtgtgctctacatctccctgcatcgccatgacgacggcaacttcttcccggggagtggggctgtggatgaggtaggggctggcagcggtgagggcttcaatgtcaatgtggcctgggctggaggtctggacccccccatgggggatcctgagtacctggctgctttcaggatagtcgtgatgcccatcgcccgagagttctctccagacctagtcctggtgtctgctggatttgatgctgctgagggtcacccggccccactgggtggctaccatgtttctgccaaatgttttggatacatgacgcagcaactgatgaacctggcaggaggcgcagtggtgctggccttggagggtggccatgacctcacagccatctgtgacgcctctgaggcctgtgtggctgctcttctgggtaacagggtggatcccctttcagaagaaggctggaaacagaaacccaacctcaatgccatccgctctctggaggccgtgatccgggtgcacagtaagtgtggagatgggacactcgctgagctcagactgaaggatcttggtggtaccctgccccaccgtggccagatcctagggcttccggtgccagccaggtgacctgctgttggtctggagtaagattcctgtgagtgacccaggcagcaatggtgagcaccccccagtgaggggttatcctctgagcccccccgatggagccagcagggcctaccagacagtggcccctcaaggtagggactggcctccatctctagcgacagccctagaccagggccaggtcaagagcaacactcaggccttgtttgccaaaaggcctggttcccatccctcccctcagtcctggccacaggcgtctcaggagctctgctggcttgggggctgcgtcttgggataacccccacatttgtaaagtactttaaattttcaacttcaactcaacatctattgagcatcttatgtcaagacccataatctatactagggataaaaatgagtaaaatagattcccatatcaagggctgggtaggggagccgtgatgtctttacataatggtaaagacatggctgattcctcttacggtgggtgccctcacactgagccagattccaggacatggttcctcacagcagcaggcaggaggagcattctcctggcctgggcacccatgcagagcggccgtggtgatggtcagttctcccatgttgtgttcgtcccacctcccaggccctcctttcctgagtgctgggctgagcactggtgggggctgtgtttaagtgggaggcccgagcttggggctctgggaggtcactgtgacacagaccctgtctgcaggcaagcaggctctcctgatgctctcaggagccccgcacctgtggggaatgagtcaaaggtggccttgcagccacaggggatgagagaaaggctgggcacctgctaggactccctcacagccatgttgaacccactctgcgtaccctgtcaggctgtgcgggagtgggagcgaagtgaggagaggggcaggtgggagagccgaccccaagtggaggacaggcccgctcctccggggccctgggcctgagacaccaacctcaatatccggtctaggacgcagtgtggaggggcttgctttctccaaccctttctgacctggcatcttaccccaggtaaatactggggctgcatgcagcgcctggcctcctgtccagactcctgggtgcctagagtgccaggggctgacaaagaagaagtggaggcagtgaccgcactggcgtccctctctgtgggcatcctggctgaagataggccctcggagcagctggtggaggaggaagaacctatgaatctctaaggctctggaaccatctgcccgcccaccatgcccttgggacctggttctcttctaacccctggcaatagcccccattcctgggtctttagagatcctgtgggcaagtagttggaaccagagaacagcctgcctgctttgacagttatcccagggagcgtgagaaaatccctgggtctagaatgggaactggagaggaccctgagaggagacgggctgggcggcgacccccacagggctctcgagaacagattctcccctccagtatgggccctggctgtggcccccattcctcaggactgcacagaggaggactggctccggctccgtcgggctcacccttaaccactattcctggctctgcaaaccccagactttgcacacagccccaggctccacacagaaatgtgaacttggcctcagacaggctggcccttcctaggctctaggggctaggggggagtggggagccaagaggtcccatattcctgagtgcaggggtagtccctctcacctgcttcctcagacgactctggaagcttccctctaccaccgggcactgagacgaagctccctgacagccgagactggcagccctccatctggtccgtaccctcgccagaggcccccctacatcaacctcctggcgatgccctggtggagcagatgggtgctctgggagtcctgtgcttcctgatccaatggtgccaaacccttcatctcccccagaagcgcagcatacccctgggacccctcggccactgcccactcggggagccttctctgtttctggggcctcccccaccatagctctgattcccaccccacataggaatagcctgactgagggggaaggggtgggagagaagatacagacatggaggaggggaggctgctctggcaaagtcttcaaggcttttgggggtccaggcctggggtcaagaaggaaaatgtgtgtgagcatgtgtgtgagtgaggcgtgtgtgtgagcgtgtgtgtgagtgaggcgtgtgtgtgtgtctttcctaggacccaccataccctgtgtatgtatgcatgtttttgtaaaaaggaagaaaatggaaaaaaatctgaacaataaatgttttatttgcttta

SEQ ID NO: 368461 - DNA, 3275 bp, Homo sapiens
aagaagagagggtgtagctcagtgaaaaagacacaggctagagtcaatgacccaagttcaggtcctaccttgctgccacttactagctgtggggcctttcccaaggcccttaacctccctgagccttgagtgaagcatactagtaggttttgtacgacattcaatgtgaaagcactttggaaatagtgattgatacatgtgagtcattctttattagggaggaagcaagcagggaagccacaggggtagagaacagggtcacctctccactcccgcccctcccatttctcccctcccaacctctaggttttggatacatgacgcagcaactgatgaacctggcaggaggcgcagtggtgctggccttggagggtggccatgacctcacagccatctgtgacgcctctgaggcctgtgtggctgctcttctgggtaacagggtgagccgtctccctcccccatccatgcttctgtcaggcaggtaagcccggctctcaggactacccaaggagcaggcagatgggatgggacagggtgggagtggccaagcctgaaacaaggtaggcgaagcgaaagcctctgttccaagttaggtccaggcagcatctcctggcctaggtagagtgtgcttgtggctagaaggctggggcccctggggtgggagtgagctgggcctgtgggtccctgagagactggtggctgatgtactgttttctataggtggatcccctttcagaagaaggctggaaacagaaacccaacctcaatgccatccgctctctggaggccgtgatccgggtgcacagtaagtgtggagatgggacactcgctgagctcagactgaaggatcttggtggtaccctgccccaccgtggccagatcctagggcttccggtgccagccaggtgacctgctgttggtctggagtaagattcctgtgagtgacccaggcagcaatggtgagcaccccccagtgaggggttatcctctgagcccccccgatggagccagcagggcctaccagacagtggcccctcaaggtagggactggcctccatctctagcgacagccctagaccagggccaggtcaagagcaacactcaggccttgtttgccaaaaggcctggttcccatccctcccctcagtcctggccacaggcgtctcaggagctctgctggcttgggggctgcgtcttgggataacccccacatttgtaaagtactttaaattttcaacttcaactcaacatctattgagcatcttatgtcaagacccataatctatactagggataaaaatgagtaaaatagattcccatatcaagggctgggtaggggagccgtgatgtctttacataatggtaaagacatggctgattcctcttacggtgggtgccctcacactgagccagattccaggacatggttcctcacagcagcaggcaggaggagcattctcctggcctgggcacccatgcagagcggccgtggtgatggtcagttctcccatgttgtgttcgtcccacctcccaggccctcctttcctgagtgctgggctgagcactggtgggggctgtgtttaagtgggaggcccgagcttggggctctgggaggtcactgtgacacagaccctgtctgcaggcaagcaggctctcctgatgctctcaggagccccgcacctgtggggaatgagtcaaaggtggccttgcagccacaggggatgagagaaaggctgggcacctgctaggactccctcacagccatgttgaacccactctgcgtaccctgtcaggctgtgcgggagtgggagcgaagtgaggagaggggcaggtgggagagccgaccccaagtggaggacaggcccgctcctccggggccctgggcctgagacaccaacctcaatatccggtctaggacgcagtgtggaggggcttgctttctccaaccctttctgacctggcatcttaccccaggtaaatactggggctgcatgcagcgcctggcctcctgtccagactcctgggtgcctagagtgccaggggctgacaaagaagaagtggaggcagtgaccgcactggcgtccctctctgtgggcatcctggctgaagataggccctcggagcagctggtggaggaggaagaacctatgaatctctaaggctctggaaccatctgcccgcccaccatgcccttgggacctggttctcttctaacccctggcaatagcccccattcctgggtctttagagatcctgtgggcaagtagttggaaccagagaacagcctgcctgctttgacagttatcccagggagcgtgagaaaatccctgggtctagaatgggaactggagaggaccctgagaggagacgggctgggcggcgacccccacagggctctcgagaacagattctcccctccagtatgggccctggctgtggcccccattcctcaggactgcacagaggaggactggctccggctccgtcgggctcacccttaaccactattcctggctctgcaaaccccagactttgcacacagccccaggctccacacagaaatgtgaacttggcctcagacaggctggcccttcctaggctctaggggctaggggggagtggggagccaagaggtcccatattcctgagtgcaggggtagtccctctcacctgcttcctcagacgactctggaagcttccctctaccaccgggcactgagacgaagctccctgacagccgagactggcagccctccatctggtccgtaccctcgccagaggcccccctacatcaacctcctggcgatgccctggtggagcagatgggtgctctgggagtcctgtgcttcctgatccaatggtgccaaacccttcatctcccccagaagcgcagcatacccctgggacccctcggccactgcccactcggggagccttctctgtttctggggcctcccccaccatagctctgattcccaccccacataggaatagcctgactgagggggaaggggtgggagagaagatacagacatggaggaggggaggctgctctggcaaagtcttcaaggcttttgggggtccaggcctggggtcaagaaggaaaatgtgtgtgagcatgtgtgtgagtgaggcgtgtgtgtgagcgtgtgtgtgagtgaggcgtgtgtgtgtgtctttcctaggacccaccataccctgtgtatgtatgcatgtttttgtaaaaaggaagaaaatggaaaaaaatctgaacaataaatgttttatttgcttta

SEQ ID NO: 368462 - DNA, 5462 bp, Homo sapiens
aagttcagtttccccatcagtaaaatggggagaaaattccaagcacacttctcagagcagagcagaagaggttgactatggagaggagaatgaagatgggacccaggtgagcccgggtgcccactactgcagccccactggcgcaggctgccccaggccctgtgcagacacaccaggccctcagccgcagcccatggacctgcgggtgggccagcggcccccagtggagcccccaccagagcccacattgctggccctgcagcgtccccagcgcctgcaccaccacctcttcctagcaggcctgcagcagcagcgctcggtggagcccatgaggctctccatggacacgccgatgcccgagttgcaggtgggaccccaggaacaagagctgcggcagcttctccacaaggacaagagcaagcgaagtgctgtagccagcagcgtggtcaagcagaagctagcggaggtgattctgaaaaaacagcaggcggccctagaaagaacagtccatcccaacagccccggcattccctacagaaccctggagcccctggagacggaaggagccacccgctccatgctcagcagctttttgcctcctgttcccagcctgcccagtgaccccccagagcacttccctctgcgcaagacagtctctgagcccaacctgaagctgcgctataagcccaagaagtccctggagcggaggaagaatccactgctccgaaaggagagtgcgccccccagcctccggcggcggcccgcagagaccctcggagactcctccccaagtagtagcagcacgcccgcatcagggtgcagctcccccaatgacagcgagcacggccccaatcccatcctgggctcggaggctgacagtgaccgcaggacccatccgactctgggccctcgggggccaatcctggggagcccccacactcccctcttcctgccccatggcttggagcccgaggctgggggcaccttgccctctcgcctgcagcccattctcctcctggacccctcaggctctcatgccccgctgctgactgtgcccgggcttgggcccttgcccttccactttgcccagtccttaatgaccaccgagcggctctctgggtcaggcctccactggccactgagccggactcgctcagagcccctgccccccagtgccaccgctcccccaccgccgggccccatgcagccccgcctggagcagctcaaaactcacgtccaggtgatcaagaggtcagccaagccgagtgagaagccccggctgcggcagataccctcggctgaagacctggagacagatggcgggggaccgggccaggtggtggacgatggcctggagcacagggagctgggccatgggcagcctgaggccagaggccccgctcctctccagcagcaccctcaggtgttgctctgggaacagcagcgactggctgggcggctcccccggggcagcaccggggacactgtgctgcttcctctggcccagggtgggcaccggcctctgtcccgggctcagtcttccccagccgcacctgcctcactgtcagccccagagcctgccagccaggcccgagtcctctccagctcagagacccctgccaggaccctgcccttcaccacaggtgagaccgggaggagggtggcgggtggagggaggggctcggctgcacgagtccatgtgggtgtcttggtgtcacttgggacatttttagaggccacagagtgcttagccttgttaggcccacgtagtacccatggagcacatggaacagctggttattgcatttggccgatgaggaccaaggctcacgaaatctaaggtgacaagcctgtggtcaaatagcaagtggtagtcaagccaggataagaattccagtctcctgccaatgcactcagcccttttaaaaaatgatatttattactgttgctctgcttgtaaaaagagctcagaagtattttagacattttgaagagtacagaaaaacctaagaagaaaagaaaaatcaccaaccagtatcccaccacccagaagtaacccctctgaaattctgctgtatttcagtccaggctttgttctggccatatgtacatgtacagatgccatgaacacatgaactacgttttgtatcctgctttacttagttaacatattatgaatccttcttggcataattagtctttaaaactgagagtctcatagtatttcattaatgtatttcatttttactgagggatcccttatcagttagacatttagattatagcttatttgaatttccttatgcataaatctttcctcatgcttgggattatttcccaaggttcactctaaagaagtagcattcctgggtcacatggtgtgagcattttgagagtcgttggtgtcctagacgcacagaaattgaccctcccacccgcaatgagcaggaccctcctctgaagacttcccacgggtcagactgaaatagtcacttctccaaagctggatttgtctatcacatggtccagtgtcatcgtgggcttcttagctcccggtttgggggtttcctaggaattcttttccctcctgctgccccttggtagcctctctgggttcatgacacgtgtgtgagatgctgtacgttaggcctcatgctttgctctgagcacttgagggcctggtgctgggccctcgagtcctgggccacccagcagtcgtgtccgcatgtgggaaggccgtggctctgtggcagccatgttggctggagctgtgttgatgtgttggctgctgccacctggggaagtgtctgggcgtgtgtggacaggtgtgaggggctggggctggggtaggggcaggatgaaatgcaggcctgtgtgggtgtgaggggtgtgtacccgcccggctccatgtgggtgcctgctgtggcggtgctggcgtgttctctgcagccaaggccatggggcgtgaggactccctgggtccccgctctgacccttgctcctgcagggctgatctatgactcggtcatgctgaagcaccagtgctcctgcggtgacaacagcaggcacccggagcacgccggccgcatccagagcatctggtcccggctgcaggagcgggggctccggagccagtgtgagtgtctccgaggccggaaggcctccctggaagagctgcagtcggtccactctgagcggcacgtgctcctctacggcaccaacccgctcagccgcctcaaactggacaacgggaagctggcagggctcctggcacagcggatgtttgtgatgctgccctgtggtggggttggggtggacactgacaccatctggaatgagcttcattcctccaatgcagcccgctgggccgctggcagtgtcactgacctcgccttcaaagtggcttctcgtgagctaaagaatggtttcgctgtggtgcggcccccaggacaccatgcagatcattcaacagccatgggcttctgcttcttcaactcagtggccatcgcctgccggcagctgcaacagcagagcaaggccagcaagatcctcattgtagactgggacgtgcaccatggcaacggcacccagcaaaccttctaccaagaccccagtgtgctctacatctccctgcatcgccatgacgacggcaacttcttcccggggagtggggctgtggatgaggtaggggctggcagcggtgagggcttcaatgtcaatgtggcctgggctggaggtctggacccccccatgggggatcctgagtacctggctgctttcaggatagtcgtgatgcccatcgcccgagagttctctccagacctagtcctggtgtctgctggatttgatgctgctgagggtcacccggccccactgggtggctaccatgtttctgccaaatgttttggatacatgacgcagcaactgatgaacctggcaggaggcgcagtggtgctggccttggagggtggccatgacctcacagccatctgtgacgcctctgaggcctgtgtggctgctcttctgggtaacagggtgagccgtctccctcccccatccatgcttctgtcaggcaggtggatcccctttcagaagaaggctggaaacagaaacccaacctcaatgccatccgctctctggaggccgtgatccgggtgcacagtaaatactggggctgcatgcagcgcctggcctcctgtccagactcctgggtgcctagagtgccaggggctgacaaagaagaagtggaggcagtgaccgcactggcgtccctctctgtgggcatcctggctgaagataggccctcggagcagctggtggaggaggaagaacctatgaatctctaaggctctggaaccatctgcccgcccaccatgcccttgggacctggttctcttctaacccctggcaatagcccccattcctgggtctttagagatcctgtgggcaagtagttggaaccagagaacagcctgcctgctttgacagttatcccagggagcgtgagaaaatccctgggtctagaatgggaactggagaggaccctgagaggagacgggctgggcggcgacccccacagggctctcgagaacagattctcccctccagtatgggccctggctgtggcccccattcctcaggactgcacagaggaggactggctccggctccgtcgggctcacccttaaccactattcctggctctgcaaaccccagactttgcacacagccccaggctccacacagaaatgtgaacttggcctcagacaggctggcccttcctaggctctaggggctaggggggagtggggagccaagaggtcccatattcctgagtgcaggggtagtccctctcacctgcttcctcagacgactctggaagcttccctctaccaccgggcactgagacgaagctccctgacagccgagactggcagccctccatctggtccgtaccctcgccagaggcccccctacatcaacctcctggcgatgccctggtggagcagatgggtgctctgggagtcctgtgcttcctgatccaatggtgccaaacccttcatctcccccagaagcgcagcatacccctgggacccctcggccactgcccactcggggagccttctctgtttctggggcctcccccaccatagctctgattcccaccccacataggaatagcctgactgagggggaaggggtgggagagaagatacagacatggaggaggggaggctgctctggcaaagtcttcaaggcttttgggggtccaggcctggggtcaagaaggaaaatgtgtgtgagcatgtgtgtgagtgaggcgtgtgtgtgagcgtgtgtgtgagtgaggcgtgtgtgtgtgtctttcctaggacccaccataccctgtgtatgtatgcatgtttttgtaaaaaggaagaaaatggaaaaaaatctgaacaataaatgttttatttgcttta

SEQ ID NO: 368463 - DNA, 5575 bp, Homo sapiens
aagttcagtttccccatcagtaaaatggggagaaaattccaagcacacttctcagagcagagcagaagaggttgactatggagaggagaatgaagatgggacccaggtgagcccgggtgcccactactgcagccccactggcgcaggctgccccaggccctgtgcagacacaccaggccctcagccgcagcccatggacctgcgggtgggccagcggcccccagtggagcccccaccagagcccacattgctggccctgcagcgtccccagcgcctgcaccaccacctcttcctagcaggcctgcagcagcagcgctcggtggagcccatgaggctctccatggacacgccgatgcccgagttgcaggtgggaccccaggaacaagagctgcggcagcttctccacaaggacaagagcaagcgaagtgctgtagccagcagcgtggtcaagcagaagctagcggaggtgattctgaaaaaacagcaggcggccctagaaagaacagtccatcccaacagccccggcattccctacagaaccctggagcccctggagacggaaggagccacccgctccatgctcagcagctttttgcctcctgttcccagcctgcccagtgaccccccagagcacttccctctgcgcaagacagtctctgagcccaacctgaagctgcgctataagcccaagaagtccctggagcggaggaagaatccactgctccgaaaggagagtgcgccccccagcctccggcggcggcccgcagagaccctcggagactcctccccaagtagtagcagcacgcccgcatcagggtgcagctcccccaatgacagcgagcacggccccaatcccatcctgggctcggaggctgacagtgaccgcaggacccatccgactctgggccctcgggggccaatcctggggagcccccacactcccctcttcctgccccatggcttggagcccgaggctgggggcaccttgccctctcgcctgcagcccattctcctcctggacccctcaggctctcatgccccgctgctgactgtgcccgggcttgggcccttgcccttccactttgcccagtccttaatgaccaccgagcggctctctgggtcaggcctccactggccactgagccggactcgctcagagcccctgccccccagtgccaccgctcccccaccgccgggccccatgcagccccgcctggagcagctcaaaactcacgtccaggtgatcaagaggtcagccaagccgagtgagaagccccggctgcggcagataccctcggctgaagacctggagacagatggcgggggaccgggccaggtggtggacgatggcctggagcacagggagctgggccatgggcagcctgaggccagaggccccgctcctctccagcagcaccctcaggtgttgctctgggaacagcagcgactggctgggcggctcccccggggcagcaccggggacactgtgctgcttcctctggcccagggtgggcaccggcctctgtcccgggctcagtcttccccagccgcacctgcctcactgtcagccccagagcctgccagccaggcccgagtcctctccagctcagagacccctgccaggaccctgcccttcaccacaggtgagaccgggaggagggtggcgggtggagggaggggctcggctgcacgagtccatgtgggtgtcttggtgtcacttgggacatttttagaggccacagagtgcttagccttgttaggcccacgtagtacccatggagcacatggaacagctggttattgcatttggccgatgaggaccaaggctcacgaaatctaaggtgacaagcctgtggtcaaatagcaagtggtagtcaagccaggataagaattccagtctcctgccaatgcactcagcccttttaaaaaatgatatttattactgttgctctgcttgtaaaaagagctcagaagtattttagacattttgaagagtacagaaaaacctaagaagaaaagaaaaatcaccaaccagtatcccaccacccagaagtaacccctctgaaattctgctgtatttcagtccaggctttgttctggccatatgtacatgtacagatgccatgaacacatgaactacgttttgtatcctgctttacttagttaacatattatgaatccttcttggcataattagtctttaaaactgagagtctcatagtatttcattaatgtatttcatttttactgagggatcccttatcagttagacatttagattatagcttatttgaatttccttatgcataaatctttcctcatgcttgggattatttcccaaggttcactctaaagaagtagcattcctgggtcacatggtgtgagcattttgagagtcgttggtgtcctagacgcacagaaattgaccctcccacccgcaatgagcaggaccctcctctgaagacttcccacgggtcagactgaaatagtcacttctccaaagctggatttgtctatcacatggtccagtgtcatcgtgggcttcttagctcccggtttgggggtttcctaggaattcttttccctcctgctgccccttggtagcctctctgggttcatgacacgtgtgtgagatgctgtacgttaggcctcatgctttgctctgagcacttgagggcctggtgctgggccctcgagtcctgggccacccagcagtcgtgtccgcatgtgggaaggccgtggctctgtggcagccatgttggctggagctgtgttgatgtgttggctgctgccacctggggaagtgtctgggcgtgtgtggacaggtgtgaggggctggggctggggtaggggcaggatgaaatgcaggcctgtgtgggtgtgaggggtgtgtacccgcccggctccatgtgggtgcctgctgtggcggtgctggcgtgttctctgcagccaaggccatggggcgtgaggactccctgggtccccgctctgacccttgctcctgcagggctgatctatgactcggtcatgctgaagcaccagtgctcctgcggtgacaacagcaggcacccggagcacgccggccgcatccagagcatctggtcccggctgcaggagcgggggctccggagccagtgtgagtgtctccgaggccggaaggcctccctggaagagctgcagtcggtccactctgagcggcacgtgctcctctacggcaccaacccgctcagccgcctcaaactggacaacgggaagctggcagggctcctggcacagcggatgtttgtgatgctgccctgtggtggggttggggtggacactgacaccatctggaatgagcttcattcctccaatgcagcccgctgggccgctggcagtgtcactgacctcgccttcaaagtggcttctcgtgagctaaagaatggtttcgctgtggtgcggcccccaggacaccatgcagatcattcaacagccatgggcttctgcttcttcaactcagtggccatcgcctgccggcagctgcaacagcagagcaaggccagcaagatcctcattgtagactgggacgtgcaccatggcaacggcacccagcaaaccttctaccaagaccccagtgtgctctacatctccctgcatcgccatgacgacggcaacttcttcccggggagtggggctgtggatgaggtaggggctggcagcggtgagggcttcaatgtcaatgtggcctgggctggaggtctggacccccccatgggggatcctgagtacctggctgctttcaggatagtcgtgatgcccatcgcccgagagttctctccagacctagtcctggtgtctgctggatttgatgctgctgagggtcacccggccccactgggtggctaccatgtttctgccaaatgttttggatacatgacgcagcaactgatgaacctggcaggaggcgcagtggtgctggccttggagggtggccatgacctcacagccatctgtgacgcctctgaggcctgtgtggctgctcttctgggtaacagggtggatcccctttcagaagaaggctggaaacagaaacccaacctcaatgccatccgctctctggaggccgtgatccgggtgcacagtaagtgtggagatgggacactcgctgagctcagactgaaggatcttggtggtaccctgccccaccgtggccagatcctagggcttccggtgccagccaggtgacctgctgttggtctggagtaagattcctgtgagtgacccaggcagcaatggtaaatactggggctgcatgcagcgcctggcctcctgtccagactcctgggtgcctagagtgccaggggctgacaaagaagaagtggaggcagtgaccgcactggcgtccctctctgtgggcatcctggctgaagataggccctcggagcagctggtggaggaggaagaacctatgaatctctaaggctctggaaccatctgcccgcccaccatgcccttgggacctggttctcttctaacccctggcaatagcccccattcctgggtctttagagatcctgtgggcaagtagttggaaccagagaacagcctgcctgctttgacagttatcccagggagcgtgagaaaatccctgggtctagaatgggaactggagaggaccctgagaggagacgggctgggcggcgacccccacagggctctcgagaacagattctcccctccagtatgggccctggctgtggcccccattcctcaggactgcacagaggaggactggctccggctccgtcgggctcacccttaaccactattcctggctctgcaaaccccagactttgcacacagccccaggctccacacagaaatgtgaacttggcctcagacaggctggcccttcctaggctctaggggctaggggggagtggggagccaagaggtcccatattcctgagtgcaggggtagtccctctcacctgcttcctcagacgactctggaagcttccctctaccaccgggcactgagacgaagctccctgacagccgagactggcagccctccatctggtccgtaccctcgccagaggcccccctacatcaacctcctggcgatgccctggtggagcagatgggtgctctgggagtcctgtgcttcctgatccaatggtgccaaacccttcatctcccccagaagcgcagcatacccctgggacccctcggccactgcccactcggggagccttctctgtttctggggcctcccccaccatagctctgattcccaccccacataggaatagcctgactgagggggaaggggtgggagagaagatacagacatggaggaggggaggctgctctggcaaagtcttcaaggcttttgggggtccaggcctggggtcaagaaggaaaatgtgtgtgagcatgtgtgtgagtgaggcgtgtgtgtgagcgtgtgtgtgagtgaggcgtgtgtgtgtgtctttcctaggacccaccataccctgtgtatgtatgcatgtttttgtaaaaaggaagaaaatggaaaaaaatctgaacaataaatgttttatttgcttta

SEQ ID NO: 368464 - DNA, 6782 bp, Homo sapiens
aagttcagtttccccatcagtaaaatggggagaaaattccaagcacacttctcagagcagagcagaagaggttgactatggagaggagaatgaagatgggacccaggtgagcccgggtgcccactactgcagccccactggcgcaggctgccccaggccctgtgcagacacaccaggccctcagccgcagcccatggacctgcgggtgggccagcggcccccagtggagcccccaccagagcccacattgctggccctgcagcgtccccagcgcctgcaccaccacctcttcctagcaggcctgcagcagcagcgctcggtggagcccatgaggctctccatggacacgccgatgcccgagttgcaggtgggaccccaggaacaagagctgcggcagcttctccacaaggacaagagcaagcgaagtgctgtagccagcagcgtggtcaagcagaagctagcggaggtgattctgaaaaaacagcaggcggccctagaaagaacagtccatcccaacagccccggcattccctacagaaccctggagcccctggagacggaaggagccacccgctccatgctcagcagctttttgcctcctgttcccagcctgcccagtgaccccccagagcacttccctctgcgcaagacagtctctgagcccaacctgaagctgcgctataagcccaagaagtccctggagcggaggaagaatccactgctccgaaaggagagtgcgccccccagcctccggcggcggcccgcagagaccctcggagactcctccccaagtagtagcagcacgcccgcatcagggtgcagctcccccaatgacagcgagcacggccccaatcccatcctgggctcggaggctgacagtgaccgcaggacccatccgactctgggccctcgggggccaatcctggggagcccccacactcccctcttcctgccccatggcttggagcccgaggctgggggcaccttgccctctcgcctgcagcccattctcctcctggacccctcaggctctcatgccccgctgctgactgtgcccgggcttgggcccttgcccttccactttgcccagtccttaatgaccaccgagcggctctctgggtcaggcctccactggccactgagccggactcgctcagagcccctgccccccagtgccaccgctcccccaccgccgggccccatgcagccccgcctggagcagctcaaaactcacgtccaggtgatcaagaggtcagccaagccgagtgagaagccccggctgcggcagataccctcggctgaagacctggagacagatggcgggggaccgggccaggtggtggacgatggcctggagcacagggagctgggccatgggcagcctgaggccagaggccccgctcctctccagcagcaccctcaggtgttgctctgggaacagcagcgactggctgggcggctcccccggggcagcaccggggacactgtgctgcttcctctggcccagggtgggcaccggcctctgtcccgggctcagtcttccccagccgcacctgcctcactgtcagccccagagcctgccagccaggcccgagtcctctccagctcagagacccctgccaggaccctgcccttcaccacaggtgagaccgggaggagggtggcgggtggagggaggggctcggctgcacgagtccatgtgggtgtcttggtgtcacttgggacatttttagaggccacagagtgcttagccttgttaggcccacgtagtacccatggagcacatggaacagctggttattgcatttggccgatgaggaccaaggctcacgaaatctaaggtgacaagcctgtggtcaaatagcaagtggtagtcaagccaggataagaattccagtctcctgccaatgcactcagcccttttaaaaaatgatatttattactgttgctctgcttgtaaaaagagctcagaagtattttagacattttgaagagtacagaaaaacctaagaagaaaagaaaaatcaccaaccagtatcccaccacccagaagtaacccctctgaaattctgctgtatttcagtccaggctttgttctggccatatgtacatgtacagatgccatgaacacatgaactacgttttgtatcctgctttacttagttaacatattatgaatccttcttggcataattagtctttaaaactgagagtctcatagtatttcattaatgtatttcatttttactgagggatcccttatcagttagacatttagattatagcttatttgaatttccttatgcataaatctttcctcatgcttgggattatttcccaaggttcactctaaagaagtagcattcctgggtcacatggtgtgagcattttgagagtcgttggtgtcctagacgcacagaaattgaccctcccacccgcaatgagcaggaccctcctctgaagacttcccacgggtcagactgaaatagtcacttctccaaagctggatttgtctatcacatggtccagtgtcatcgtgggcttcttagctcccggtttgggggtttcctaggaattcttttccctcctgctgccccttggtagcctctctgggttcatgacacgtgtgtgagatgctgtacgttaggcctcatgctttgctctgagcacttgagggcctggtgctgggccctcgagtcctgggccacccagcagtcgtgtccgcatgtgggaaggccgtggctctgtggcagccatgttggctggagctgtgttgatgtgttggctgctgccacctggggaagtgtctgggcgtgtgtggacaggtgtgaggggctggggctggggtaggggcaggatgaaatgcaggcctgtgtgggtgtgaggggtgtgtacccgcccggctccatgtgggtgcctgctgtggcggtgctggcgtgttctctgcagccaaggccatggggcgtgaggactccctgggtccccgctctgacccttgctcctgcagggctgatctatgactcggtcatgctgaagcaccagtgctcctgcggtgacaacagcaggcacccggagcacgccggccgcatccagagcatctggtcccggctgcaggagcgggggctccggagccagtgtgagtgtctccgaggccggaaggcctccctggaagagctgcagtcggtccactctgagcggcacgtgctcctctacggcaccaacccgctcagccgcctcaaactggacaacgggaagctggcagggctcctggcacagcggatgtttgtgatgctgccctgtggtggggttggggtggacactgacaccatctggaatgagcttcattcctccaatgcagcccgctgggccgctggcagtgtcactgacctcgccttcaaagtggcttctcgtgagctaaagaatggtttcgctgtggtgcggcccccaggacaccatgcagatcattcaacagccatgggcttctgcttcttcaactcagtggccatcgcctgccggcagctgcaacagcagagcaaggccagcaagatcctcattgtagactgggacgtgcaccatggcaacggcacccagcaaaccttctaccaagaccccagtgtgctctacatctccctgcatcgccatgacgacggcaacttcttcccggggagtggggctgtggatgaggtaggggctggcagcggtgagggcttcaatgtcaatgtggcctgggctggaggtctggacccccccatgggggatcctgagtacctggctgctttcaggatagtcgtgatgcccatcgcccgagagttctctccagacctagtcctggtgtctgctggatttgatgctgctgagggtcacccggccccactgggtggctaccatgtttctgccaaatgttttggatacatgacgcagcaactgatgaacctggcaggaggcgcagtggtgctggccttggagggtggccatgacctcacagccatctgtgacgcctctgaggcctgtgtggctgctcttctgggtaacagggtggatcccctttcagaagaaggctggaaacagaaacccaacctcaatgccatccgctctctggaggccgtgatccgggtgcacagtaagtgtggagatgggacactcgctgagctcagactgaaggatcttggtggtaccctgccccaccgtggccagatcctagggcttccggtgccagccaggtgacctgctgttggtctggagtaagattcctgtgagtgacccaggcagcaatggtgagcaccccccagtgaggggttatcctctgagcccccccgatggagccagcagggcctaccagacagtggcccctcaaggtagggactggcctccatctctagcgacagccctagaccagggccaggtcaagagcaacactcaggccttgtttgccaaaaggcctggttcccatccctcccctcagtcctggccacaggcgtctcaggagctctgctggcttgggggctgcgtcttgggataacccccacatttgtaaagtactttaaattttcaacttcaactcaacatctattgagcatcttatgtcaagacccataatctatactagggataaaaatgagtaaaatagattcccatatcaagggctgggtaggggagccgtgatgtctttacataatggtaaagacatggctgattcctcttacggtgggtgccctcacactgagccagattccaggacatggttcctcacagcagcaggcaggaggagcattctcctggcctgggcacccatgcagagcggccgtggtgatggtcagttctcccatgttgtgttcgtcccacctcccaggccctcctttcctgagtgctgggctgagcactggtgggggctgtgtttaagtgggaggcccgagcttggggctctgggaggtcactgtgacacagaccctgtctgcaggcaagcaggctctcctgatgctctcaggagccccgcacctgtggggaatgagtcaaaggtggccttgcagccacaggggatgagagaaaggctgggcacctgctaggactccctcacagccatgttgaacccactctgcgtaccctgtcaggctgtgcgggagtgggagcgaagtgaggagaggggcaggtgggagagccgaccccaagtggaggacaggcccgctcctccggggccctgggcctgagacaccaacctcaatatccggtctaggacgcagtgtggaggggcttgctttctccaaccctttctgacctggcatcttaccccaggtaaatactggggctgcatgcagcgcctggcctcctgtccagactcctgggtgcctagagtgccaggggctgacaaagaagaagtggaggcagtgaccgcactggcgtccctctctgtgggcatcctggctgaagataggtaatgccagacccctggccctgggcccacagcctctccaccgcttcattcctccctgcttgaagaccccgggtccgctatgcagccaccccaaccctcccaggcttcctgaccagggttgagaggaagcttagctaaggcccttgctgcaggcctggtgctccagcatcccacccttgtccctccccacaggccctcggagcagctggtggaggaggaagaacctatgaatctctaaggctctggaaccatctgcccgcccaccatgcccttgggacctggttctcttctaacccctggcaatagcccccattcctgggtctttagagatcctgtgggcaagtagttggaaccagagaacagcctgcctgctttgacagttatcccagggagcgtgagaaaatccctgggtctagaatgggaactggagaggaccctgagaggagacgggctgggcggcgacccccacagggctctcgagaacagattctcccctccagtatgggccctggctgtggcccccattcctcaggactgcacagaggaggactggctccggctccgtcgggctcacccttaaccactattcctggctctgcaaaccccagactttgcacacagccccaggctccacacagaaatgtgaacttggcctcagacaggctggcccttcctaggctctaggggctaggggggagtggggagccaagaggtcccatattcctgagtgcaggggtagtccctctcacctgcttcctcagacgactctggaagcttccctctaccaccgggcactgagacgaagctccctgacagccgagactggcagccctccatctggtccgtaccctcgccagaggcccccctacatcaacctcctggcgatgccctggtggagcagatgggtgctctgggagtcctgtgcttcctgatccaatggtgccaaacccttcatctcccccagaagcgcagcatacccctgggacccctcggccactgcccactcggggagccttctctgtttctggggcctcccccaccatagctctgattcccaccccacataggaatagcctgactgagggggaaggggtgggagagaagatacagacatggaggaggggaggctgctctggcaaagtcttcaaggcttttgggggtccaggcctggggtcaagaaggaaaatgtgtgtgagcatgtgtgtgagtgaggcgtgtgtgtgagcgtgtgtgtgagtgaggcgtgtgtgtgtgtctttcctaggacccaccataccctgtgtatgtatgcatgtttttgtaaaaaggaagaaaatggaaaaaaatctgaacaataaatgttttatttgcttta

SEQ ID NO: 368465 - DNA, 4099 bp, Homo sapiens
aagttcagtttccccatcagtaaaatggggagaaaattccaagcacacttctcagagcagagcagaagaggttgactatggagaggagaatgaagatgggacccaggtgagcccgggtgcccactactgcagccccactggcgcaggctgccccaggccctgtgcagacacaccaggccctcagccgcagcccatggacctgcgggtgggccagcggcccccagtggagcccccaccagagcccacattgctggccctgcagcgtccccagcgcctgcaccaccacctcttcctagcaggcctgcagcagcagcgctcggtggagcccatgaggctctccatggacacgccgatgcccgagttgcaggtgggaccccaggaacaagagctgcggcagcttctccacaaggacaagagcaagcgaagtgctgtagccagcagcgtggtcaagcagaagctagcggaggtgattctgaaaaaacagcaggcggccctagaaagaacagtccatcccaacagccccggcattccctacagaaccctggagcccctggagacggaaggagccacccgctccatgctcagcagctttttgcctcctgttcccagcctgcccagtgaccccccagagcacttccctctgcgcaagacagtctctgagcccaacctgaagctgcgctataagcccaagaagtccctggagcggaggaagaatccactgctccgaaaggagagtgcgccccccagcctccggcggcggcccgcagagaccctcggagactcctccccaagtagtagcagcacgcccgcatcagggtgcagctcccccaatgacagcgagcacggccccaatcccatcctgggctcggaggctgacagtgaccgcaggacccatccgactctgggccctcgggggccaatcctggggagcccccacactcccctcttcctgccccatggcttggagcccgaggctgggggcaccttgccctctcgcctgcagcccattctcctcctggacccctcaggctctcatgccccgctgctgactgtgcccgggcttgggcccttgcccttccactttgcccagtccttaatgaccaccgagcggctctctgggtcaggcctccactggccactgagccggactcgctcagagcccctgccccccagtgccaccgctcccccaccgccgggccccatgcagccccgcctggagcagctcaaaactcacgtccaggtgatcaagaggtcagccaagccgagtgagaagccccggctgcggcagataccctcggctgaagacctggagacagatggcgggggaccgggccaggtggtggacgatggcctggagcacagggagctgggccatgggcagcctgaggccagaggccccgctcctctccagcagcaccctcaggtgttgctctgggaacagcagcgactggctgggcggctcccccggggcagcaccggggacactgtgctgcttcctctggcccagggtgggcaccggcctctgtcccgggctcagtcttccccagccgcacctgcctcactgtcagccccagagcctgccagccaggcccgagtcctctccagctcagagacccctgccaggaccctgcccttcaccacaggtgagaccgggaggagggtggcgggtggagggaggggctcggctgcacgagtccatgtgggtgtcttggtgtcacttgggacatttttagaggccacagagtgcttagccttgttaggcccacgtagtacccatggagcacatggaacagctggttattgcatttggccgatgaggaccaaggctcacgaaatctaaggtgacaagcctgtggtcaaatagcaagtggtagtcaagccaggataagaattccagtctcctgccaatgcactcagcccttttaaaaaatgatatttattactgttgctctgcttgtaaaaagagctcagaagtattttagacattttgaagagtacagaaaaacctaagaagaaaagaaaaatcaccaaccagtatcccaccacccagaagtaacccctctgaaattctgctgtatttcagtccaggctttgttctggccatatgtacatgtacagatgccatgaacacatgaactacgttttgtatcctgctttacttagttaacatattatgaatccttcttggcataattagtctttaaaactgagagtctcatagtatttcattaatgtatttcatttttactgagggatcccttatcagttagacatttagattatagcttatttgaatttccttatgcataaatctttcctcatgcttgggattatttcccaaggttcactctaaagaagtagcattcctgggtcacatggtgtgagcattttgagagtcgttggtgtcctagacgcacagaaattgaccctcccacccgcaatgagcaggaccctcctctgaagacttcccacgggtcagactgaaatagtcacttctccaaagctggatttgtctatcacatggtccagtgtcatcgtgggcttcttagctcccggtttgggggtttcctaggaattcttttccctcctgctgccccttggtagcctctctgggttcatgacacgtgtgtgagatgctgtacgttaggcctcatgctttgctctgagcacttgagggcctggtgctgggccctcgagtcctgggccacccagcagtcgtgtccgcatgtgggaaggccgtggctctgtggcagccatgttggctggagctgtgttgatgtgttggctgctgccacctggggaagtgtctgggcgtgtgtggacaggtgtgaggggctggggctggggtaggggcaggatgaaatgcaggcctgtgtgggtgtgaggggtgtgtacccgcccggctccatgtgggtgcctgctgtggcggtgctggcgtgttctctgcagccaaggccatggggcgtgaggactccctgggtccccgctctgacccttgctcctgcagggctgatctatgactcggtcatgctgaagcaccagtgctcctgcggtgacaacagcaggcacccggagcacgccggccgcatccagagcatctggtcccggctgcaggagcgggggctccggagccagtgtgagtgtctccgaggccggaaggcctccctggaagagctgcagtcggtccactctgagcggcacgtgctcctctacggcaccaacccgctcagccgcctcaaactggacaacgggaagctggcagggctcctggcacagcggatgtttgtgatgctgccctgtggtggggttggggtggacactgacaccatctggaatgagcttcattcctccaatgcagcccgctgggccgctggcagtgtcactgacctcgccttcaaagtggcttctcgtgagctaaagaatggtttcgctgtggtgcggcccccaggacaccatgcagatcattcaacagccatgggcttctgcttcttcaactcagtggccatcgcctgccggcagctgcaacagcagagcaaggccagcaagatcctcattgtagactgggtagtgatgataagaataatagcagataacatcagtacaccactaatcacatccagacactgatggttttacacatgatggatttaatcctgactataacccactttacagatgacagacgtgcaccatggcaactggacccagcagacttctacaagacccagtgggcgttactttccctggattgcctggagaccgggattttccggggaagtggggcgtggatagagagcgtgatgcccatgcgcgggagatctccgagactgaacgggggttgcggggaatgggacgggctgaggtacccggggccccgcggggggcgtccagcttttgttcccgcgttgtggttccttggcggccggtgtatagtgtgcgagtgcgggagtgttgcatcgggggggggacacacacccggtggagtagcgggtgggtctgttctggggggcacctcgtatgagggagcgccaccacctgtagtggttccatgactgtggggagcactcgcgcggagggtgtacgacacaccggtgcgtgc

SEQ ID NO: 368466 - DNA, 2735 bp, Homo sapiens
aagttcagtttccccatcagtaaaatggggagaaaattccaagcacacttctcagagcagagcagaagaggttgactatggagaggagaatgaagatgggacccaggtgagcccgggtgcccactactgcagccccactggcgcaggctgccccaggccctgtgcagacacaccaggccctcagccgcagcccatggacctgcgggtgggccagcggcccccagtggagcccccaccagagcccacattgctggccctgcagcgtccccagcgcctgcaccaccacctcttcctagcaggcctgcagcagcagcgctcggtggagcccatgaggctctccatggacacgccgatgcccgagttgcaggtgggaccccaggaacaagagctgcggcagcttctccacaaggacaagagcaagcgaagtgctgtagccagcagcgtggtcaagcagaagctagcggaggtgattctgaaaaaacagcaggcggccctagaaagaacagtccatcccaacagccccggcattccctacagaaccctggagcccctggagacggaaggagccacccgctccatgctcagcagctttttgcctcctgttcccagcctgcccagtgaccccccagagcacttccctctgcgcaagacagtctctgagcccaacctgaagctgcgctataagcccaagaagtccctggagcggaggaagaatccactgctccgaaaggagagtgcgccccccagcctccggcggcggcccgcagagaccctcggagactcctccccaagtagtagcagcacgcccgcatcagggtgcagctcccccaatgacagcgagcacggccccaatcccatcctgggctcggaggctgacagtgaccgcaggacccatccgactctgggccctcgggggccaatcctggggagcccccacactcccctcttcctgccccatggcttggagcccgaggctgggggcaccttgccctctcgcctgcagcccattctcctcctggacccctcaggctctcatgccccgctgctgactgtgcccgggcttgggcccttgcccttccactttgcccagtccttaatgaccaccgagcggctctctgggtcaggcctccactggccactgagccggactcgctcagagcccctgccccccagtgccaccgctcccccaccgccgggccccatgcagccccgcctggagcagctcaaaactcacgtccaggtgatcaagaggtcagccaagccgagtgagaagccccggctgcggcagataccctcggctgaagacctggagacagatggcgggggaccgggccaggtggtggacgatggcctggagcacagggagctgggccatgggcagcctgaggccagaggccccgctcctctccagcagcaccctcaggtgttgctctgggaacagcagcgactggctgggcggctcccccggggcagcaccggggacactgtgctgcttcctctggcccagggtgggcaccggcctctgtcccgggctcagtcttccccagccgcacctgcctcactgtcagccccagagcctgccagccaggcccgagtcctctccagctcagagacccctgccaggaccctgcccttcaccacagggctgatctatgactcggtcatgctgaagcaccagtgctcctgcggtgacaacagcaggcacccggagcacgccggccgcatccagagcatctggtcccggctgcaggagcgggggctccggagccagtgtgagtgtctccgaggccggaaggcctccctggaagagctgcagtcggtccactctgagcggcacgtgctcctctacggcaccaacccgctcagccgcctcaaactggacaacgggaagctggcagggctcctggcacagcggatgtttgtgatgctgccctgtggtggggttggggtggacactgacaccatctggaatgagcttcattcctccaatgcagcccgctgggccgctggcagtgtcactgacctcgccttcaaagtggcttctcgtgagctaaagaatggtttcgctgtggtgcggcccccaggacaccatgcagatcattcaacagccatgggcttctgcttcttcaactcagtggccatcgcctgccggcagctgcaacagcagagcaaggccagcaagatcctcattgtagactgggtagtgatgataagaataatagcagataacatcagtacaccactaatcacatccagacactgatggttttacacatgatggatttaatcctgactataacccactttacagatgacagacgtgcaccatggcaactggacccagcagacttctacaagacccagtgggcgttactttccctggattgcctggagaccgggattttccggggaagtggggcgtggatagagagcgtgatgcccatgcgcgggagatctccgagactgaacgggggttgcggggaatgggacgggctgaggtacccggggccccgcggggggcgtccagcttttgttcccgcgttgtggttccttggcggccggtgtatagtgtgcgagtgcgggagtgttgcatcgggggggggacacacacccggtggagtagcgggtgggtctgttctggggggcacctcgtatgagggagcgccaccacctgtagtggttccatgactgtggggagcactcgcgcggagggtgtacgacacaccggtgcgtgc

SEQ ID NO: 368467 - DNA, 1834 bp, Homo sapiens
aagttcagtttccccatcagtaaaatggggagaaaattccaagcacacttctcagagcagagcagaagaggttgactatggagaggagaatgaagatgggacccaggtgagcccgggtgcccactactgcagccccactggcgcaggctgccccaggccctgtgcagacacaccaggccctcagccgcagcccatggacctgcgggtgggccagcggcccccagtggagcccccaccagagcccacattgctggccctgcagcgtccccagcgcctgcaccaccacctcttcctagcaggcctgcagcagcagcgctcggtggagcccatgaggctctccatggacacgccgatgcccgagttgcaggtgggaccccaggaacaagagctgcggcagcttctccacaaggacaagagcaagcgaagtgctgtagccagcagcgtggtcaagcagaagctagcggaggtgattctgaaaaaacagcaggcggccctagaaagaacagtccatcccaacagccccggcattccctacagaaccctggagcccctggagacggaaggagccacccgctccatgctcagcagctttttgcctcctgttcccagcctgcccagtgaccccccagagcacttccctctgcgcaagacagtctctgagcccaacctgaagctgcgctataagcccaagaagtccctggagcggaggaagaatccactgctccgaaaggagagtgcgccccccagcctccggcggcggcccgcagagaccctcggagactcctccccaagtagtagcagcacgcccgcatcagggtgcagctcccccaatgacagcgagcacggccccaatcccatcctgggctcggaggctgacagtgaccgcaggacccatccgactctgggccctcgggggccaatcctggggagcccccacactcccctcttcctgccccatggcttggagcccgaggctgggggcaccttgccctctcgcctgcagcccattctcctcctggacccctcaggctctcatgccccgctgctgactgtgcccgggcttgggcccttgcccttccactttgcccagtccttaatgaccaccgagcggctctctgggtcaggcctccactggccactgagccggactcgctcagagcccctgccccccagtgccaccgctcccccaccgccgggccccatgcagccccgcctggagcagctcaaaactcacgtccaggtgatcaagaggtcagccaagccgagtgagaagccccggctgcggcagataccctcggctgaagacctggagacagatggcgggggaccgggccaggtggtggacgatggcctggagcacagggagctgggccatgggcagcctgaggccagaggccccgctcctctccagcagcaccctcaggtgttgctctgggaacagcagcgactggctgggcggctcccccggggcagcaccggggacactgtgctgcttcctctggcccagggtgggcaccggcctctgtcccgggctcagtcttccccagccgcacctgcctcactgtcagccccagagcctgccagccaggcccgagtcctctccagctcagagacccctgccaggaccctgcccttcaccacagggctgatctatgactcggtcatgctgaagcaccagtgctcctgcggtgacaacagcaggcacccggagcacgccggccgcatccagagcatctggtcccggctgcaggagctagcggaggtgattctgaaaaaacagcaggcggccctagaaagaacagtccatcccaacagccccggcattccctacaga

SEQ ID NO: 368468 - DNA, 4190 bp, Homo sapiens
ataatacctaccttgcaggaccacgacaggattaagtgaggaaaaacccccatgagagtgttttgccattgtcaagtgagcctgagggaggctgaggggggatcaggctgtatcatgcccccgaggacaaactttccagtttaccctgctccctctctctgtccctaggctgccccaggccctgtgcagacacaccaggccctcagccgcagcccatggacctgcgggtgggccagcggcccccagtggagcccccaccagagcccacattgctggccctgcagcgtccccagcgcctgcaccaccacctcttcctagcaggcctgcagcagcagcgctcggtggagcccatgaggctctccatggacacgccgatgcccgagttgcaggtgggaccccaggaacaagagctgcggcagcttctccacaaggacaagagcaagcgaagtgctgtagccagcagcgtggtcaagcagaagctagcggaggtgattctgaaaaaacagcaggcggccctagaaagaacagtccatcccaacagccccggcattccctacagaaccctggagcccctggagacggaaggagccacccgctccatgctcagcagctttttgcctcctgttcccagcctgcccagtgaccccccagagcacttccctctgcgcaagacagtctctgagcccaacctgaagctgcgctataagcccaagaagtccctggagcggaggaagaatccactgctccgaaaggagagtgcgccccccagcctccggcggcggcccgcagagaccctcggagactcctccccaagtagtagcagcacgcccgcatcagggtgcagctcccccaatgacagcgagcacggccccaatcccatcctgggctcggaggcgctcttgggccagcggctgcggctgcaggagacttctgtggccccgttcgccttgccgacagtgtccttgctgcccgcaatcactctggggctgcccgcccctgccagggctgacagtgaccgcaggacccatccgactctgggccctcgggggccaatcctggggagcccccacactcccctcttcctgccccatggcttggagcccgaggctgggggcaccttgccctctcgcctgcagcccattctcctcctggacccctcaggctctcatgccccgctgctgactgtgcccgggcttgggcccttgcccttccactttgcccagtccttaatgaccaccgagcggctctctgggtcaggcctccactggccactgagccggactcgctcagagcccctgccccccagtgccaccgctcccccaccgccgggccccatgcagccccgcctggagcagctcaaaactcacgtccaggtgatcaagaggtcagccaagccgagtgagaagccccggctgcggcagataccctcggctgaagacctggagacagatggcgggggaccgggccaggtggtggacgatggcctggagcacagggagctgggccatgggcagcctgaggccagaggccccgctcctctccagcagcaccctcaggtgttgctctgggaacagcagcgactggctgggcggctcccccggggcagcaccggggacactgtgctgcttcctctggcccagggtgggcaccggcctctgtcccgggctcagtcttccccagccgcacctgcctcactgtcagccccagagcctgccagccaggcccgagtcctctccagctcagagacccctgccaggaccctgcccttcaccacagggctgatctatgactcggtcatgctgaagcaccagtgctcctgcggtgacaacagcaggcacccggagcacgccggccgcatccagagcatctggtcccggctgcaggagcgggggctccggagccagtgtgagtgtctccgaggccggaaggcctccctggaagagctgcagtcggtccactctgagcggcacgtgctcctctacggcaccaacccgctcagccgcctcaaactggacaacgggaagctggcagggctcctggcacagcggatgtttgtgatgctgccctgtggtggggttggggtggacactgacaccatctggaatgagcttcattcctccaatgcagcccgctgggccgctggcagtgtcactgacctcgccttcaaagtggcttctcgtgagctaaagaatggtttcgctgtggtgcggcccccaggacaccatgcagatcattcaacagccatgggcttctgcttcttcaactcagtggccatcgcctgccggcagctgcaacagcagagcaaggccagcaagatcctcattgtagactgggacgtgcaccatggcaacggcacccagcaaaccttctaccaagaccccagtgtgctctacatctccctgcatcgccatgacgacggcaacttcttcccggggagtggggctgtggatgaggtaggggctggcagcggtgagggcttcaatgtcaatgtggcctgggctggaggtctggacccccccatgggggatcctgagtacctggctgctttcaggatagtcgtgatgcccatcgcccgagagttctctccagacctagtcctggtgtctgctggatttgatgctgctgagggtcacccggccccactgggtggctaccatgtttctgccaaatgttttggatacatgacgcagcaactgatgaacctggcaggaggcgcagtggtgctggccttggagggtggccatgacctcacagccatctgtgacgcctctgaggcctgtgtggctgctcttctgggtaacagggtggatcccctttcagaagaaggctggaaacagaaacccaacctcaatgccatccgctctctggaggccgtgatccgggtgcacagtaaatactggggctgcatgcagcgcctggcctcctgtccagactcctgggtgcctagagtgccaggggctgacaaagaagaagtggaggcagtgaccgcactggcgtccctctctgtgggcatcctggctgaagataggccctcggagcagctggtggaggaggaagaacctatgaatctctaaggctctggaaccatctgcccgcccaccatgcccttgggacctggttctcttctaacccctggcaatagcccccattcctgggtctttagagatcctgtgggcaagtagttggaaccagagaacagcctgcctgctttgacagttatcccagggagcgtgagaaaatccctgggtctagaatgggaactggagaggaccctgagaggagacgggctgggcggcgacccccacagggctctcgagaacagattctcccctccagtatgggccctggctgtggcccccattcctcaggactgcacagaggaggactggctccggctccgtcgggctcacccttaaccactattcctggctctgcaaaccccagactttgcacacagccccaggctccacacagaaatgtgaacttggcctcagacaggctggcccttcctaggctctaggggctaggggggagtggggagccaagaggtcccatattcctgagtgcaggggtagtccctctcacctgcttcctcagacgactctggaagcttccctctaccaccgggcactgagacgaagctccctgacagccgagactggcagccctccatctggtccgtaccctcgccagaggcccccctacatcaacctcctggcgatgccctggtggagcagatgggtgctctgggagtcctgtgcttcctgatccaatggtgccaaacccttcatctcccccagaagcgcagcatacccctgggacccctcggccactgcccactcggggagccttctctgtttctggggcctcccccaccatagctctgattcccaccccacataggaatagcctgactgagggggaaggggtgggagagaagatacagacatggaggaggggaggctgctctggcaaagtcttcaaggcttttgggggtccaggcctggggtcaagaaggaaaatgtgtgtgagcatgtgtgtgagtgaggcgtgtgtgtgagcgtgtgtgtgagtgaggcgtgtgtgtgtgtctttcctaggacccaccataccctgtgtatgtatgcatgtttttgtaaaaaggaagaaaatggaaaaaaatctgaacaataaatgttttatttgcttta

SEQ ID NO: 368469 - DNA, 5421 bp, Homo sapiens
aagttcagtttccccatcagtaaaatggggagaaaattccaagcacacttctcagagcagagcagaagaggttgactatggagaggagaatgaagatgggacccaggtgagcccgggtgcccactactgcagccccactggcgcaggctgccccaggccctgtgcagacacaccaggccctcagccgcagcccatggacctgcgggtgggccagcggcccccagtggagcccccaccagagcccacattgctggccctgcagcgtccccagcgcctgcaccaccacctcttcctagcaggcctgcagcagcagcgctcggtggagcccatgaggctctccatggacacgccgatgcccgagttgcaggtgggaccccaggaacaagagctgcggcagcttctccacaaggacaagagcaagcgaagtgctgtagccagcagcgtggtcaagcagaagctagcggaggtgattctgaaaaaacagcaggcggccctagaaagaacagtccatcccaacagccccggcattccctacagaaccctggagcccctggagacggaaggagccacccgctccatgctcagcagctttttgcctcctgttcccagcctgcccagtgaccccccagagcacttccctctgcgcaagacagtctctgagcccaacctgaagctgcgctataagcccaagaagtccctggagcggaggaagaatccactgctccgaaaggagagtgcgccccccagcctccggcggcggcccgcagagaccctcggagactcctccccaagtagtagcagcacgcccgcatcagggtgcagctcccccaatgacagcgagcacggccccaatcccatcctgggctcggaggctgacagtgaccgcaggacccatccgactctgggccctcgggggccaatcctggggagcccccacactcccctcttcctgccccatggcttggagcccgaggctgggggcaccttgccctctcgcctgcagcccattctcctcctggacccctcaggctctcatgccccgctgctgactgtgcccgggcttgggcccttgcccttccactttgcccagtccttaatgaccaccgagcggctctctgggtcaggcctccactggccactgagccggactcgctcagagcccctgccccccagtgccaccgctcccccaccgccgggccccatgcagccccgcctggagcagctcaaaactcacgtccaggtgatcaagaggtcagccaagccgagtgagaagccccggctgcggcagataccctcggctgaagacctggagacagatggcgggggaccgggccaggtggtggacgatggcctggagcacagggagctgggccatgggcagcctgaggccagaggccccgctcctctccagcagcaccctcaggtgttgctctgggaacagcagcgactggctgggcggctcccccggggcagcaccggggacactgtgctgcttcctctggcccagggtgggcaccggcctctgtcccgggctcagtcttccccagccgcacctgcctcactgtcagccccagagcctgccagccaggcccgagtcctctccagctcagagacccctgccaggaccctgcccttcaccacaggtgagaccgggaggagggtggcgggtggagggaggggctcggctgcacgagtccatgtgggtgtcttggtgtcacttgggacatttttagaggccacagagtgcttagccttgttaggcccacgtagtacccatggagcacatggaacagctggttattgcatttggccgatgaggaccaaggctcacgaaatctaaggtgacaagcctgtggtcaaatagcaagtggtagtcaagccaggataagaattccagtctcctgccaatgcactcagcccttttaaaaaatgatatttattactgttgctctgcttgtaaaaagagctcagaagtattttagacattttgaagagtacagaaaaacctaagaagaaaagaaaaatcaccaaccagtatcccaccacccagaagtaacccctctgaaattctgctgtatttcagtccaggctttgttctggccatatgtacatgtacagatgccatgaacacatgaactacgttttgtatcctgctttacttagttaacatattatgaatccttcttggcataattagtctttaaaactgagagtctcatagtatttcattaatgtatttcatttttactgagggatcccttatcagttagacatttagattatagcttatttgaatttccttatgcataaatctttcctcatgcttgggattatttcccaaggttcactctaaagaagtagcattcctgggtcacatggtgtgagcattttgagagtcgttggtgtcctagacgcacagaaattgaccctcccacccgcaatgagcaggaccctcctctgaagacttcccacgggtcagactgaaatagtcacttctccaaagctggatttgtctatcacatggtccagtgtcatcgtgggcttcttagctcccggtttgggggtttcctaggaattcttttccctcctgctgccccttggtagcctctctgggttcatgacacgtgtgtgagatgctgtacgttaggcctcatgctttgctctgagcacttgagggcctggtgctgggccctcgagtcctgggccacccagcagtcgtgtccgcatgtgggaaggccgtggctctgtggcagccatgttggctggagctgtgttgatgtgttggctgctgccacctggggaagtgtctgggcgtgtgtggacaggtgtgaggggctggggctggggtaggggcaggatgaaatgcaggcctgtgtgggtgtgaggggtgtgtacccgcccggctccatgtgggtgcctgctgtggcggtgctggcgtgttctctgcagccaaggccatggggcgtgaggactccctgggtccccgctctgacccttgctcctgcagggctgatctatgactcggtcatgctgaagcaccagtgctcctgcggtgacaacagcaggcacccggagcacgccggccgcatccagagcatctggtcccggctgcaggagcgggggctccggagccagtgtgagtgtctccgaggccggaaggcctccctggaagagctgcagtcggtccactctgagcggcacgtgctcctctacggcaccaacccgctcagccgcctcaaactggacaacgggaagctggcagggctcctggcacagcggatgtttgtgatgctgccctgtggtggggttggggtggacactgacaccatctggaatgagcttcattcctccaatgcagcccgctgggccgctggcagtgtcactgacctcgccttcaaagtggcttctcgtgagctaaagaatggtttcgctgtggtgcggcccccaggacaccatgcagatcattcaacagccatgggcttctgcttcttcaactcagtggccatcgcctgccggcagctgcaacagcagagcaaggccagcaagatcctcattgtagactgggacgtgcaccatggcaacggcacccagcaaaccttctaccaagaccccagtgtgctctacatctccctgcatcgccatgacgacggcaacttcttcccggggagtggggctgtggatgaggtaggggctggcagcggtgagggcttcaatgtcaatgtggcctgggctggaggtctggacccccccatgggggatcctgagtacctggctgctttcaggatagtcgtgatgcccatcgcccgagagttctctccagacctagtcctggtgtctgctggatttgatgctgctgagggtcacccggccccactgggtggctaccatgtttctgccaaatgttttggatacatgacgcagcaactgatgaacctggcaggaggcgcagtggtgctggccttggagggtggccatgacctcacagccatctgtgacgcctctgaggcctgtgtggctgctcttctgggtaacagggtggatcccctttcagaagaaggctggaaacagaaacccaacctcaatgccatccgctctctggaggccgtgatccgggtgcacagtaaatactggggctgcatgcagcgcctggcctcctgtccagactcctgggtgcctagagtgccaggggctgacaaagaagaagtggaggcagtgaccgcactggcgtccctctctgtgggcatcctggctgaagataggccctcggagcagctggtggaggaggaagaacctatgaatctctaaggctctggaaccatctgcccgcccaccatgcccttgggacctggttctcttctaacccctggcaatagcccccattcctgggtctttagagatcctgtgggcaagtagttggaaccagagaacagcctgcctgctttgacagttatcccagggagcgtgagaaaatccctgggtctagaatgggaactggagaggaccctgagaggagacgggctgggcggcgacccccacagggctctcgagaacagattctcccctccagtatgggccctggctgtggcccccattcctcaggactgcacagaggaggactggctccggctccgtcgggctcacccttaaccactattcctggctctgcaaaccccagactttgcacacagccccaggctccacacagaaatgtgaacttggcctcagacaggctggcccttcctaggctctaggggctaggggggagtggggagccaagaggtcccatattcctgagtgcaggggtagtccctctcacctgcttcctcagacgactctggaagcttccctctaccaccgggcactgagacgaagctccctgacagccgagactggcagccctccatctggtccgtaccctcgccagaggcccccctacatcaacctcctggcgatgccctggtggagcagatgggtgctctgggagtcctgtgcttcctgatccaatggtgccaaacccttcatctcccccagaagcgcagcatacccctgggacccctcggccactgcccactcggggagccttctctgtttctggggcctcccccaccatagctctgattcccaccccacataggaatagcctgactgagggggaaggggtgggagagaagatacagacatggaggaggggaggctgctctggcaaagtcttcaaggcttttgggggtccaggcctggggtcaagaaggaaaatgtgtgtgagcatgtgtgtgagtgaggcgtgtgtgtgagcgtgtgtgtgagtgaggcgtgtgtgtgtgtctttcctaggacccaccataccctgtgtatgtatgcatgtttttgtaaaaaggaagaaaatggaaaaaaatctgaacaataaatgttttatttgcttta

SEQ ID NO: 368470 - DNA, 2140 bp, Homo sapiens
atgatgcgggccctgactctggctcccgcaggtggacactgacaccatctggaatgagcttcattcctccaatgcagcccgctgggccgctggcagtgtcactgacctcgccttcaaagtggcttctcgtgagctaaagaatggtttcgctgtggtgcggcccccaggacaccatgcagatcattcaacagccatgggcttctgcttcttcaactcagtggccatcgcctgccggcagctgcaacagcagagcaaggccagcaagatcctcattgtagactgggacgtgcaccatggcaacggcacccagcaaaccttctaccaagaccccagtgtgctctacatctccctgcatcgccatgacgacggcaacttcttcccggggagtggggctgtggatgaggtaggggctggcagcggtgagggcttcaatgtcaatgtggcctgggctggaggtctggacccccccatgggggatcctgagtacctggctgctttcaggatagtcgtgatgcccatcgcccgagagttctctccagacctagtcctggtgtctgctggatttgatgctgctgagggtcacccggccccactgggtggctaccatgtttctgccaaatgttttggatacatgacgcagcaactgatgaacctggcaggaggcgcagtggtgctggccttggagggtggccatgacctcacagccatctgtgacgcctctgaggcctgtgtggctgctcttctgggtaacagggtggatcccctttcagaagaaggctggaaacagaaacccaacctcaatgccatccgctctctggaggccgtgatccgggtgcacagtaaatactggggctgcatgcagcgcctggcctcctgtccagactcctgggtgcctagagtgccaggggctgacaaagaagaagtggaggcagtgaccgcactggcgtccctctctgtgggcatcctggctgaagataggccctcggagcagctggtggaggaggaagaacctatgaatctctaaggctctggaaccatctgcccgcccaccatgcccttgggacctggttctcttctaacccctggcaatagcccccattcctgggtctttagagatcctgtgggcaagtagttggaaccagagaacagcctgcctgctttgacagttatcccagggagcgtgagaaaatccctgggtctagaatgggaactggagaggaccctgagaggagacgggctgggcggcgacccccacagggctctcgagaacagattctcccctccagtatgggccctggctgtggcccccattcctcaggactgcacagaggaggactggctccggctccgtcgggctcacccttaaccactattcctggctctgcaaaccccagactttgcacacagccccaggctccacacagaaatgtgaacttggcctcagacaggctggcccttcctaggctctaggggctaggggggagtggggagccaagaggtcccatattcctgagtgcaggggtagtccctctcacctgcttcctcagacgactctggaagcttccctctaccaccgggcactgagacgaagctccctgacagccgagactggcagccctccatctggtccgtaccctcgccagaggcccccctacatcaacctcctggcgatgccctggtggagcagatgggtgctctgggagtcctgtgcttcctgatccaatggtgccaaacccttcatctcccccagaagcgcagcatacccctgggacccctcggccactgcccactcggggagccttctctgtttctggggcctcccccaccatagctctgattcccaccccacataggaatagcctgactgagggggaaggggtgggagagaagatacagacatggaggaggggaggctgctctggcaaagtcttcaaggcttttgggggtccaggcctggggtcaagaaggaaaatgtgtgtgagcatgtgtgtgagtgaggcgtgtgtgtgagcgtgtgtgtgagtgaggcgtgtgtgtgtgtctttcctaggacccaccataccctgtgtatgtatgcatgtttttgtaaaaaggaagaaaatggaaaaaaatctgaacaataaatgttttatttgcttta

SEQ ID NO: 368471 - DNA, 6870 bp, Homo sapiens
aagttcagtttccccatcagtaaaatggggagaaaattccaagcacacttctcagagcagagcagaagaggttgactatggagaggagaatgaagatgggacccaggtgagcccgggtgcccactactgcagccccactggcgcaggctgccccaggccctgtgcagacacaccaggccctcagccgcagcccatggacctgcgggtgggccagcggcccccagtggagcccccaccagagcccacattgctggccctgcagcgtccccagcgcctgcaccaccacctcttcctagcaggcctgcagcagcagcgctcggtggagcccatgaggctctccatggacacgccgatgcccgagttgcaggtgggaccccaggaacaagagctgcggcagcttctccacaaggacaagagcaagcgaagtgctgtagccagcagcgtggtcaagcagaagctagcggaggtgattctgaaaaaacagcaggcggccctagaaagaacagtccatcccaacagccccggcattccctacagaaccctggagcccctggagacggaaggagccacccgctccatgctcagcagctttttgcctcctgttcccagcctgcccagtgaccccccagagcacttccctctgcgcaagacagtctctgagcccaacctgaagctgcgctataagcccaagaagtccctggagcggaggaagaatccactgctccgaaaggagagtgcgccccccagcctccggcggcggcccgcagagaccctcggagactcctccccaagtagtagcagcacgcccgcatcagggtgcagctcccccaatgacagcgagcacggccccaatcccatcctgggctcggaggctgacagtgaccgcaggacccatccgactctgggccctcgggggccaatcctggggagcccccacactcccctcttcctgccccatggcttggagcccgaggctgggggcaccttgccctctcgcctgcagcccattctcctcctggacccctcaggctctcatgccccgctgctgactgtgcccgggcttgggcccttgcccttccactttgcccagtccttaatgaccaccgagcggctctctgggtcaggcctccactggccactgagccggactcgctcagagcccctgccccccagtgccaccgctcccccaccgccgggccccatgcagccccgcctggagcagctcaaaactcacgtccaggtgatcaagaggtcagccaagccgagtgagaagccccggctgcggcagataccctcggctgaagacctggagacagatggcgggggaccgggccaggtggtggacgatggcctggagcacagggagctgggccatgggcagcctgaggccagaggccccgctcctctccagcagcaccctcaggtgttgctctgggaacagcagcgactggctgggcggctcccccggggcagcaccggggacactgtgctgcttcctctggcccagggtgggcaccggcctctgtcccgggctcagtcttccccagccgcacctgcctcactgtcagccccagagcctgccagccaggcccgagtcctctccagctcagagacccctgccaggaccctgcccttcaccacaggtgagaccgggaggagggtggcgggtggagggaggggctcggctgcacgagtccatgtgggtgtcttggtgtcacttgggacatttttagaggccacagagtgcttagccttgttaggcccacgtagtacccatggagcacatggaacagctggttattgcatttggccgatgaggaccaaggctcacgaaatctaaggtgacaagcctgtggtcaaatagcaagtggtagtcaagccaggataagaattccagtctcctgccaatgcactcagcccttttaaaaaatgatatttattactgttgctctgcttgtaaaaagagctcagaagtattttagacattttgaagagtacagaaaaacctaagaagaaaagaaaaatcaccaaccagtatcccaccacccagaagtaacccctctgaaattctgctgtatttcagtccaggctttgttctggccatatgtacatgtacagatgccatgaacacatgaactacgttttgtatcctgctttacttagttaacatattatgaatccttcttggcataattagtctttaaaactgagagtctcatagtatttcattaatgtatttcatttttactgagggatcccttatcagttagacatttagattatagcttatttgaatttccttatgcataaatctttcctcatgcttgggattatttcccaaggttcactctaaagaagtagcattcctgggtcacatggtgtgagcattttgagagtcgttggtgtcctagacgcacagaaattgaccctcccacccgcaatgagcaggaccctcctctgaagacttcccacgggtcagactgaaatagtcacttctccaaagctggatttgtctatcacatggtccagtgtcatcgtgggcttcttagctcccggtttgggggtttcctaggaattcttttccctcctgctgccccttggtagcctctctgggttcatgacacgtgtgtgagatgctgtacgttaggcctcatgctttgctctgagcacttgagggcctggtgctgggccctcgagtcctgggccacccagcagtcgtgtccgcatgtgggaaggccgtggctctgtggcagccatgttggctggagctgtgttgatgtgttggctgctgccacctggggaagtgtctgggcgtgtgtggacaggtgtgaggggctggggctggggtaggggcaggatgaaatgcaggcctgtgtgggtgtgaggggtgtgtacccgcccggctccatgtgggtgcctgctgtggcggtgctggcgtgttctctgcagccaaggccatggggcgtgaggactccctgggtccccgctctgacccttgctcctgcagggctgatctatgactcggtcatgctgaagcaccagtgctcctgcggtgacaacagcaggcacccggagcacgccggccgcatccagagcatctggtcccggctgcaggagcgggggctccggagccagtgtgagtgtctccgaggccggaaggcctccctggaagagctgcagtcggtccactctgagcggcacgtgctcctctacggcaccaacccgctcagccgcctcaaactggacaacgggaagctggcagggctcctggcacagcggatgtttgtgatgctgccctgtggtggggttggggtggacactgacaccatctggaatgagcttcattcctccaatgcagcccgctgggccgctggcagtgtcactgacctcgccttcaaagtggcttctcgtgagctaaagaatggtttcgctgtggtgcggcccccaggacaccatgcagatcattcaacagccatgggcttctgcttcttcaactcagtggccatcgcctgccggcagctgcaacagcagagcaaggccagcaagatcctcattgtagactgggacgtgcaccatggcaacggcacccagcaaaccttctaccaagaccccagtgtgctctacatctccctgcatcgccatgacgacggcaacttcttcccggggagtggggctgtggatgaggtaggggctggcagcggtgagggcttcaatgtcaatgtggcctgggctggaggtctggacccccccatgggggatcctgagtacctggctgctttcaggatagtcgtgatgcccatcgcccgagagttctctccagacctagtcctggtgtctgctggatttgatgctgctgagggtcacccggccccactgggtggctaccatgtttctgccaaatgttttggatacatgacgcagcaactgatgaacctggcaggaggcgcagtggtgctggccttggagggtggccatgacctcacagccatctgtgacgcctctgaggcctgtgtggctgctcttctgggtaacagggtgagccgtctccctcccccatccatgcttctgtcaggcaggtaagcccggctctcaggactacccaaggagcaggcagatgggatgggacagggtgggagtggccaagcctgaaacaaggtaggcgaagcgaaagcctctgttccaagttaggtccaggcagcatctcctggcctaggtagagtgtgcttgtggctagaaggctggggcccctggggtgggagtgagctgggcctgtgggtccctgagagactggtggctgatgtactgttttctataggtggatcccctttcagaagaaggctggaaacagaaacccaacctcaatgccatccgctctctggaggccgtgatccgggtgcacagtaagtgtggagatgggacactcgctgagctcagactgaaggatcttggtggtaccctgccccaccgtggccagatcctagggcttccggtgccagccaggtgacctgctgttggtctggagtaagattcctgtgagtgacccaggcagcaatggtgagcaccccccagtgaggggttatcctctgagcccccccgatggagccagcagggcctaccagacagtggcccctcaaggtagggactggcctccatctctagcgacagccctagaccagggccaggtcaagagcaacactcaggccttgtttgccaaaaggcctggttcccatccctcccctcagtcctggccacaggcgtctcaggagctctgctggcttgggggctgcgtcttgggataacccccacatttgtaaagtactttaaattttcaacttcaactcaacatctattgagcatcttatgtcaagacccataatctatactagggataaaaatgagtaaaatagattcccatatcaagggctgggtaggggagccgtgatgtctttacataatggtaaagacatggctgattcctcttacggtgggtgccctcacactgagccagattccaggacatggttcctcacagcagcaggcaggaggagcattctcctggcctgggcacccatgcagagcggccgtggtgatggtcagttctcccatgttgtgttcgtcccacctcccaggccctcctttcctgagtgctgggctgagcactggtgggggctgtgtttaagtgggaggcccgagcttggggctctgggaggtcactgtgacacagaccctgtctgcaggcaagcaggctctcctgatgctctcaggagccccgcacctgtggggaatgagtcaaaggtggccttgcagccacaggggatgagagaaaggctgggcacctgctaggactccctcacagccatgttgaacccactctgcgtaccctgtcaggctgtgcgggagtgggagcgaagtgaggagaggggcaggtgggagagccgaccccaagtggaggacaggcccgctcctccggggccctgggcctgagacaccaacctcaatatccggtctaggacgcagtgtggaggggcttgctttctccaaccctttctgacctggcatcttaccccaggtaaatactggggctgcatgcagcgcctggcctcctgtccagactcctgggtgcctagagtgccaggggctgacaaagaagaagtggaggcagtgaccgcactggcgtccctctctgtgggcatcctggctgaagataggccctcggagcagctggtggaggaggaagaacctatgaatctctaaggctctggaaccatctgcccgcccaccatgcccttgggacctggttctcttctaacccctggcaatagcccccattcctgggtctttagagatcctgtgggcaagtagttggaaccagagaacagcctgcctgctttgacagttatcccagggagcgtgagaaaatccctgggtctagaatgggaactggagaggaccctgagaggagacgggctgggcggcgacccccacagggctctcgagaacagattctcccctccagtatgggccctggctgtggcccccattcctcaggactgcacagaggaggactggctccggctccgtcgggctcacccttaaccactattcctggctctgcaaaccccagactttgcacacagccccaggctccacacagaaatgtgaacttggcctcagacaggctggcccttcctaggctctaggggctaggggggagtggggagccaagaggtcccatattcctgagtgcaggggtagtccctctcacctgcttcctcagacgactctggaagcttccctctaccaccgggcactgagacgaagctccctgacagccgagactggcagccctccatctggtccgtaccctcgccagaggcccccctacatcaacctcctggcgatgccctggtggagcagatgggtgctctgggagtcctgtgcttcctgatccaatggtgccaaacccttcatctcccccagaagcgcagcatacccctgggacccctcggccactgcccactcggggagccttctctgtttctggggcctcccccaccatagctctgattcccaccccacataggaatagcctgactgagggggaaggggtgggagagaagatacagacatggaggaggggaggctgctctggcaaagtcttcaaggcttttgggggtccaggcctggggtcaagaaggaaaatgtgtgtgagcatgtgtgtgagtgaggcgtgtgtgtgagcgtgtgtgtgagtgaggcgtgtgtgtgtgtctttcctaggacccaccataccctgtgtatgtatgcatgtttttgtaaaaaggaagaaaatggaaaaaaatctgaacaataaatgttttatttgcttta

SEQ ID NO: 368472 - DNA, 1631 bp, Homo sapiens
  misc_feature (25)..(26): n is a, c, g, or t
aataatgctagtacgaggcgggtgnngtcagactagtcctggtgtctgctggatttgatgctgctgagggtcacccggccccactgggtggctaccatgtttctgccaaatgttttggatacatgacgcagcaactgatgaacctggcaggaggcgcagtggtgctggccttggagggtggccatgacctcacagccatctgtgacgcctctgaggcctgtgtggctgctcttctgggtaacagggtggatcccctttcagaagaaggctggaaacagaaacccaacctcaatgccatccgctctctggaggccgtgatccgggtgcacagtaaatactggggctgcatgcagcgcctggcctcctgtccagactcctgggtgcctagagtgccaggggctgacaaagaagaagtggaggcagtgaccgcactggcgtccctctctgtgggcatcctggctgaagataggccctcggagcagctggtggaggaggaagaacctatgaatctctaaggctctggaaccatctgcccgcccaccatgcccttgggacctggttctcttctaacccctggcaatagcccccattcctgggtctttagagatcctgtgggcaagtagttggaaccagagaacagcctgcctgctttgacagttatcccagggagcgtgagaaaatccctgggtctagaatgggaactggagaggaccctgagaggagacgggctgggcggcgacccccacagggctctcgagaacagattctcccctccagtatgggccctggctgtggcccccattcctcaggactgcacagaggaggactggctccggctccgtcgggctcacccttaaccactattcctggctctgcaaaccccagactttgcacacagccccaggctccacacagaaatgtgaacttggcctcagacaggctggcccttcctaggctctaggggctaggggggagtggggagccaagaggtcccatattcctgagtgcaggggtagtccctctcacctgcttcctcagacgactctggaagcttccctctaccaccgggcactgagacgaagctccctgacagccgagactggcagccctccatctggtccgtaccctcgccagaggcccccctacatcaacctcctggcgatgccctggtggagcagatgggtgctctgggagtcctgtgcttcctgatccaatggtgccaaacccttcatctcccccagaagcgcagcatacccctgggacccctcggccactgcccactcggggagccttctctgtttctggggcctcccccaccatagctctgattcccaccccacataggaatagcctgactgagggggaaggggtgggagagaagatacagacatggaggaggggaggctgctctggcaaagtcttcaaggcttttgggggtccaggcctggggtcaagaaggaaaatgtgtgtgagcatgtgtgtgagtgaggcgtgtgtgtgagcgtgtgtgtgagtgaggcgtgtgtgtgtgtctttcctaggacccaccataccctgtgtatgtatgcatgtttttgtaaaaaggaagaaaatggaaaaaaatctgaacaataaatgttttatttgcttta

SEQ ID NO: 368473 - DNA, 3739 bp, Homo sapiens
  misc_feature (3612)..(3613): n is a, c, g, or t
  misc_feature (3672)..(3672): n is a, c, g, or t
  misc_feature (3701)..(3701): n is a, c, g, or t
ataatacctaccttgcaggaccacgacaggattaagtgaggaaaaacccccatgagagtgttttgccattgtcaagtgagcctgagggaggctgaggggggatcaggctgtatcatgcccccgaggacaaactttccagtttaccctgctccctctctctgtccctaggctgccccaggccctgtgcagacacaccaggccctcagccgcagcccatggacctgcgggtgggccagcggcccccagtggagcccccaccagagcccacattgctggccctgcagcgtccccagcgcctgcaccaccacctcttcctagcaggcctgcagcagcagcgctcggtggagcccatgaggctctccatggacacgccgatgcccgagttgcaggtgggaccccaggaacaagagctgcggcagcttctccacaaggacaagagcaagcgaagtgctgtagccagcagcgtggtcaagcagaagctagcggaggtgattctgaaaaaacagcaggcggccctagaaagaacagtccatcccaacagccccggcattccctacagaaccctggagcccctggagacggaaggagccacccgctccatgctcagcagctttttgcctcctgttcccagcctgcccagtgaccccccagagcacttccctctgcgcaagacagtctctgagcccaacctgaagctgcgctataagcccaagaagtccctggagcggaggaagaatccactgctccgaaaggagagtgcgccccccagcctccggcggcggcccgcagagaccctcggagactcctccccaagtagtagcagcacgcccgcatcagggtgcagctcccccaatgacagcgagcacggccccaatcccatcctgggctcggaggctgacagtgaccgcaggacccatccgactctgggccctcgggggccaatcctggggagcccccacactcccctcttcctgccccatggcttggagcccgaggctgggggcaccttgccctctcgcctgcagcccattctcctcctggacccctcaggctctcatgccccgctgctgactgtgcccgggcttgggcccttgcccttccactttgcccagtccttaatgaccaccgagcggctctctgggtcaggcctccactggccactgagccggactcgctcagagcccctgccccccagtgccaccgctcccccaccgccgggccccatgcagccccgcctggagcagctcaaaactcacgtccaggtgatcaagaggtcagccaagccgagtgagaagccccggctgcggcagataccctcggctgaagacctggagacagatggcgggggaccgggccaggtggtggacgatggcctggagcacagggagctgggccatgggcagcctgaggccagaggccccgctcctctccagcagcaccctcaggtgttgctctgggaacagcagcgactggctgggcggctcccccggggcagcaccggggacactgtgctgcttcctctggcccagggtgggcaccggcctctgtcccgggctcagtcttccccagccgcacctgcctcactgtcagccccagagcctgccagccaggcccgagtcctctccagctcagagacccctgccaggaccctgcccttcaccacagggctgatctatgactcggtcatgctgaagcaccagtgctcctgcggtgacaacagcaggcacccggagcacgccggccgcatccagagcatctggtcccggctgcaggagcgggggctccggagccagtgtgagtgtctccgaggccggaaggcctccctggaagagctgcagtcggtccactctgagcggcacgtgctcctctacggcaccaacccgctcagccgcctcaaactggacaacgggaagctggcagggctcctggcacagcggatgtttgtgatgctgccctgtggtggggttggggtggacactgacaccatctggaatgagcttcattcctccaatgcagcccgctgggccgctggcagtgtcactgacctcgccttcaaagtggcttctcgtgagctaaagaatggtttcgctgtggtgcggcccccaggacaccatgcagatcattcaacagccatgggcttctgcttcttcaactcagtggccatcgcctgccggcagctgcaacagcagagcaaggccagcaagatcctcattgtagactgggacgtgcaccatggcaacggcacccagcaaaccttctaccaagaccccagtgtgctctacatctccctgcatcgccatgacgacggcaacttcttcccggggagtggggctgtggatgaggtaggggctggcagcggtgagggcttcaatgtcaatgtggcctgggctggaggtctggacccccccatgggggatcctgagtacctggctgctttcaggatagtcgtgatgcccatcgcccgagagttctctccagacctagtcctggtgtctgctggatttgatgctgctgagggtcacccggccccactgggtggctaccatgtttctgccaaatgttttggatacatgacgcagcaactgatgaacctggcaggaggcgcagtggtgctggccttggagggtggccatgacctcacagccatctgtgacgcctctgaggcctgtgtggctgctcttctgggtaacagggtggatcccctttcagaagaaggctggaaacagaaacccaacctcaatgccatccgctctctggaggccgtgatccgggtgcacagtaaatactggggctgcatgcagcgcctggcctcctgtccagactcctgggtgcctagagtgccaggggctgacaaagaagaagtggaggcagtgaccgcactggcgtccctctctgtgggcatcctggctgaagataggccctcggagcagctggtggaggaggaagaacctatgaatctctaaggctctggaaccatctgcccgcccaccatgcccttgggacctggttctcttctaacccctggcaatagcccccattcctgggtctttagagatcctgtgggcaagtagttggaaccagagaacagcctgcctgctttgacagttatcccagggagcgtgagaaaatccctgggtctagaatgggaactggagaggaccctgagaggagacgggctgggcggcgacccccacagggctctcgagaacagattctcccctccagtatgggccctggctgtggcccccattcctcaggactgcacagaggaggactggctccggctccgtcgggctcacccttaaccactattcctggctctgcaaaccccagactttgcacacagccccaggctccacacagaaatgtgaacttggcctcagacaggctggcccttcctaggctctaggggctaggggggagtggggagccaagaggtcccatattcctgagtgcaggggtagtccctctcacctgcttcctcagacgactctggaagcttccctctaccaccgggcactgagacgaagctccctgacagccgagactggcagccctccatctggtccgtaccctcgccagaggcccccctacatcaacctcctggcgaanncttgggaccccattgcacagatgtatagtgcagtggttagaaaccagaatctaggactnactaacctgggtgtgaattctggcttcancacttaaggttttgacctcggacaaagttaatttaact

SEQ ID NO: 368474 - DNA, 4282 bp, Homo sapiens
aagttcagtttccccatcagtaaaatggggagaaaattccaagcacacttctcagagcagagcagaagaggttgactatggagaggagaatgaagatgggacccaggtgagcccgggtgcccactactgcagccccactggcgcaggctgccccaggccctgtgcagacacaccaggccctcagccgcagcccatggacctgcgggtgggccagcggcccccagtggagcccccaccagagcccacattgctggccctgcagcgtccccagcgcctgcaccaccacctcttcctagcaggcctgcagcagcagcgctcggtggagcccatgaggctctccatggacacgccgatgcccgagttgcaggtgggaccccaggaacaagagctgcggcagcttctccacaaggacaagagcaagcgaagtgctgtagccagcagcgtggtcaagcagaagctagcggaggtgattctgaaaaaacagcaggcggccctagaaagaacagtccatcccaacagccccggcattccctacagaaccctggagcccctggagacggaaggagccacccgctccatgctcagcagctttttgcctcctgttcccagcctgcccagtgaccccccagagcacttccctctgcgcaagacagtctctgagcccaacctgaagctgcgctataagcccaagaagtccctggagcggaggaagaatccactgctccgaaaggagagtgcgccccccagcctccggcggcggcccgcagagaccctcggagactcctccccaagtagtagcagcacgcccgcatcagggtgcagctcccccaatgacagcgagcacggccccaatcccatcctgggctcggaggctgacagtgaccgcaggacccatccgactctgggccctcgggggccaatcctggggagcccccacactcccctcttcctgccccatggcttggagcccgaggctgggggcaccttgccctctcgcctgcagcccattctcctcctggacccctcaggctctcatgccccgctgctgactgtgcccgggcttgggcccttgcccttccactttgcccagtccttaatgaccaccgagcggctctctgggtcaggcctccactggccactgagccggactcgctcagagcccctgccccccagtgccaccgctcccccaccgccgggccccatgcagccccgcctggagcagctcaaaactcacgtccaggtgatcaagaggtcagccaagccgagtgagaagccccggctgcggcagataccctcggctgaagacctggagacagatggcgggggaccgggccaggtggtggacgatggcctggagcacagggagctgggccatgggcagcctgaggccagaggccccgctcctctccagcagcaccctcaggtgttgctctgggaacagcagcgactggctgggcggctcccccggggcagcaccggggacactgtgctgcttcctctggcccagggtgggcaccggcctctgtcccgggctcagtcttccccagccgcacctgcctcactgtcagccccagagcctgccagccaggcccgagtcctctccagctcagagacccctgccaggaccctgcccttcaccacaggtgagaccgggaggagggtggcgggtggagggaggggctcggctgcacgagtccatgtgggtgtcttggtgtcacttgggacatttttagaggccacagagtgcttagccttgttaggcccacgtagtacccatggagcacatggaacagctggttattgcatttggccgatgaggaccaaggctcacgaaatctaaggtgacaagcctgtggtcaaatagcaagtggtagtcaagccaggataagaattccagtctcctgccaatgcactcagcccttttaaaaaatgatatttattactgttgctctgcttgtaaaaagagctcagaagtattttagacattttgaagagtacagaaaaacctaagaagaaaagaaaaatcaccaaccagtatcccaccacccagaagtaacccctctgaaattctgctgtatttcagtccaggctttgttctggccatatgtacatgtacagatgccatgaacacatgaactacgttttgtatcctgctttacttagttaacatattatgaatccttcttggcataattagtctttaaaactgagagtctcatagtatttcattaatgtatttcatttttactgagggatcccttatcagttagacatttagattatagcttatttgaatttccttatgcataaatctttcctcatgcttgggattatttcccaaggttcactctaaagaagtagcattcctgggtcacatggtgtgagcattttgagagtcgttggtgtcctagacgcacagaaattgaccctcccacccgcaatgagcaggaccctcctctgaagacttcccacgggtcagactgaaatagtcacttctccaaagctggatttgtctatcacatggtccagtgtcatcgtgggcttcttagctcccggtttgggggtttcctaggaattcttttccctcctgctgccccttggtagcctctctgggttcatgacacgtgtgtgagatgctgtacgttaggcctcatgctttgctctgagcacttgagggcctggtgctgggccctcgagtcctgggccacccagcagtcgtgtccgcatgtgggaaggccgtggctctgtggcagccatgttggctggagctgtgttgatgtgttggctgctgccacctggggaagtgtctgggcgtgtgtggacaggtgtgaggggctggggctggggtaggggcaggatgaaatgcaggcctgtgtgggtgtgaggggtgtgtacccgcccggctccatgtgggtgcctgctgtggcggtgctggcgtgttctctgcagccaaggccatggggcgtgaggactccctgggtccccgctctgacccttgctcctgcagggctgatctatgactcggtcatgctgaagcaccagtgctcctgcggtgacaacagcaggcacccggagcacgccggccgcatccagagcatctggtcccggctgcaggagcgggggctccggagccagtgtgagtgtctccgaggccggaaggcctccctggaagagctgcagtcggtccactctgagcggcacgtgctcctctacggcaccaacccgctcagccgcctcaaactggacaacgggaagctggcagggctcctggcacagcggatgtttgtgatgctgccctgtggtggggttggggtggacactgacaccatctggaatgagcttcattcctccaatgcagcccgctgggccgctggcagtgtcactgacctcgccttcaaagtggcttctcgtgagctaaagaatggtttcgctgtggtgcggcccccaggacaccatgcagatcattcaacagccatgggcttctgcttcttcaactcagtggccatcgcctgccggcagctgcaacagcagagcaaggccagcaagatcctcattgtagactgggacgtgcaccatggcaacggcacccagcaaaccttctaccaagaccccagtgtgctctacatctccctgcatcgccatgacgacggcaacttcttcccggggagtggggctgtggatgaggtaggggctggcagcggtgagggcttcaatgtcaatgtggcctgggctggaggtctggacccccccatgggggatcctgagtacctggctgctttcagccgcccaccatgcccttgggacctggttctcttctaacccctggcaatagcccccattcctgggtctttagagatcctgtgggcaagtagttggaaccagagaacagcctgcctgctttgacagttatcccagggagcgtgagaaaatccctgggtctagaatgggaactggagaggaccctgagaggagacgggctgggcggcgacccccacagggactgcacagaggaggactggctccggctccgtcgggctcacccttaaccactattcctggctctgcaaaccccagactttgcacacagccccaggcctggggtcaagaaggaaaatgtgtgtgagcatgtgtgtgagtgaggcgtgtgtgtgagcgtgtgtgtgagtgaggcgtgtgtgtgtgtctttcctaggacccaccataccctgtgtatgtatgcatgtttttgtaaaaaggaagaaaatggaaaaaaatctgaacaataaatgttttatttgcttta

SEQ ID NO: 368475 - DNA, 1248 bp, Homo sapiens
aagttcagtttccccatcagtaaaatggggagaaaattccaagcacacttctcagagcagagcagaagaggttgactatggagaggagaatgaagatgggacccaggtgagcccgggtgcccactactgcagccccactggcgcaggctgccccaggccctgtgcagacacaccaggccctcagccgcagcccatggacctgcgggtgggccagcggcccccagtggagcccccaccagagcccacattgctggccctgcagcgtccccagcgcctgcaccaccacctcttcctagcaggcctgcagcagcagcgctcggtggagcccatgaggctctccatggacacgccgatgcccgagttgcaggtgggaccccaggaacaagagctgcggcagcttctccacaaggacaagagcaagcgaagtgctgtagccagcagcgtggtcaagcagaagctagcggaggtgattctgaaaaaacagcaggcggccctagaaagaacagtccatcccaacagccccggcattccctacagaaccctggagcccctggagacggaaggagccacccgctccatgctcagcagctttttgcctcctgttcccagcctgcccagtgaccccccagagcacttccctctgcgcaagacagtctctgagcccaacctgaagctgcgctataagcccaagaagtccctggagcggaggaagaatccactgctccgaaaggagagtgcgccccccagcctccggcggcggcccgcagagaccctcggagactcctccccaagtagtagcagcacgcccgcatcagggtgcagctcccccaatgacagcgagcacggccccaatcccatcctgggctcggaggctgacagtgaccgcaggacccatccgactctgggccctcgggggccaatcctggggagcccccacactcccctcttcctgccccatggcttggagcccgaggctgggggcaccttgccctctcgcctgcagcccattctcctcctggacccctcaggctctcatgccccgctgctgactggtgagtctgctgcttcttcagggaaggggctgggtccctgcaccctgctaagagccaagcttgggatggacccatccttcctccccatctctgtccccctgtcctgcgcattgccctgctgcaccctggccccccaccctataccctcgcttccttccattgctccctgtggttcccacctatcacaccccatcca

SEQ ID NO: 368476 - DNA, 403 bp, Homo sapiens
tgagtcggaactctttcagcagaaaactgtatctctgtggcgttgaatatgaggataggttccaggagcaccagtagacggaatgtttgccctgtcacaagcatttctcctggcctagagactggcaggggttcctgcatccctaagcagggacccctgcaccaggcgaaggacgagcccccttccagcaacgcgggatgagccagggcctctcccctaccctgcttgtccttcctctgcccagtaccctgcgtggctgctcaggagagtgacgtgtggaagccactcggggtgagcagagggtctcttagtgatgctgtttgtttcctgggacgtgggtcagggagcccctaccctggttgagaaccactgaggtaggccgggattttggattccatcccca

SEQ ID NO: 368477 - DNA, 2448 bp, Homo sapiens
ctttcacgggcggtgggagctgaggctcctgtcgttatctctgatccttgcaccctggcaggaagctggtagctcacactttaacgggaggccttcacatattccagaaaagaaaccactttgcagtgccagactggaagaagtaacggtcactctgaaaacagggtgggagagctgcctctctttgaacctctcccaggaccaactctaacccagggaggcaaacttggtcgatgtaagcggtggcttggagacagaatcatctaatggaaaagatacactagaaggtgctggggatacatcagaggtgatggatactcaggcgggctccgtggatgaagagaatggccgacagttgggtgaggtagagctgcaatgtgggatttgtacaaaatggttcacggctgacacatttggcatagatacctcatcctgtctacctttcatgaccaactacagttttcattgcaacgtctgccatcacagtgggaatacctatttcctccggaagcaagcaaacttgaaggaaatgtgccttagtgctttggccaacctgacatggcagtcccgaacacaggatgaacatccgaagacaatgttctccaaagataaggatattataccatttattgataaatactgggagtgcatgacaaccagacagagacctgggaaaatgacttggccaaataacattgttaaaacaatgagtaaagaaagagatgtattcttggtaaaggaacacccagatccaggcagtaaagatccagaagaagattaccccaaatttggacttttggatcaggaccttagtaacattggtcctgcttatgacaaccaaaaacagagcagtgctgtgtctactagtgggaatttaaatgggggaattgcagcaggaagcagcggaaaaggacgaggagccaagcgcaaacagcaggatggagggaccacagggaccaccaagaaggcccggagtgaccctttgttttctgctcagcgccttccccctcatggctacccattggaacacccgtttaacaaagatggctatcggtatattctagctgagcctgatccgcacgcccctgaccccgagaagctggaacttgactgctgggcaggaaaacctattcctggagacctctacagagcctgcttgtatgaacgggttttgttagccctacatgatcgagctccccagttaaagatctcagatgaccggctgactgtggttggagagaagggctactctatggtgagggcctctcatggagtacggaagggtgcctggtattttgaaatcactgtggatgagatgccaccagataccgctgccagactgggttggtcccagcccctaggaaaccttcaagctcctttaggttatgataaatttagctattcttggcggagcaaaaagggaaccaagttccaccagtccattggcaaacactactcttctggctatggacagggagacgtcctgggattttatattaatcttcctgaagacacagagacagccaagtcattgccagacacatacaaagataaggctttgataaaattcaagagttatttgtattttgaggaaaaagactttgtggataaagcagagaagagcctgaagcagactccccatagtgaggtttccattaactttggaccatgcttcaagtatcctccgaaggatctcacttaccgccctatgagtgacatgggctggggcgccgtggtagagcacaccctggctgacgtcttgtatcacgtggagacagaagtggatgggaggcgcagtcccccatgggaaccctgaccaggtccctcttttctgtcaaggactttctgggaataatactgggggttttgtttttgtttttgaactgtctcaaatgttctcccaaagatgctaaaaacacagcctctccttttagcaagttaaaaggctgggtaggactgcgggagactgcctgcctttcaccattttctccccacttccagtgactgctcttattttgtgtaccataagccaacaaccgctgactccaggattgcataagccccctgtgaaatcggtgctgtactgcataccctgccagctgtgacttgttatcctactatattttctaaggagtgaataatattgtccgagtaactaacttatttaaaagacatttccttctgtgggcattgactgtatcccacctgttttccaaggaaatggtaacctgtttctgagaacacctgaaatcaatggctatacattccaaaccaatctaaacgctatttccttttggtgtgggtttggttttgttcattttgaaatacacttttgaacactgagatccgtaaaactactagatctctggaagtgtaattgtgaaagaaacttgcttgcagctttaacaaaatgagaaacttcccaaataaaacttgttttgaagttta

SEQ ID NO: 368478 - DNA, 782 bp, Homo sapiens
cgtgatggcggcggcaggagcaggacctggccaggaagcgggtgccgggcctggcccaggagcggtcgcaaatgcaacaggggcagaagagggggagatgaagccggtggcagcgggagcagccgctcctcctggagaggggatctctgctgctccgacagttgagcccagttccggggaggctgaaggcggggaggcaaacttggtcgatgtaagcggtggcttggagacagaatcatctaatggaaaagatacactagaaggtgctggggatacatcagaggtgatggatactcaggcgggctccgtggatgaagagaatggccgacagttgggtgaggtagagctgcaatgtgggatttgtacaaaatggttcacggctgacacatttggcatagatacctcatcctgtctacctttcatgaccaactacagttttcattgcaacgtctgccatcacagtgggaatacctatttcctccggaagcaagcaaacttgaaggaaatgtgccttagtgctttggccaacctgacatggcagtcccgaacacaggatgaacatccgaagacaatgttctccaaagataagatggaatgcagtgatgcgatctcagctcagtgcaccctctgcctcctgggtcccagagattctcctgcctccgcttcccgagtagctgggattacaggcatgcgccaccacgcccagctaattttttgtatttttagtagagacaggatttcaccgtgttggccaggctcatctccaactgacctcatgatcc

SEQ ID NO: 368479 - DNA, 2523 bp, Homo sapiens
cgtgatggcggcggcaggagcaggacctggccaggaagcgggtgccgggcctggcccaggagcggtcgcaaatgcaacaggggcagaagagggggagatgaagccggtggcagcgggagcagccgctcctcctggagaggggatctctgctgctccgacagttgagcccagttccggggaggctgaaggcggggaggcaaacttggtcgatgtaagcggtggcttggagacagaatcatctaatggaaaagatacactagaaggtgctggggatacatcagaggtgatggatactcaggcgggctccgtggatgaagagaatggccgacagttgggtgaggtagagctgcaatgtgggatttgtacaaaatggttcacggctgacacatttggcatagatacctcatcctgtctacctttcatgaccaactacagttttcattgcaacgtctgccatcacagtgggaatacctatttcctccggaagcaagcaaacttgaaggaaatgtgccttagtgctttggccaacctgacatggcagtcccgaacacaggatgaacatccgaagacaatgttctccaaagataaggatattataccatttattgataaatactgggagtgcatgacaaccagacagagacctgggaaaatgacttggccaaataacattgttaaaacaatgagtaaagaaagagatgtattcttggtaaaggaacacccagatccaggcagtaaagatccagaagaagattaccccaaatttggacttttggatcaggaccttagtaacattggtcctgcttatgacaaccaaaaacagagcagtgctgtgtctactagtgggaatttaaatgggggaattgcagcaggaagcagcggaaaaggacgaggagccaagcgcaaacagcaggatggagggaccacagggaccaccaagaaggcccggagtgaccctttgttttctgctcagcgccttccccctcatggctacccattggaacacccgtttaacaaagatggctatcggtatattctagctgagcctgatccgcacgcccctgaccccgagaagctggaacttgactgctgggcaggaaaacctattcctggagacctctacagagcctgcttgtatgaacgggttttgttagccctacatgatcgagctccccagttaaagatctcagatgaccggctgactgtggttggagagaagggctactctatggtgagggcctctcatggagtacggaagggtgcctggtattttgaaatcactgtggatgagatgccaccagataccgctgccagactgggttggtcccagcccctaggaaaccttcaagctcctttaggttatgataaatttagctattcttggcggagcaaaaagggaaccaagttccaccagtccattggcaaacactactcttctggctatggacagggagacgtcctgggattttatattaatcttcctgaagacacagagacagccaagtcattgccagacacatacaaagataaggctttgataaaattcaagagttatttgtattttgaggaaaaagactttgtggataaagcagagaagagcctgaagcagactccccatagtgagataatattttataaaaatggtgtcaatcaaggtgtggcttacaaagatatttttgagggggtttacttcccagccatctcactgtacaagagctgcacggtttccattaactttggaccatgcttcaagtatcctccgaaggatctcacttaccgccctatgagtgacatgggctggggcgccgtggtagagcacaccctggctgacgtcttgtatcacgtggagacagaagtggatgggaggcgcagtcccccatgggaaccctgaccaggtccctcttttctgtcaaggactttctgggaataatactgggggttttgtttttgtttttgaactgtctcaaatgttctcccaaagatgctaaaaacacagcctctccttttagcaagttaaaaggctgggtaggactgcgggagactgcctgcctttcaccattttctccccacttccagtgactgctcttattttgtgtaccataagccaacaaccgctgactccaggattgcataagccccctgtgaaatcggtgctgtactgcataccctgccagctgtgacttgttatcctactatattttctaaggagtgaataatattgtccgagtaactaacttatttaaaagacatttccttctgtgggcattgactgtatcccacctgttttccaaggaaatggtaacctgtttctgagaacacctgaaatcaatggctatacattccaaaccaatctaaacgctatttccttttggtgtgggtttggttttgttcattttgaaatacacttttgaacactgagatccgtaaaactactagatctctggaagtgtaattgtgaaagaaacttgcttgcagctttaacaaaatgagaaacttcccaaataaaacttgttttgaagttta

SEQ ID NO: 368480 - DNA, 2878 bp, Homo sapiens
cgtgatggcggcggcaggagcaggacctggccaggaagcgggtgccgggcctggcccaggagcggtcgcaaatgcaacaggggcagaagagggggagatgaagccggtggcagcgggagcagccgctcctcctggagaggggatctctgctgctccgacagttgagcccagttccggggaggctgaaggcggggaggcaaacttggtcgatgtaagcggtggcttggagacagaatcatctaatggaaaagatacactagaaggtgctggggatacatcagaggtgatggatactcaggcgggctccgtggatgaagagaatggccgacagttgggtgaggtagagctgcaatgtgggatttgtacaaaatggttcacggctgacacatttggcatagatacctcatcctgtctacctttcatgaccaactacagttttcattgcaacgtctgccatcacagtgggaatacctatttcctccggaagcaagcaaacttgaaggaaatgtgccttagtgctttggccaacctgacatggcagtcccgaacacaggatgaacatccgaagacaatgttctccaaagataaggatattataccatttattgataaatactgggagtgcatgacaaccagacagagacctgggaaaatgacttggccaaataacattgttaaaacaatgagtaaagaaagagatgtattcttggtaaaggaacacccagatccaggcagtaaagatccagaagaagattaccccaaatttggacttttggatcaggaccttagtaacattggtcctgcttatgacaaccaaaaacagagcagtgctgtgtctactagtgggaatttaaatgggggaattgcagcaggaagcagcggaaaaggacgaggagccaagcgcaaacagcaggatggagggaccacagggaccaccaagaaggcccggagtgaccctttgttttctgctcagcgccttccccctcatggctacccattggaacacccgtttaacaaagatggctatcggtatattctagctgagcctgatccgcacgcccctgaccccgagaagctggaacttgactgctgggcaggaaaacctattcctggagacctctacagagcctgcttgtatgaacgggttttgttagccctacatgatcgagctccccagttaaagatctcagatgaccggctgactgtggttggagagaagggctactctatggtgagggcctctcatggagtacggaagggtgcctggtattttgaaatcactgtggatgagatgccaccagataccgctgccagactgggttggtcccagcccctaggaaaccttcaagctcctttaggttatgataaatttagctattcttggcggagcaaaaagggaaccaagttccaccagtccattggcaaacactactcttctggctatggacagggagacgtcctgggattttatattaatcttcctgaagacacagagacagccaagtcattgccagacacatacaaagataaggctttgataaaattcaagagttatttgtattttgaggaaaaagactttgtggataaagcagagaagagcctgaagcagactccccatagtgagataatattttataaaaatggtgtcaatcaaggtgtggcttacaaagatatttttgagggggtttacttcccagccatctcactgtacaagagctgcacggtttccattaactttggaccatgcttcaagtatcctccgaaggatctcacttaccgccctatgagtgacatgggctggggcgccgtggtagagcacaccctggctgacgtcttgtatcacgtggagacagaagtggatgggaggcgcagtcccccatgggaaccctgaccaggtccctcttttctgtcaaggactttctgggaataatactgggggttttgtttttgtttttgaactgtctcaaatgttctcccaaagatgctaaaaacacagcctctccttttagcaagttaaaaggctgggtaggactgcgggagactgcctgcctttcaccattttctccccacttccagtgactgctcttattttgtgtaccataagccaacaaccgctgactccaggattgcataagccccctgtgaaatcggtgctgtactgcataccctgccagctgtgacttgttatcctactatattttctaaggagtgaataatattgtccgagtaactaacttatttaaaagacatttccttctgtgggcattgactgtatcccacctgttttccaaggaaatggtaacctgtttctgagaacacctgaaatcaatggctatacattccaaaccaatctaaacgctatttccttttggtgtgggtttggttttgttcattttgaaatacacttttgaacactgagatccgtaaaactactagatctctggaagtgtaattgtgaaagaaacttgcttgcagctttaacaaaatgagaaacttcccaaataaaacttgttttgaagtttatgtgacactttgcttcccttcagattgggtgcctcttggtgacagtgttcagaaatgtaagcagcacgaggaagggagctggcactgggaggaagagccgggtttctgagttgtgttttggctgctttcctattgctcccattcttgccaatcagccaccccctttcctgtgaaaatctgccaccttgaggagaggaacaagagtttaaaagggctaatgatctccctcccggtcttcccttggaacatggatgttgatatatgtgcgggtggtttcctgtcttgcttatcttcctttgccctgagctgatggctaaagggcagttttcggactattaaagactgaaatgtaaga

SEQ ID NO: 368481 - DNA, 1992 bp, Homo sapiens
atcccgcacgggtgatgcggttggtgaggagcagcatgaaataagcatatttttgagacccacaggtcttgggcagggctcagcgcaccactggtcgcatggtaagggtcgctctttcccttaacccgatccttaagcccttgaagaaaacatagaagagttcaatgatattcaagggcagggacaccaaggacaccaccagcatgaagatgatgaagaagattaccccaaattgggacttttggatcaggaccttagtaacattggtcctgcttatgacaaccaaaaacagagcagtgctgtgtctactagtgggaatttaaatgggggaattgcagcaggaagcagcggaaaaggacgaggagccaagcgcaaacagcaggatggagggaccacagggaccaccaagaaggcccggagtgaccctttgttttctgctcagcgccttccccctcatggctacccattggaacacccgtttaacaaagatggctatcggtatattctagctgagcctgatccgcacgcccctgaccccgagaagctggaacttgactgctgggcaggaaaacctattcctggagacctctacagagcctgcttgtatgaacgggttttgttagccctacatgatcgagctccccagttaaagatctcagatgaccggctgactgtggttggagagaagggctactctatggtgagggcctctcatggagtacggaagggtgcctggtattttgaaatcactgtggatgagatgccaccagataccgctgccagactgggttggtcccagcccctaggaaaccttcaagctcctttaggttatgataaatttagctattcttggcggagcaaaaagggaaccaagttccaccagtccattggcaaacactactcttctggctatggacagggagacgtcctgggattttatattaatcttcctgaagacacagagacagccaagtcattgccagacacatacaaagataaggctttgataaaattcaagagttatttgtattttgaggaaaaagactttgtggataaagcagagaagagcctgaagcagactccccatagtgagataatattttataaaaatggtgtcaatcaaggtgtggcttacaaagatatttttgagggggtttacttcccagccatctcactgtacaagagctgcacggtttccattaactttggaccatgcttcaagtatcctccgaaggatctcacttaccgccctatgagtgacatgggctggggcgccgtggtagagcacaccctggctgacgtcttgtatcacgtggagacagaagtggatgggaggcgcagtcccccatgggaaccctgaccaggtccctcttttctgtcaaggactttctgggaataatactgggggttttgtttttgtttttgaactgtctcaaatgttctcccaaagatgctaaaaacacagcctctccttttagcaagttaaaaggctgggtaggactgcgggagactgcctgcctttcaccattttctccccacttccagtgactgctcttattttgtgtaccataagccaacaaccgctgactccaggattgcataagccccctgtgaaatcggtgctgtactgcataccctgccagctgtgacttgttatcctactatattttctaaggagtgaataatattgtccgagtaactaacttatttaaaagacatttccttctgtgggcattgactgtatcccacctgttttccaaggaaatggtaacctgtttctgagaacacctgaaatcaatggctatacattccaaaccaatctaaacgctatttccttttggtgtgggtttggttttgttcattttgaaatacacttttgaacactgagatccgtaaaactactagatctctggaagtgtaattgtgaaagaaacttgcttgcagctttaacaaaatgagaaacttcccaaataaaacttgttttgaagttta

SEQ ID NO: 368482 - DNA, 1466 bp, Homo sapiens
ggacccttacgcgactgggactggctggtacgaggcctcccacactgtcactgtcacctccaccagcactgaccacaatgactagatcagaatgtaaaagagggaaggtggtacgtaaaggagcgcgaaagaagaggtggggaatagagggaatgagagaagggctactctatggtgagggcctctcatggagtacggaagggtgcctggtattttgaaatcactgtggatgagatgccaccagataccgctgccagactgggttggtcccagcccctaggaaaccttcaagctcctttaggttatgataaatttagctattcttggcggagcaaaaagggaaccaagttccaccagtccattggcaaacactactcttctggctatggacagggagacgtcctgggattttatattaatcttcctgaagacacagagacagccaagtcattgccagacacatacaaagataaggctttgataaaattcaagagttatttgtattttgaggaaaaagactttgtggataaagcagagaagagcctgaagcagactccccatagtgagataatattttataaaaatggtgtcaatcaaggtgtggcttacaaagatatttttgagggggtttacttcccagccatctcactgtacaagagctgcacggtttccattaactttggaccatgcttcaagtatcctccgaaggatctcacttaccgccctatgagtgacatgggctggggcgccgtggtagagcacaccctggctgacgtcttgtatcacgtggagacagaagtggatgggaggcgcagtcccccatgggaaccctgaccaggtccctcttttctgtcaaggactttctgggaataatactgggggttttgtttttgtttttgaactgtctcaaatgttctcccaaagatgctaaaaacacagcctctccttttagcaagttaaaaggctgggtaggactgcgggagactgcctgcctttcaccattttctccccacttccagtgactgctcttattttgtgtaccataagccaacaaccgctgactccaggattgcataagccccctgtgaaatcggtgctgtactgcataccctgccagctgtgacttgttatcctactatattttctaaggagtgaataatattgtccgagtaactaacttatttaaaagacatttccttctgtgggcattgactgtatcccacctgttttccaaggaaatggtaacctgtttctgagaacacctgaaatcaatggctatacattccaaaccaatctaaacgctatttccttttggtgtgggtttggttttgttcattttgaaatacacttttgaacactgagatccgtaaaactactagatctctggaagtgtaattgtgaaagaaacttgcttgcagctttaacaaaatgagaaacttcccaaataaaacttgttttgaagttta

SEQ ID NO: 368483 - DNA, 2491 bp, Homo sapiens
cgtgatggcggcggcaggagcaggacctggccaggaagcgggtgccgggcctggcccaggagcggtcgcaaatgcaacaggggcagaagagggggagatgaagccggtggcagcgggagcagccgctcctcctggagaggggatctctgctgctccgacagttgagcccagttccggggaggctgaaggcggggaggcaaacttggtcgatgtaagcggtggcttggagacagaatcatctaatggaaaagatacactagaaggtgctggggatacatcagaggtgatggatactcaggcgggctccgtggatgaagagaatggccgacagttgggtgaggtagagctgcaatgtgggatttgtacaaaatggttcacggctgacacatttggcatagatacctcatcctgtctacctttcatgaccaactacagttttcattgcaacgtctgccatcacagtgggaatacctatttcctccggaagcaagcaaacttgaaggaaatgtgccttagtgctttggccaacctgacatggcagtcccgaacacaggatgaacatccgaagacaatgttctccaaagataaggatattataccatttattgataaatactgggagtgcatgacaaccagacagagacctgggaaaatgacttggccaaataacattgttaaaacaatgagtaaagaaagagatgtattcttggtaaaggaacacccagatccaggcagtaaagatccagaagaagattaccccaaatttggacttttggatcaggaccttagtaacattggtcctgcttatgacaaccaaaaacagagcagtgctgtgtctactagtgggaatttaaatgggggaattgcagcaggaagcagcggaaaaggacgaggagccaagcgcaaacagcaggatggagggaccacagggaccaccaagaaggcccggagtgaccctttgttttctgctcagcgccttccccctcatggctacccattggaacacccgtttaacaaagatggctatcggtatattctagctgagcctgatccgcacgcccctgaccccgagaagctggaacttgactgctgggcaggaaaacctattcctggagacctctacagagcctgcttgtatgaacgggttttgttagccctacatgatcgagctccccagttaaagatctcagatgaccggctgactgtggttggagagaagggctactctatggtgagggcctctcatggagtacggaagggtgcctggtattttgaaatcactgtggatgagatgccaccagataccgctgccagactgggttggtcccagcccctaggaaaccttcaagctcctttaggttatgataaatttagctattcttggcggagcaaaaagggaaccaagttccaccagtccattggcaaacactactcttctggctatggacagggagacgtcctgggattttatattaatcttcctgaagacacagagacagccaagtcattgccagacacatacaaagataaggctttgataaaattcaagagttatttgtattttgaggaaaaagactttgtggataaagcagagaagagcctgaagcagactccccatagtgagataatattttataaaaatggtgtcaatcaaggtgtggcttacaaagatatttttgagggggtttacttcccagccatctcactgtacaagagctgcacggtttccattaactttggaccatgcttcaagtatcctccgaaggatctcacttaccgccctatgagtgacatgggctggggcgccgtggtagagcacaccctggctgacgtcttgtatcacgtggagacagaagtggatgggaggcgcagtcccccatgggaaccctgaccaggtccctcttttctgtcaaggactttctgggaataatactgggggttttgtttttgtttttgaactgtctcaaatgttctcccaaagatgctaaaaacacagcctctccttttagcaagttaaaaggctgggtaggactgcgggagactgcctgcctttcaccattttctccccacttccagtgactgctcttattttgtgtaccataaccccctgtgaaatcggtgctgtactgcataccctgccagctgtgacttgttatcctactatattttctaaggagtgaataatattgtccgagtaactaacttatttaaaagacatttccttctgtgggcattgactgtatcccacctgttttccaaggaaatggtaacctgtttctgagaacacctgaaatcaatggctatacattccaaaccaatctaaacgctatttccttttggtgtgggtttggttttgttcattttgaaatacacttttgaacactgagatccgtaaaactactagatctctggaagtgtaattgtgaaagaaacttgcttgcagctttaacaaaatgagaaacttcccaaataaaacttgttttgaagttta

SEQ ID NO: 368484 - DNA, 2219 bp, Homo sapiens
gagatgtaaacagaaacttgcttaaagaggagtacggtttaataacgcttgaagaaaaataatgcaaactaactttagtcattataaatcttacagtcattcttcattccaagtttaatataataattgatatatttggtaaatatgtatgaagtaaaggctcagaacttggggaattttcaggctggaattcattgtaccatataaaggttcctggacgggcgcagtggctcacgcctgtaatcccagcactttggaaggctgaggcaggaggatcacctgaggtcaagagttcaagaccagcctggccaacgtggtgaaaccctgtctctactaaaaatacaaaaattagctgggcatgatggtgggcgcctgtaatcccagctacttgggaggctgagaaggtaaaaaaaaaaaaggaaatctttaaacagtgtaaaccaaaactatctgagacagatctcaatcaatttagaagtttattttgccaaagttaaggacctgcctgtaagaaaaaaacagaatcacagaaacagtctgtggtctgtgcctttctccaaggatgaatttgagggcttaaaagttttaaaaagaaaaagggctggacggagtggctcacggcagtaatcccaacactttgggaggccaatataagagaatcagttgagcccaggacctcgagaccagcctgggcaacatagcaaaaccccctttctacaaaaaaatacaaaaaattagccaggcgtggtggtacatgcctgcagtcccagctacttgggaagctgaggtgggaggatcccctgagcccaggaggtcaagggtgcagtgagccgtgatcgcattgttgcgctgcagcctggacaacagagtcagagcctgtctcaaaaaaaataaaaagtaaaataaaggggaaatgcgggctggaggggaaagtaggagggtatggtcatccacatgttgcaagagaaaaggagcagataggggaaagtcaattatgtattcatctcatgcccggtaaatcggcacttcacataaggtaaggtgaacataaagtagctgcctgtggggatatttaacgttttatctgtaggtgtctgcttagcaacaaaaggaaaggcagtttcttgcatgactcagctttcagcttaattttttccttttgacagagcaaattgggatcctgaatttttatttttctttgacaacagaaatcaacacagatctcttttagttacctaattcttgatggacatcaggatgttgaccacttttagtaatatttaatatatatcttatttgttccatttatcccccgagtattgtagccacatttaaagtgaaaatttcctgtgtcaaattaacttttccaatattttttgtccattttttccatgtctgcttgaattgaattcgctccaggtttccattaactttggaccatgcttcaagtatcctccgaaggatctcacttaccgccctatgagtgacatgggctggggcgccgtggtagagcacaccctggctgacgtcttgtatcacgtggagacagaagtggatgggaggcgcagtcccccatgggaaccctgaccaggtccctcttttctgtcaaggactttctgggaataatactgggggttttgtttttgtttttgaactgtctcaaatgttctcccaaagatgctaaaaacacagcctctccttttagcaagttaaaaggctgggtaggactgcgggagactgcctgcctttcaccattttctccccacttccagtgactgctcttattttgtgtaccataagccaacaaccgctgactccaggattgcataagccccctgtgaaatcggtgctgtactgcataccctgccagctgtgacttgttatcctactatattttctaaggagtgaataatattgtccgagtaactaacttatttaaaagacatttccttctgtgggcattgactgtatcccacctgttttccaaggaaatggtaacctgtttctgagaacacctgaaatcaatggctatacattccaaaccaatctaaacgctatttccttttggtgtgggtttggttttgttcattttgaaatacacttttgaacactgagatccgtaaaactactagatctctggaagtgtaattgtgaaagaaacttgcttgcagctttaacaaaatgagaaacttcccaaataaaacttgttttgaagttta

SEQ ID NO: 368485 - DNA, 2307 bp, Homo sapiens
gagatgtaaacagaaacttgcttaaagaggagtacggtttaataacgcttgaagaaaaataatgcaaactaactttagtcattataaatcttacagtcattcttcattccaagtttaatataataattgatatatttggtaaatatgtatgaagtaaaggctcagaacttggggaattttcaggctggaattcattgtaccatataaaggttcctggacgggcgcagtggctcacgcctgtaatcccagcactttggaaggctgaggcaggaggatcacctgaggtcaagagttcaagaccagcctggccaacgtggtgaaaccctgtctctactaaaaatacaaaaattagctgggcatgatggtgggcgcctgtaatcccagctacttgggaggctgagaaggtaaaaaaaaaaaaggaaatctttaaacagtgtaaaccaaaactatctgagacagatctcaatcaatttagaagtttattttgccaaagttaaggacctgcctgtaagaaaaaaacagaatcacagaaacagtctgtggtctgtgcctttctccaaggatgaatttgagggcttaaaagttttaaaaagaaaaagggctggacggagtggctcacggcagtaatcccaacactttgggaggccaatataagagaatcagttgagcccaggacctcgagaccagcctgggcaacatagcaaaaccccctttctacaaaaaaatacaaaaaattagccaggcgtggtggtacatgcctgcagtcccagctacttgggaagctgaggtgggaggatcccctgagcccaggaggtcaagggtgcagtgagccgtgatcgcattgttgcgctgcagcctggacaacagagtcagagcctgtctcaaaaaaaataaaaagtaaaataaaggggaaatgcgggctggaggggaaagtaggagggtatggtcatccacatgttgcaagagaaaaggagcagataggggaaagtcaattatgtattcatctcatgcccggtaaatcggcacttcacataaggtaaggtgaacataaagtagctgcctgtggggatatttaacgttttatctgtaggtgtctgcttagcaacaaaaggaaaggcagtttcttgcatgactcagctttcagcttaattttttccttttgacagagcaaattgggatcctgaatttttatttttctttgacaacagaaatcaacacagatctcttttagttacctaattcttgatggacatcaggatgttgaccacttttagtaatatttaatatatatcttatttgttccatttatcccccgagtattgtagccacatttaaagtgaaaatttcctgtgtcaaattaacttttccaatattttttgtccattttttccatgtctgcttgaattgaattcgctccaggtttccattaactttggaccatgcttcaagtatcctccgaaggatctcacttaccgccctgtgagtaacattacaaatggctgcatgtgtcctcagcatctccgtggctgctgtagtcaccgtgttctgtttctcattcctcctgcagatgagtgacatgggctggggcgccgtggtagagcacaccctggctgacgtcttgtatcacgtggagacagaagtggatgggaggcgcagtcccccatgggaaccctgaccaggtccctcttttctgtcaaggactttctgggaataatactgggggttttgtttttgtttttgaactgtctcaaatgttctcccaaagatgctaaaaacacagcctctccttttagcaagttaaaaggctgggtaggactgcgggagactgcctgcctttcaccattttctccccacttccagtgactgctcttattttgtgtaccataagccaacaaccgctgactccaggattgcataagccccctgtgaaatcggtgctgtactgcataccctgccagctgtgacttgttatcctactatattttctaaggagtgaataatattgtccgagtaactaacttatttaaaagacatttccttctgtgggcattgactgtatcccacctgttttccaaggaaatggtaacctgtttctgagaacacctgaaatcaatggctatacattccaaaccaatctaaacgctatttccttttggtgtgggtttggttttgttcattttgaaatacacttttgaacactgagatccgtaaaactactagatctctggaagtgtaattgtgaaagaaacttgcttgcagctttaacaaaatgagaaacttcccaaataaaacttgttttgaagttta

SEQ ID NO: 368486 - DNA, 2233 bp, Homo sapiens
cgtgatggcggcggcaggagcaggacctggccaggaagcgggtgccgggcctggcccaggagcggtcgcaaatgcaacaggggcagaagagggggagatgaagccggtggcagcgggagcagccgctcctcctggagaggggatctctgctgctccgacagttgagcccagttccggggaggctgaaggcggggaggcaaacttggtcgatgtaagcggtggcttggagacagaatcatctaatggaaaagatacactagaaggtgctggggatacatcagaggtgatggatactcaggcgggctccgtggatgaagagaatggccgacagttgggtgaggtagagctgcaatgtgggatttgtacaaaatggttcacggctgacacatttggcatagatacctcatcctgtctacctttcatgaccaactacagttttcattgcaacgtctgccatcacagtgggaatacctatttcctccggaagcaagcaaacttgaaggaaatgtgccttagtgctttggccaacctgacatggcagtcccgaacacaggatgaacatccgaagacaatgttctccaaagataaggatattataccatttattgataaatactgggagtgcatgacaaccagacagagacctgggaaaatgacttggccaaataacattgttaaaacaatgagtaaagaaagagatgtattcttggtaaaggaacacccagatccaggcagtaaagatccagaagaagattaccccaaatttggacttttggatcaggaccttagtaacattggtcctgcttatgacaaccaaaaacagagcagtgctgtgtctactagtgggaatttaaatgggggaattgcagcaggaagcagcggaaaaggacgaggagccaagcgcaaacagcaggatggagggaccacagggaccaccaagaaggcccggagtgaccctttgttttctgctcagcgccttccccctcatggctacccattggaacacccgtttaacaaagatggctatcggtatattctagctgagcctgatccgcacgcccctgaccccgagaagctggaacttgactgctgggcaggaaaacctattcctggagacctctacagagcctgcttgtatgaacgggttttgttagccctacatgatcgagctccccagttaaagatctcagatgaccggctgactgtggttggagagaagggctactctatggtgagggcctctcatggagtacggaagggtgcctggtattttgaaatcactgtggatgagatgccaccagataccgctgccagactgggttggtcccagcccctaggaaaccttcaagctcctttaggttatgataaatttagctattcttggcggagcaaaaagggaaccaagttccaccagtccattggcaaacactactcttctggctatggacagggagacgtcctgggattttatattaatcttcctgaagacacagagacagccaagtcattgccagacacatacaaagataaggctttgataaaattcaagagttatttgtattttgaggaaaaagactttgtggataaagcagagaagagcctgaagcagactccccatagtgagataatattttataaaaatggtgtcaatcaaggtgtggcttacaaagatatttttgagggggtttacttcccagccatctcactgtacaagagctgcacggtttccattaactttggaccatgcttcaagtatcctccgaaggatctcacttaccgccctatgagtgacatgggctggggcgccgtggtagagcacaccctggctgacgtcttgtatcacgtggagacagaagtggatgggaggcgcagtcccccatgggaaccctgaccagagaaagcttggactatatttctggaaggcacccactgtggggtgctgcttgttctgtggtgttgctgtgcagcggccgggaggagcagagggctgcaggagaccctctgagattctgctttgtgcacatgtactgccagcgcatggcattcttgagcccataaagcaagacttctcaggccctgtggttagcatcccccacacccatatcagccactagcattttaaagatggttttaggtgggtacataagggcccagaaaaaaagttttacaattattttaggggcctgaaccctcatgtcatagctaatcagtgaatgaagttaccttttaatcc

SEQ ID NO: 368487 - DNA, 1589 bp, Homo sapiens
cgtgatggcggcggcaggagcaggacctggccaggaagcgggtgccgggcctggcccaggagcggtcgcaaatgcaacaggggcagaagagggggagatgaagccggtggcagcgggagcagccgctcctcctggagaggggatctctgctgctccgacagttgagcccagttccggggaggctgaaggcggggaggcaaacttggtcgatgtaagcggtggcttggagacagaatcatctaatggaaaagatacactagaaggtgctggggatacatcagaggtgatggatactcaggcgggctccgtggatgaagagaatggccgacagttgggtgaggtagagctgcaatgtgggatttgtacaaaatggttcacggctgacacatttggcatagatacctcatcctgtctacctttcatgaccaactacagttttcattgcaacgtctgccatcacagtgggaatacctatttcctccggaagcaagcaaacttgaaggaaatgtgccttagtgctttggccaacctgacatggcagtcccgaacacaggatgaacatccgaagacaatgttctccaaagataaggatattataccatttattgataaatactgggagtgcatgacaaccagacagagacctgggaaaatgacttggccaaataacattgttaaaacaatgagtaaagaaagagatgtattcttggtaaaggaacacccagatccaggcagtaaagatccagaagaagattaccccaaatttggacttttggatcaggaccttagtaacattggtcctgcttatgacaaccaaaaacagagcagtgctgtgtctactagtgggaatttaaatgggggaattgcagcaggaagcagcggaaaaggacgaggagccaagcgcaaacagcaggatggagggaccacagggaccaccaagaaggcccggagtgaccctttgttttctgctcagcgccttccccctcatggctacccattggaacacccgtttaacaaagatggctatcggtatattctagctgagcctgatccgcacgcccctgaccccgagaagctggaacttgactgctgggcaggaaaacctattcctggagacctctacagagcctgcttgtatgaacgggttttgttagccctacatgatcgagctccccagttaaagatctcagatgaccggctgactgtggttggagagaagggctactctatggtgagggcctctcatggagtacggaagggtgcctggtattttgaaatcactgtggatgagatgccaccagataccgctgccagactgggttggtcccagcccctaggaaaccttcaagctcctttaggttatgataaatttagctattcttggcggagcaaaaagggaaccaagttccaccagtccattggcccttatgagctcggataagccaaaggagaaggggaaaataaccagtcattaagaaggaaggcaaggccgcagaggctgtcgctgcagctgtcggcactggagccaccacagcagctgtcatggcggcagctggaatagcagccattggcccttggcccttatcgag

SEQ ID NO: 368488 - DNA, 259 bp, Homo sapiens
ccaagatcatgccactgcactccagcctggtgacagagcaagactccgtctcaaaaaagaaagaaaaagttaatgcatgaagatttccatgtacttttagtctgtcagtaggcaccattgaagcaggtaaaaaaaaaaaaggaaatctttaaacagtgtaaaccaaaactatctgagacagatctcaatcaatttagaagtttattttgccaaagttaaggacctgcctgtaagaaaaaaacagaatcacagaaacagt

SEQ ID NO: 368489 - DNA, 2547 bp, Homo sapiens
ctttcacgggcggtgggagctgaggctcctgtcgttatctctgatccttgcaccctggcaggaagctggtagctcacactttaacgggaggccttcacatattccagaaaagaaaccactttgcagtgccagactggaagaagtaacggtcactctgaaaacagggtgggagagctgcctctctttgaacctctcccaggaccaactctaacccagggaggcaaacttggtcgatgtaagcggtggcttggagacagaatcatctaatggaaaagatacactagaaggtgctggggatacatcagaggtgatggatactcaggcgggctccgtggatgaagagaatggccgacagttgggtgaggtagagctgcaatgtgggatttgtacaaaatggttcacggctgacacatttggcatagatacctcatcctgtctacctttcatgaccaactacagttttcattgcaacgtctgccatcacagtgggaatacctatttcctccggaagcaagcaaacttgaaggaaatgtgccttagtgctttggccaacctgacatggcagtcccgaacacaggatgaacatccgaagacaatgttctccaaagataaggatattataccatttattgataaatactgggagtgcatgacaaccagacagagacctgggaaaatgacttggccaaataacattgttaaaacaatgagtaaagaaagagatgtattcttggtaaaggaacacccagatccaggcagtaaagatccagaagaagattaccccaaatttggacttttggatcaggaccttagtaacattggtcctgcttatgacaaccaaaaacagagcagtgctgtgtctactagtgggaatttaaatgggggaattgcagcaggaagcagcggaaaaggacgaggagccaagcgcaaacagcaggatggagggaccacagggaccaccaagaaggcccggagtgaccctttgttttctgctcagcgccttccccctcatggctacccattggaacacccgtttaacaaagatggctatcggtatattctagctgagcctgatccgcacgcccctgaccccgagaagctggaacttgactgctgggcaggaaaacctattcctggagacctctacagagcctgcttgtatgaacgggttttgttagccctacatgatcgagctccccagttaaagatctcagatgaccggctgactgtggttggagagaagggctactctatggtgagggcctctcatggagtacggaagggtgcctggtattttgaaatcactgtggatgagatgccaccagataccgctgccagactgggttggtcccagcccctaggaaaccttcaagctcctttaggttatgataaatttagctattcttggcggagcaaaaagggaaccaagttccaccagtccattggcaaacactactcttctggctatggacagggagacgtcctgggattttatattaatcttcctgaagacacagagacagccaagtcattgccagacacatacaaagataaggctttgataaaattcaagagttatttgtattttgaggaaaaagactttgtggataaagcagagaagagcctgaagcagactccccatagtgagataatattttataaaaatggtgtcaatcaaggtgtggcttacaaagatatttttgagggggtttacttcccagccatctcactgtacaagagctgcacggtttccattaactttggaccatgcttcaagtatcctccgaaggatctcacttaccgccctatgagtgacatgggctggggcgccgtggtagagcacaccctggctgacgtcttgtatcacgtggagacagaagtggatgggaggcgcagtcccccatgggaaccctgaccaggtccctcttttctgtcaaggactttctgggaataatactgggggttttgtttttgtttttgaactgtctcaaatgttctcccaaagatgctaaaaacacagcctctccttttagcaagttaaaaggctgggtaggactgcgggagactgcctgcctttcaccattttctccccacttccagtgactgctcttattttgtgtaccataagccaacaaccgctgactccaggattgcataagccccctgtgaaatcggtgctgtactgcataccctgccagctgtgacttgttatcctactatattttctaaggagtgaataatattgtccgagtaactaacttatttaaaagacatttccttctgtgggcattgactgtatcccacctgttttccaaggaaatggtaacctgtttctgagaacacctgaaatcaatggctatacattccaaaccaatctaaacgctatttccttttggtgtgggtttggttttgttcattttgaaatacacttttgaacactgagatccgtaaaactactagatctctggaagtgtaattgtgaaagaaacttgcttgcagctttaacaaaatgagaaacttcccaaataaaacttgttttgaagttta

SEQ ID NO: 368490 - DNA, 2360 bp, Homo sapiens
cgtgatggcggcggcaggagcaggacctggccaggaagcgggtgccgggcctggcccaggagcggtcgcaaatgcaacaggggcagaagagggggagatgaagccggtggcagcgggagcagccgctcctcctggagaggggatctctgctgctccgacagttgagcccagttccggggaggctgaaggcggggaggcaaacttggtcgatgtaagcggtggcttggagacagaatcatctaatggaaaagatacactagaaggtgctggggatacatcagaggtgatggatactcaggcgggctccgtggatgaagagaatggccgacagttgggtgaggtagagctgcaatgtgggatttgtacaaaatggttcacggctgacacatttggcatagatacctcatcctgtctacctttcatgaccaactacagttttcattgcaacgtctgccatcacagtgggaatacctatttcctccggaagcaagcaaacttgaaggaaatgtgccttagtgctttggccaacctgacatggcagtcccgaacacaggatgaacatccgaagacaatgttctccaaagataaggatattataccatttattgataaatactgggagtgcatgacaaccagacagagacctgggaaaatgacttggccaaataacattgttaaaacaatgagtaaagaaagagatgtattcttggtaaaggaacacccagatccaggcagtaaagatccagaagaagattaccccaaatttggacttttggatcaggaccttagtaacattggtcctgcttatgacaaccaaaaacagagcagtgctgtgtctactagtgggaatttaaatgggggaattgcagcaggaagcagcggaaaaggacgaggagccaagcgcaaacagcaggatggagggaccacagggaccaccaagaaggcccggagtgaccctttgttttctgctcagcgccttccccctcatggctacccattggaacacccgtttaacaaagatggctatcggtatattctagctgagcctgatccgcacgcccctgaccccgagaagctggaacttgactgctgggcaggaaaacctattcctggagacctctacagagcctgcttgtatgaacgggttttgttagccctacatgatcgagctccccagttaaagatctcagatgaccggctgactgtggttggagagaagggctactctatggtgagggcctctcatggagtacggaagggtgcctggtattttgaaatcactgtggatgagatgccaccagataccgctgccagactgggttggtcccagcccctaggaaaccttcaagctcctttaggttatgataaatttagctattcttggcggagcaaaaagggaaccaagttccaccagtccattggcaaacactactcttctggctatggacagggagacgtcctgggattttatattaatcttcctgaagacacagagacagccaagtcattgccagacacatacaaagataaggctttgataaaattcaagagttatttgtattttgaggaaaaagactttgtggataaagcagagaagagcctgaagcagactccccatagtgagataatattttataaaaatggtgtcaatcaaggtgtggcttacaaagatatttttgagggggtttacttcccagccatctcactgtacaagagctgcacggtttccattaactttggaccatgcttcaagtatcctccgaaggatctcacttaccgccctatgagtgacatgggctggggcgccgtggtagagcacaccctggctgacgtcttgtatcacgtggagacagaagtggatgggaggcgcagtcccccatgggaaccctgaccaggtccctcttttctgtcaaggactttctgggaataatactgggggttttgtttttgtttttgaactgtctcaaatgttctcccaaagatgctaaaaacacagcctctccttttagcaagttaaaaggctgggtaggactgcgggagactgcctgcctttcaccattttctccccacttccagtgactgctcttattttgtgtaccataagccaacaaccgctgactccaggattgcataagccccctgtgaaatcggtgctgtactgcataccctgccagctgtgacttgttatcctactatattttctaaggagtgaataatattgtccgagtaactaacttatttaaaagacatttccttctgtgggcattgactgtatcccacctgttttccaaggaaatggtaacctgtttctgagaacacctgaaatcaatggctatacattccaaaccaatctaaacgct

SEQ ID NO: 368491 - DNA, 2705 bp, Homo sapiens
  misc_feature (2537)..(2537): n is a, c, g, or t
cgtgatggcggcggcaggagcaggacctggccaggaagcgggtgccgggcctggcccaggagcggtcgcaaatgcaacaggggcagaagagggggagatgaagccggtggcagcgggagcagccgctcctcctggagaggggatctctgctgctccgacagttgagcccagttccggggaggctgaaggcggggaggcaaacttggtcgatgtaagcggtggcttggagacagaatcatctaatggaaaagatacactagaaggtgctggggatacatcagaggtgatggatactcaggcgggctccgtggatgaagagaatggccgacagttgggtgaggtagagctgcaatgtgggatttgtacaaaatggttcacggctgacacatttggcatagatacctcatcctgtctacctttcatgaccaactacagttttcattgcaacgtctgccatcacagtgggaatacctatttcctccggaagcaagcaaacttgaaggaaatgtgccttagtgctttggccaacctgacatggcagtcccgaacacaggatgaacatccgaagacaatgttctccaaagataaggatattataccatttattgataaatactgggagtgcatgacaaccagacagagacctgggaaaatgacttggccaaataacattgttaaaacaatgagtaaagaaagagatgtattcttggtaaaggaacacccagatccaggcagtaaagatccagaagaagattaccccaaatttggacttttggatcaggaccttagtaacattggtcctgcttatgacaaccaaaaacagagcagtgctgtgtctactagtgggaatttaaatgggggaattgcagcaggaagcagcggaaaaggacgaggagccaagcgcaaacagcaggatggagggaccacagggaccaccaagaaggcccggagtgaccctttgttttctgctcagcgccttccccctcatggctacccattggaacacccgtttaacaaagatggctatcggtatattctagctgagcctgatccgcacgcccctgaccccgagaagctggaacttgactgctgggcaggaaaacctattcctggagacctctacagagcctgcttgtatgaacgggttttgttagccctacatgatcgagctccccagttaaagatctcagatgaccggctgactgtggttggagagaagggctactctatggtgagggcctctcatggagtacggaagggtgcctggtattttgaaatcactgtggatgagatgccaccagataccgctgccagactgggttggtcccagcccctaggaaaccttcaagctcctttaggttatgataaatttagctattcttggcggagcaaaaagggaaccaagttccaccagtccattggcaaacactactcttctggctatggacagggagacgtcctgggattttatattaatcttcctgaagacacagagacagccaagtcattgccagacacatacaaagataaggctttgataaaattcaagagttatttgtattttgaggaaaaagactttgtggataaagcagagaagagcctgaagcagactccccatagtgagataatattttataaaaatggtgtcaatcaaggtgtggcttacaaagatatttttgagggggtttacttcccagccatctcactgtacaagagctgcacggtttccattaactttggaccatgcttcaagtatcctccgaaggatctcacttaccgccctatgagtgacatgggctggggcgccgtggtagagcacaccctggctgacgtcttgtatcacgtggagacagaagtggatgggaggcgcagtcccccatgggaaccctgaccaggtccctcttttctgtcaaggactttctgggaataatactgggggttttgtttttgtttttgaactgtctcaaatgttctcccaaagatgctaaaaacacagcctctccttttagcaagttaaaaggctgggtaggactgcgggagactgcctgcctttcaccattttctccccacttccagtgactgctcttattttgtgtaccataagccaacaaccgctgactccaggattgcataagccccctgtgaaatcggtgctgtactgcataccctgccagctgtgacttgttatcctactatattttctaaggagtgaataatattgtccgagtaactaacttatttaaaagacatttccttctgtgggcattgactgtatcccacctgttttccaaggaaatggtaacctgtttctgagaacacctgaaatcaatggctatacattccaaaccaatctaaacgctatttccttttggtgtgggtttggttttgttcattttgaaatacacttttgaacactgagatccgtaaaactactagatctctggaagtgtaattgtgaaagaaacttgcttgcagctttaacaaaatgagaaacttcccaaataaaacttgttttgaagtttaaaaaaacaacaaanaaaaaacttggggccgctctgcccctgaaaaaacttctctgaaacccctgcgttggggcgcgggccccgttgggtatctgacactggcccaactgttccaggaacaccgtgccgaactagggtgtgattcccacattaaaaaacccggcggaccgatgttgaaaatcg

SEQ ID NO: 368492 - DNA, 2005 bp, Homo sapiens
gaaaaggacgaggagccaagcgcaaacagcaggatggagggaccacagggaccacgcgagaaggcccggaggatattataccatttattgataaatactgggagtgcatgacaaccagacagagacctgggaaaatgacttggccaaataacattgttaaaacaatgagtaaagaaagagatgtattcttggtaaaggaacacccagatccaggcagtaaagatccagaagaagattaccccaaatttggacttttggatcaggaccttagtaacattggtcctgcttatgacaaccaaaaacagagcagtgctgtgtctactagtgggaatttaaatgggggaattgcagcaggaagcagcggaaaaggacgaggagccaagcgcaaacagcaggatggagggaccacagggaccaccaagaaggcccggagtgaccctttgttttctgctcagcgccttccccctcatggctacccattggaacacccgtttaacaaagatggctatcggtatattctagctgagcctgatccgcacgcccctgaccccgagaagctggaacttgactgctgggcaggaaaacctattcctggagacctctacagagcctgcttgtatgaacgggttttgttagccctacatgatcgagctccccagttaaagatctcagatgaccggctgactgtggttggagagaagggctactctatggtgagggcctctcatggagtacggaagggtgcctggtattttgaaatcactgtggatgagatgccaccagataccgctgccagactgggttggtcccagcccctaggaaaccttcaagctcctttaggttatgataaatttagctattcttggcggagcaaaaagggaaccaagttccaccagtccattggcaaacactactcttctggctatggacagggagacgtcctgggattttatattaatcttcctgaagacacagagacagccaagtcattgccagacacatacaaagataaggctttgataaaattcaagagttatttgtattttgaggaaaaagactttgtggataaagcagagaagagcctgaagcagactccccatagtgagataatattttataaaaatggtgtcaatcaaggtgtggcttacaaagatatttttgagggggtttacttcccagccatctcactgtacaagagctgcacggtttccattaactttggaccatgcttcaagtatcctccgaaggatctcacttaccgccctatgagtgacatgggctggggcgccgtggtagagcacaccctggctgacgtcttgtatcacgtggagacagaagtggatgggaggcgcagtcccccatgggaaccctgaccaggtccctcttttctgtcaaggactttctgggaataatactgggggttttgtttttgtttttgaactgtctcaaatgttctcccaaagatgctaaaaacacagcctctccttttagcaagttaaaaggctgggtaggactgcgggagactgcctgcctttcaccattttctccccacttccagtgactgctcttattttgtgtaccataagccaacaaccgctgactccaggattgcataagccccctgtgaaatcggtgctgtactgcataccctgccagctgtgacttgttatcctactatattttctaaggagtgaataatattgtccgagtaactaacttatttaaaagacatttccttctgtgggcattgactgtatcccacctgttttccaaggaaatggtaacctgtttctgagaacacctgaaatcaatggctatacattccaaaccaatctaaacgctatttccttttggtgtgggtttggttttgttcattttgaaatacacttttgaacactgagatccgtaaaactactagatctctggaagtgtaattgtgaaagaaacttgcttgcagctttaacaaaatgagaaacttcccaaataaaacttgttttgaagttta

SEQ ID NO: 368493 - DNA, 1982 bp, Homo sapiens
tgattatttcttagaaggaaaaacgatactatcttttttggacactgcacctaggaattgacttttagagttagtggttgattattaattccatacttttaagtataaaatgttcattaatagtaaaacactacttctttttagagtaaagaaagagatgtattcttggtaaaggaacacccagatccaggcagtaaagatccagaagaagattaccccaaatttggacttttggatcaggaccttagtaacattggtcctgcttatgacaaccaaaaacagagcagtgctgtgtctactagtgggaatttaaatgggggaattgcagcaggaagcagcggaaaaggacgaggagccaagcgcaaacagcaggatggagggaccacagggaccaccaagaaggcccggagtgaccctttgttttctgctcagcgccttccccctcatggctacccattggaacacccgtttaacaaagatggctatcggtatattctagctgagcctgatccgcacgcccctgaccccgagaagctggaacttgactgctgggcaggaaaacctattcctggagacctctacagagcctgcttgtatgaacgggttttgttagccctacatgatcgagctccccagttaaagatctcagatgaccggctgactgtggttggagagaagggctactctatggtgagggcctctcatggagtacggaagggtgcctggtattttgaaatcactgtggatgagatgccaccagataccgctgccagactgggttggtcccagcccctaggaaaccttcaagctcctttaggttatgataaatttagctattcttggcggagcaaaaagggaaccaagttccaccagtccattggcaaacactactcttctggctatggacagggagacgtcctgggattttatattaatcttcctgaagacacagagacagccaagtcattgccagacacatacaaagataaggctttgataaaattcaagagttatttgtattttgaggaaaaagactttgtggataaagcagagaagagcctgaagcagactccccatagtgagataatattttataaaaatggtgtcaatcaaggtgtggcttacaaagatatttttgagggggtttacttcccagccatctcactgtacaagagctgcacggtttccattaactttggaccatgcttcaagtatcctccgaaggatctcacttaccgccctatgagtgacatgggctggggcgccgtggtagagcacaccctggctgacgtcttgtatcacgtggagacagaagtggatgggaggcgcagtcccccatgggaaccctgaccaggtccctcttttctgtcaaggactttctgggaataatactgggggttttgtttttgtttttgaactgtctcaaatgttctcccaaagatgctaaaaacacagcctctccttttagcaagttaaaaggctgggtaggactgcgggagactgcctgcctttcaccattttctccccacttccagtgactgctcttattttgtgtaccataagccaacaaccgctgactccaggattgcataagccccctgtgaaatcggtgctgtactgcataccctgccagctgtgacttgttatcctactatattttctaaggagtgaataatattgtccgagtaactaacttatttaaaagacatttccttctgtgggcattgactgtatcccacctgttttccaaggaaatggtaacctgtttctgagaacacctgaaatcaatggctatacattccaaaccaatctaaacgctatttccttttggtgtgggtttggttttgttcattttgaaatacacttttgaacactgagatccgtaaaactactagatctctggaagtgtaattgtgaaagaaacttgcttgcagctttaacaaaatgagaaacttcccaaataaaacttgttttgaagttta

SEQ ID NO: 368494 - DNA, 2252 bp, Homo sapiens
cgtgatggcggcggcaggagcaggacctggccaggaagcgggtgccgggcctggcccaggagcggtcgcaaatgcaacaggggcagaagagggggagatgaagccggtggcagcgggagcagccgctcctcctggagaggggatctctgctgctccgacagttgagcccagttccggggaggctgaaggcggggaggcaaacttggtcgatgtaagcggtggcttggagacagaatcatctaatggaaaagatacactagaaggtgctggggatacatcagaggtgatggatactcaggcgggctccgtggatgaagagaatggccgacagttgggtgaggtagagctgcaatgtgggatttgtacaaaatggttcacggctgacacatttggcatagatacctcatcctgtctacctttcatgaccaactacagttttcattgcaacgtctgccatcacagtgggaatacctatttcctccggaagcaagcaaacttgaaggaaatgtgccttagtgctttggccaacctgacatggcagtcccgaacacaggatgaacatccgaagacaatgttctccaaagataaggatattataccatttattgataaatactgggagtgcatgacaaccagacagagacctgggaaaatgacttggccaaataacattgttaaaacaatgagtaaagaaagagatgtattcttggtaaaggaacacccagatccaggcagtaaagatccagaagaagattaccccaaatttggacttttggatcaggaccttagtaacattggtcctgcttatgacaaccaaaaacagagcagtgctgtgtctactagtgggaatttaaatgggggaattgcagcaggaagcagcggaaaaggacgaggagccaagcgcaaacagcaggatggagggaccacagggaccaccaagaaggcccggagtgaccctttgttttctgctcagcgccttccccctcatggctacccattggaacacccgtttaacaaagatggctatcggtatattctagctgagcctgatccgcacgcccctgaccccgagaagctggaacttgactgctgggcaggaaaacctattcctggagacctctacagagcctgcttgtatgaacgggttttgttagccctacatgatcgagctccccagttaaagatctcagatgaccggctgactgtggttggagagaagggctactctatggtgagggcctctcatggagtacggaagggtgcctggtattttgaaatcactgtggatgagatgccaccagataccgctgccagactgggttggtcccagcccctaggaaaccttcaagctcctttaggttatgataaatttagctattcttggcggagcaaaaagggaaccaagttccaccagtccattggcaaacactactcttctggctatggacagggagacgtcctgggattttatattaatcttcctgaagacacagagacagccaagtcattgccagacacatacaaagataaggctttgataaaattcaagagttatttgtattttgaggaaaaagactttgtggataaagcagagaagagcctgaagcagactccccatagtgagataatattttataaaaatggtgtcaatcaaggtgtggcttacaaagatatttttgagggggtttacttcccagccatctcactgtacaagagctgcacggtttccattaactttggaccatgcttcaagtatcctccgaaggatctcacttaccgccctatgagtgacatgggctggggcgccgtggtagagcacaccctggctgacgtcttgtatcacgtggagacagaagtggatgggaggcgcagtcccccatgggaaccctgaccaggtccctcttttctgtcaaggactttctgggaataatactgggggttttgtttttgtttttgaactgtctcaaatgttctcccaaagatgctaaaaacacagcctctccttttagcaagttaaaaggctgggtaggactgcgggagactgcctgcctttcaccattttctccccacttccagtgactgctcttattttgtgtaccataagccaacaaccgctgactccaggattgcataagccccctgtgaaatcggtgctgtactgcataccctgccagctgtgacttgttatcctactatattttctaaggagtgaatatcgtgagcgctgacataacgtgtgatcgcatatcacg

SEQ ID NO: 368495 - DNA, 1778 bp, Homo sapiens
cgtgatggcggcggcaggagcaggacctggccaggaagcgggtgccgggcctggcccaggagcggtcgcaaatgcaacaggggcagaagagggggagatgaagccggtggcagcgggagcagccgctcctcctggagaggggatctctgctgctccgacagttgagcccagttccggggaggctgaaggcggggaggcaaacttggtcgatgtaagcggtggcttggagacagaatcatctaatggaaaagatacactagaaggtgctggggatacatcagaggtgatggatactcaggcgggctccgtggatgaagagaatggccgacagttgggtgaggtagagctgcaatgtgggatttgtacaaaatggttcacggctgacacatttggcatagatacctcatcctgtctacctttcatgaccaactacagttttcattgcaacgtctgccatcacagtgggaatacctatttcctccggaagcaagcaaacttgaaggaaatgtgccttagtgctttggccaacctgacatggcagtcccgaacacaggatgaacatccgaagacaatgttctccaaagataaggatattataccatttattgataaatactgggagtgcatgacaaccagacagagacctgggaaaatgacttggccaaataacattgttaaaacaatgagtaaagaaagagatgtattcttggtaaaggaacacccagatccaggcagtaaagatccagaagaagattaccccaaatttggacttttggatcaggaccttagtaacattggtcctgcttatgacaaccaaaaacagagcagtgctgtgtctactagtgggaatttaaatgggggaattgcagcaggaagcagcggaaaaggacgaggagccaagcgcaaacagcaggatggagggaccacagggaccaccaagaaggcccggagtgaccctttgttttctgctcagcgccttccccctcatggctacccattggaacacccgtttaacaaagatggctatcggtatattctagctgagcctgatccgcacgcccctgaccccgagaagctggaacttgactgctgggcaggaaaacctattcctggagacctctacagagcctgcttgtatgaacgggttttgttagccctacatgatcgagctccccagttaaagatctcagatgaccggctgactgtggttggagagaagggctactctatggtgagggcctctcatggagtacggaagggtgcctggtattttgaaatcactgtggatgagatgccaccagataccgctgccagactgggttggtcccagcccctaggaaaccttcaagctcctttaggttatgataaatttagctattcttggcggagcaaaaagggaaccaagttccaccagtccattggcaaacactactcttctggctatggacagggagacgtcctgggattttatattaatcttcctgaagacacagagacagccaagtcattgccagacacatacaaagataaggctttgataaaattcaagagttatttgtattttgaggaaaaagactttgtggataaagcagagaagagcctgaagcagactccccatagtgagataatattttataaaaatggtgtcaatcaaggtgtggcttacaaagatatttttgagggggtttacttcccagccatctcactgtacaagagctgcacgtttccattaactttggaccttgaacttacgtatcatgtggagaagatccaattac

SEQ ID NO: 368496 - DNA, 627 bp, Homo sapiens
atcattttctgaattagtttggttttgttgttaagagtctgccacagattggaaggttaaacaggtatggagagtgaaaagcggtagttgttaagatttcagaaggagaggagtagtaaattttgccttaaaattttgttggaaagaatgtttaggagtcattactgatacgttagccagcagcaacaagaccaagaagaaagaaatttaatgtctgtttgtaacatgtgtcaggctttcagtttgaacttcagcaaagtagtgcttacttcagcagcatacctacaagaattggaacaatacagagaagattggtgtggaagaaaacaaaaataaaaaataaggctgggcgtggtggctcacagctgtaatcccagcaccttgggaagctgaggcgggcggatcacctgaggtcaggagtttgagaccagcctagccaacatggtgaaaccctgtctctactaaaaattcaaaaattgggcaggcatggtggcgggtgcctgtagtcccatctacttgggaggctgaggcacgagaatcgcttgacccaagagatggagattgcagtgatctaagatcgtgccactgcactccagcctgggcaaacagagcacgactccatctcca

SEQ ID NO: 368497 - DNA, 904 bp, Homo sapiens
gaaggccaggcgcaactgccctcccaggacccagcggaacccacgccctcccctaagtcttaaagggccagaggcagcacttactgcccgggcccttcctcacttttggggggcgggggtgcgcaagcgcagtgggggagctctggggtgggggtagcggtcgagtatcaagttgctttctgtcccggcagaggaagccagatcgctgagggtccggtctccagtttgcctcctgctatatccatccctgtccatccaccagctcgcagcacagggggagctggaccagctgaaggagcatttgcggaaaggtgacaacctcgtcaacaagccagacgagcgcggcttcacccccctcatctgggcctccgcctttggagagattgagaccgttcgcttcctgctggagtggggtgccgacccccacatcctggcaaaagagcgagagagcgccctgtcgctggccagcacaggcggctacacagacattgtggggctgctgctggagcgtgacgtggacatcaacatctatgattggaatggagggacgccactgctgtacgctgtgcgcgggaaccacgtgaaatgcgttgaggccttgctggcccgaggcgctgacctcaccaccgaagccgactctggctacaccccgatggaccttgccgtggccctgggataccggaaagtgcaacaggtgatcgagaaccacatcctcaagctcttccagagcaacctggtgcccgctgaccctgagtgaaggccgcctgccggggactcagacactcagggaacaaaatggtcagccagagctggggaaacccagaactgacttcaaaggcagcttctggacaggtggtgggaggggacccttcccaagaggaaccaataaaccttctgtgcagaa

SEQ ID NO: 368498 - DNA, 1170 bp, Homo sapiens
gaaggccaggcgcaactgccctcccaggacccagcggaacccacgccctcccctaagtcttaaagggccagaggcagcacttactgcccgggcccttcctcacttttggggggcgggggtgcgcaagcgcagtgggggagctctggggtgggggtagcggtcgagtatcaagttgctttctgtcccggcagaggaagccagatcgctgagggtccggtctccagtttgcctcctgctatatccattggaagagaaaagtttgtgacttgggcccccaagttttgagagaactgggctttcggcgcggggggacagaggaggctcgtggggagctttccccatggagcttacccagcctgcagaagacctcatccagacccagcagacccctgcctcagaacttggggaccctgaagaccccggagaggaggctgcagatggctcagacactgtggtcctcagtctctttccctgcacccctgagcctgtgaatcctgaaccggatgccagtgtttcctctccacaggggcagctccctgaagcactccaccactctcaccaaccggcagcgagggaacgaggtgtcagctctgccggccaccctagactccctgtccatccaccagctcgcagcacagggggagctggaccagctgaaggagcatttgcggaaaggtgacaacctcgtcaacaagccagacgagcgcggcttcacccccctcatctgggcctccgcctttggagagattgagaccgttcgcttcctgctggagtggggtgccgacccccacatcctggcaaaagagcgagagagcgccctgtcgctggccagcacaggcggctacacagacattgtggggctgctgctggagcgtgacgtggacatcaacatctatgattggaatggagggacgccactgctgtacgctgtgcgcgggaaccacgtgaaatgcgttgaggccttgctggccggggggtgaactcaacaacggaagccgatctggtaaacccgagggcctggcgggccggtaccggaggcgcaggggtggaacccatccagcgcaaggacggggcccgagccgattgaggcgcggcggggcccaactggggcaaggggccagggacccttcgctagcgcgtgggggggggccccaaagaatgggaaaaaaa

SEQ ID NO: 368499 - DNA, 542 bp, Homo sapiens
gcagccccggcgactggagaagccaccctgaaactggatctgcagctgggagacacggatgagctggggaaactccagcgtcacccactgggagggccctggtctgagttccaacatgtctcctcatcctggtcgaaaagatgtttttttccaaactgccgagtgttgcgattcagcactgaactcaccctgctcactgtctctggacaaaccaaagagtgggtcatgtcggttccacaagacctcgcagggcttaggattgggcacagccttggttcgaatcccggcgcctcctcaagctacagggcggcgcgatcttggctacgccttggcctgaacgtcctcacctgtaacttgggacgagaaccgccactccctcgcccaccccagtcctaaatgtcgcctcgatcaatcccctgccggaaaatttgggagagaggatcagggaaaccgccaatgcccggaggccaggcctttcacaggaaacagatttcccgcgggtttcgggggcggtggctttttgtgcgaggctgtttctctgc

SEQ ID NO: 368500 - DNA, 1268 bp, Homo sapiens
gaaggccaggcgcaactgccctcccaggacccagcggaacccacgccctcccctaagtcttaaagggccagaggcagcacttactgcccgggcccttcctcacttttggggggcgggggtgcgcaagcgcagtgggggagctctggggtgggggtagcggtcgagtatcaagttgctttctgtcccggcagaggaagccagatcgctgagggtccggtctccagtttgcctcctgctatatccattggaagagaaaagtttgtgacttgggcccccaagttttgagagaactgggctttcggcgcggggggacagaggaggctcgtggggagctttccccatggagcttacccagcctgcagaagacctcatccagacccagcagacccctgcctcagaacttggggaccctgaagaccccggagaggaggctgcagatggctcagacactgtggtcctcagtctctttccctgcacccctgagcctgtgaatcctgaaccggatgccagtgtttcctctccacaggggcagctccctgaagcactccaccactctcaccaaccggcagcgagggaacgaggtgtcagctctgccggccaccctagactccctgtccatccaccagctcgcagcacagggggagctggaccagctgaaggagcatttgcggaaaggtgacaacctcgtcaacaagccagacgagcgcggcttcacccccctcatctgggcctccgcctttggagagattgagaccgttcgcttcctgctggagtggggtgccgacccccacatcctggcaaaagagcgagagagcgccctgtcgctggccagcacaggcggctacacagacattgtggggctgctgctggagcgtgacgtggacatcaacatctatgattggaatggagggacgccactgctgtacgctgtgcgcgggaaccacgtgaaatgcgttgaggccttgctggcccgaggcgctgacctcaccaccgaagccgactctggctacaccccgatggaccttgccgtggccctgggataccggaaagtgcaacaggtgatcgagaaccacatcctcaagctcttccagagcaacctggtgcccgctgaccctgagtgaaggccgcctgccggggactcagacactcagggaacaaaatggtcagccagagctggggaaacccagaactgacttcaaaggcagcttctggacaggtggtgggaggggacccttcccaagaggaaccaataaaccttctgtgcagaa

SEQ ID NO: 368501 - DNA, 1597 bp, Homo sapiens
gaaggccaggcgcaactgccctcccaggacccagcggaacccacgccctcccctaagtcttaaagggccagaggcagcacttactgcccgggcccttcctcacttttggggggcgggggtgcgcaagcgcagtgggggagctctggggtgggggtagcggtcgagtatcaagttgctttctgtcccggcagaggaagccagatcgctgagggtccggtctccagtttgcctcctgctatatccattggaagagaaaagtttgtgacttgggcccccaagttttgagagaactgggctttcggcgcggggggacagaggaggctcgtggggagctttccccatggagcttacccagcctgcagaagacctcatccagacccagcagacccctgcctcagaacttggggaccctgaagaccccggagaggaggctgcagatggctcagacactgtggtcctcagtctctttccctgcacccctgagcctgtgaatcctgaaccggatgccagtgtttcctctccacaggggcagctccctgaagcactccaccactctcaccaaccggcagcgagggaacgaggtgtcagctctgccggccaccctagactccctgtccatccaccagctcgcagcacagggggagctggaccagctgaaggagcatttgcggaaaggtgacaacctcgtcaacaagccagacgagcgcggcttcacccccctcatctgggcctccgcctttggagagattgagaccgttcgcttcctgctggagtggggtgccgacccccacatcctggcaaaagagcgagagagcgccctgtcgctggccagcacaggcggctacacagacattgtggggctgctgctggagcgtgacgtggacatcaacatctatgattggaatggagggacgccactgctgtacgctgtgcgcgggaaccacgtgaaatgcgttgaggccttgctggcccgaggcgctgacctcaccaccgaagccgactctggctacaccccgatggaccttgccgtggccctgggataccggaaagtgcaacaggtgatcgagaaccacatcctcaagctcttccagagcaacctggtgcccgctgaccctgagtgaaggccgcctgccggggactcagacactcagggaacaaaatggtcagccagagctggggaaacccagaactgacttcaaaggcagcttctggacaggtggtgggaggggacccttcccaagaggaaccaataaaccttctgtgcagaatgagggactttgctgtgcttcccggagggcttcctggaggagacagcccctagaggtctcacaccttctccccaagcacccgcaggtggtagatgaccacacggccaaaaaagtcagtggcatcctcaaacgtcaccttcagccggtccacttcagcagctggtatggggaaagtgtgagcgtgggcagtcaagggaaactggtgatttctggtttcccacccgcaggcccccaccccttccagacccagctcacactccaccgatgtgggcaacctggggaagctgcaggtccctctaagcctctcacacagaacaggtggtcatcag

SEQ ID NO: 368502 - DNA, 1657 bp, Homo sapiens
  misc_feature (1657)..(1657): n is a, c, g, or t
gaaggccaggcgcaactgccctcccaggacccagcggaacccacgccctcccctaagtcttaaagggccagaggcagcacttactgcccgggcccttcctcacttttggggggcgggggtgcgcaagcgcagtgggggagctctggggtgggggtagcggtcgagtatcaagttgctttctgtcccggcagaggaagccagatcgctgagggtccggtctccagtttgcctcctgctatatccattggaagagaaaagtttgtgacttgggcccccaagttttgagagaactgggctttcggcgcggggggacagaggaggctcgtggggagctttccccatggagcttacccagcctgcagaagacctcatccagacccagcagacccctgcctcagaacttggggaccctgaagaccccggagaggaggctgcagatggctcagacactgtggtcctcagtctctttccctgcacccctgagcctgtgaatcctgaaccggatgccagtgtttcctctccacaggggcagctccctgaagcactccaccactctcaccaaccggcagcgagggaacgaggtgtcagctctgccggccaccctagactccctgtccatccaccagctcgcagcacagggggagctggaccagctgaaggagcatttgcggaaaggtgacaacctcgtcaacaagccagacgagcgcggcttcacccccctcatctgggcctccgcctttggagagattgagaccgttcgcttcctgctggagtggggtgccgacccccacatcctggcaaaagagcgagagagcgccctgtcgctggccagcacaggcggctacacagacattgtggggctgctgctggagcgtgacgtggacatcaacatctatgattggaatggagggacgccactgctgtacgctgtgcgcgggaaccacgtgaaatgcgttgaggccttgctggcccgaggcgctgacctcaccaccgaagccgactctggctacaccccgatggaccttgccgtggccctgggataccggaaagtgcaacaggtgatcgagaaccacatcctcaagctcttccagagcaacctggtgcccgctgaccctgagtgaaggccgcctgccggggactcagacactcagggaacaaaatggtcagccagagctggggaaacccagaactgacttcaaaggcagcttctggacaggtggtgggaggggacccttcccaagaggaaccaataaaccttctgtgcagaaaaaaaaaaaaaaaaaaaaaaaaaaaaaaaaaaaaaaaaaaaaagggggggggggactaaaaaagtacccacgagggagccacgaagatagagcggaaccacaaagaaatgggagaaaagaggggcccaatatagaggacagaaaataaaagacgaggcaggggccacggataaacagagacagaatgggggaaaagatgtaagacgaggagaactctggcgagagaaacccatataagaggggagggggagaaaataggggagaaaatactatgaggaaattagagacgagagagatatataaaaaaatgaagggtaaaaggtgtgaaagaggagaaaaaagggaagaagagaaaagtggaagagggagagatgtagaaaatttacggn

SEQ ID NO: 368503 - DNA, 1338 bp, Homo sapiens
gcagagggcccgccctccccgctcctcagtctttgcggacaagaaaggggctgtgtgagacgcagggaaggaggcacacccgggggtggcgcagtgaggagggggcgcgacggccaggaggctggtggagcgacacccaggcaggagagggggaagaactctctccctttctgaacccccttttccttgagagacgagttgggggagtcctccacgcattacccactcgggccgcaaaaactcccttctttagccctctgcccccgcccttgcttataagcctttgagaccgcagaagggaccttgttgtggaacgggacggccaagaggaagccagatcgctgagggtccggtctccagtttgcctcctgctatatccattggaagagaaaagtttgtgacttgggcccccaagttttgagagaactgggctttcggcgcggggggacagaggaggctcgtggggagctttccccatggagcttacccagcctgcagaagacctcatccagacccagcagacccctgcctcagaacttggggaccctgaagaccccggagaggaggctgcagatggctcagacactgtggtcctcagtctctttccctgcacccctgagcctgtgaatcctgaaccggatgccagtgtttcctctccacaggggcagctccctgaagcactccaccactctcaccaaccggcagcgagggaacgaggtgtcagctctgccggccaccctagactgtgacaacctcgtcaacaagccagacgagcgcggcttcacccccctcatctgggcctccgcctttggagagattgagaccgttcgcttcctgctggagtggggtgccgacccccacatcctggcaaaagagcgagagagcgccctgtcgctggccagcacaggcggctacacagacattgtggggctgctgctggagcgtgacgtggacatcaacatctatgattggaatggagggacgccactgctgtacgctgtgcgcgggaaccacgtgaaatgcgttgaggccttgctggcccgaggcgctgacctcaccaccgaagccgactctggctacaccccgatggaccttgccgtggccctgggataccggaaagtgcaacaggtgatcgagaaccacatcctcaagctcttccagagcaacctggtgcccgctgaccctgagtgaaggccgcctgccggggactcagacactcagggaacaaaatggtcagccagagctggggaaacccagaactgacttcaaaggcagcttctggacaggtggtgggaggggacccttcccaagaggaaccaataaaccttctgtgcagaa

SEQ ID NO: 368504 - DNA, 1343 bp, Homo sapiens
gaaggccaggcgcaactgccctcccaggacccagcggaacccacgccctcccctaagtcttaaagggccagaggcagcacttactgcccgggcccttcctcacttttggggggcgggggtgcgcaagcgcagtgggggagctctggggtgggggtagcggtcgagtatcaagttgctttctgtcccggcagaggaagccagatcgctgagggtccggtctccagtttgcctcctgctatatccattggaagagaaaagtttgtgacttgggcccccaagttttgagagaactgggctttcggcgcggggggacagaggaggctcgtggggagctttccccatggagcttacccagcctgcagaagacctcatccagacccagcagacccctgcctcagaacttggggaccctgaagaccccggagaggaggctgcagatggctcagacactgtggtcctcagtctctttccctgcacccctgagcctgtgaatcctgaaccggatgccagtgtttcctctccacaggggcagctccctgaagcactccaccactctcaccaaccggcagcgagggaacgaggtgtcagctctgccggccaccctagactccctgtccatccaccagctcgcagcacagggggagctggaccagctgaaggagcatttgcggaaaggtgacaacctcgtcaacaagccagacgagcgcggcttcacccccctcatctgggcctccgcctttggagagattgagaccgttcgcttcctgctggagtggggtgccgacccccacatcctggcaaaagagcgagagagcgccctgtcgctggccagcacaggcggctacacagacattgtggggctgctgctggagcgtgacgtggacatcaacatctatgattggaatggagggacgccactgctgtacgctgtgcgcgggaaccacgtgaaatgcgttgaggccttgctggcccgaggcgctgacctcaccaccgaagccgactctggctacaccccgatggaccttgccgtggccctgggataccggaaagatggagtttcgctcttgttgcccaggctggagtgctatggcgtgatctcggctcactgcaacttccgcctcccagtgcaacaggtgatcgagaaccacatcctcaagctcttccagagcaacctggtgcccgctgaccctgagtgaaggccgcctgccggggactcagacactcagggaacaaaatggtcagccagagctggggaaacccagaactgacttcaaaggcagcttctggacaggtggtgggaggggacccttcccaagaggaaccaataaaccttctgtgcagaa

SEQ ID NO: 368505 - DNA, 1133 bp, Homo sapiens
gaaggccaggcgcaactgccctcccaggacccagcggaacccacgccctcccctaagtcttaaagggccagaggcagcacttactgcccgggcccttcctcacttttggggggcgggggtgcgcaagcgcagtgggggagctctggggtgggggtagcggtcgagtatcaagttgctttctgtcccggcagaggaagccagatcgctgagggtccggtctccagtttgcctcctgctatatccattggaagagaaaagtttgtgacttggggaccctgaagaccccggagaggaggctgcagatggctcagacactgtggtcctcagtctctttccctgcacccctgagcctgtgaatcctgaaccggatgccagtgtttcctctccacaggggcagctccctgaagcactccaccactctcaccaaccggcagcgagggaacgaggtgtcagctctgccggccaccctagactccctgtccatccaccagctcgcagcacagggggagctggaccagctgaaggagcatttgcggaaaggtgacaacctcgtcaacaagccagacgagcgcggcttcacccccctcatctgggcctccgcctttggagagattgagaccgttcgcttcctgctggagtggggtgccgacccccacatcctggcaaaagagcgagagagcgccctgtcgctggccagcacaggcggctacacagacattgtggggctgctgctggagcgtgacgtggacatcaacatctatgattggaatggagggacgccactgctgtacgctgtgcgcgggaaccacgtgaaatgcgttgaggccttgctggcccgaggcgctgacctcaccaccgaagccgactctggctacaccccgatggaccttgccgtggccctgggataccggaaagtgcaacaggtgatcgagaaccacatcctcaagctcttccagagcaacctggtgcccgctgaccctgagtgaaggccgcctgccggggactcagacactcagggaacaaaatggtcagccagagctggggaaacccagaactgacttcaaaggcagcttctggacaggtggtgggaggggacccttcccaagaggaaccaataaaccttctgtgcagaa

SEQ ID NO: 368506 - DNA, 1677 bp, Homo sapiens
gaaggccaggcgcaactgccctcccaggacccagcggaacccacgccctcccctaagtcttaaagggccagaggcagcacttactgcccgggcccttcctcacttttggggggcgggggtgcgcaagcgcagtgggggagctctggggtgggggtagcggtcgagtatcaagttgctttctgtcccggcagaggaagccagatcgctgagggtccggtctccagtttgcctcctgctatatccattggaagagaaaagtttgtgacttgggcccccaagttttgagagaactgggctttcggcgcggggggacagaggaggctcgtggggagctttccccatggagcttacccagcctgcagaagacctcatccagacccagcagacccctgcctcagaacttggggaccctgaagaccccggagaggaggctgcagatggctcagacactgtggtcctcagtctctttccctgcacccctgagcctgtgaatcctgaaccggatgccagtgtttcctctccacaggggcagctccctgaagcactccaccactctcaccaaccggcagcgagggaacgaggtgtcagctctgccggccaccctagactgtgagtgggcccacggtccccaacaaggagaggagtaggagggtgggagggcctgtgaggagcaatcgtggacagagggtaaactgaggcacagagaagcaaggggatgagtgaggactctgcctctgtcctgccccagcccctgtccatccaccagctcgcagcacagggggagctggaccagctgaaggagcatttgcggaaaggtgcgtgtccacacacatgtgctggcatgtctgcacctggctggtgtgtgcatatgggtgtccatacccactcatgacgtgacctgtgagtgtccacgtgtatgattgtatctaactgtgtgtgtgaccgtgttcatgtatgtccatcaacatacgctccccctcattcccctgtctaaccccagccccccacctcgtccccatttggcagcactggggatagggggcaggggtgcagcctggtggtattgcccgcctcctcctgccaggtgacaacctcgtcaacaagccagacgagcgcggcttcacccccctcatctgggcctccgcctttggagagattgagaccgttcgcttcctgctggagtggggtgccgacccccacatcctggcaaaagagcgagagagcgccctgtcgctggccagcacaggcggctacacagacattgtggggctgctgctggagcgtgacgtggacatcaacatctatgattggaatggagggacgccactgctgtacgctgtgcgcgggaaccacgtgaaatgcgttgaggccttgctggcccgaggcgctgacctcaccaccgaagccgactctggctacaccccgatggaccttgccgtggccctgggataccggaaagtgcaacaggtgatcgagaaccacatcctcaagctcttccagagcaacctggtgcccgctgaccctgagtgaaggccgcctgccggggactcagacactcagggaacaaaatggtcagccagagctggggaaacccagaactgacttcaaaggcagcttctggacaggtggtgggaggggacccttcccaagaggaaccaataaaccttctgtgcagaa

SEQ ID NO: 368507 - DNA, 1208 bp, Homo sapiens
gaaggccaggcgcaactgccctcccaggacccagcggaacccacgccctcccctaagtcttaaagggccagaggcagcacttactgcccgggcccttcctcacttttggggggcgggggtgcgcaagcgcagtgggggagctctggggtgggggtagcggtcgagtatcaagttgctttctgtcccggcagaggaagccagatcgctgagggtccggtctccagtttgcctcctgctatatccattggaagagaaaagtttgtgacttgggcccccaagttttgagagaactgggctttcggcgcggggggacagaggaggctcgtggggagctttccccatggagcttacccagcctgcagaagacctcatccagacccagcagacccctgcctcagaacttggggaccctgaagaccccggagaggaggctgcagatggctcagacactgtggtcctcagtctctttccctgcacccctgagcctgtgaatcctgaaccggatgccagtgtttcctctccacaggggcagctccctgaagcactccaccactctcaccaaccggcagcgagggaacgaggtgtcagctctgccggccaccctagactccctgtccatccaccagctcgcagcacagggggagctggaccagctgaaggagcatttgcggaaaggtgacaacctcgtcaacaagccagacgagcgcggcttcaccggtgccgacccccacatcctggcaaaagagcgagagagcgccctgtcgctggccagcacaggcggctacacagacattgtggggctgctgctggagcgtgacgtggacatcaacatctatgattggaatggagggacgccactgctgtacgctgtgcgcgggaaccacgtgaaatgcgttgaggccttgctggcccgaggcgctgacctcaccaccgaagccgactctggctacaccccgatggaccttgccgtggccctgggataccggaaagtgcaacaggtgatcgagaaccacatcctcaagctcttccagagcaacctggtgcccgctgaccctgagtgaaggccgcctgccggggactcagacactcagggaacaaaatggtcagccagagctggggaaacccagaactgacttcaaaggcagcttctggacaggtggtgggaggggacccttcccaagaggaaccaataaaccttctgtgcagaa

SEQ ID NO: 368508 - DNA, 1246 bp, Homo sapiens
gaaggccaggcgcaactgccctcccaggacccagcggaacccacgccctcccctaagtcttaaagggccagaggcagcacttactgcccgggcccttcctcacttttggggggcgggggtgcgcaagcgcagtgggggagctctggggtgggggtagcggtcgagtatcaagttgctttctgtcccggcagaggaagccagatcgctgagggtccggtctccagtttgcctcctgctatatccattggaagagaaaagtttgtgacttgggcccccaagttttgagagaactgggctttcggcgcggggggacagaggaggctcgtggggagctttccccatggagcttacccagcctgcagaagacctcatccagacccagcagacccctgcctcagaacttggggaccctgaagaccccggagaggaggctgcagatggctcagacactgtggtcctcagtctctttccctgcacccctgagcctgtgaatcctgaaccggatgccagtgtttcctctccacaggggcagctccctgaagcactccaccactctcaccaaccggcagcgagggaacgaggtgtcagctctgccggccaccctagactgtgacaacctcgtcaacaagccagacgagcgcggcttcacccccctcatctgggcctccgcctttggagagattgagaccgttcgcttcctgctggagtggggtgccgacccccacatcctggcaaaagagcgagagagcgccctgtcgctggccagcacaggcggctacacagacattgtggggctgctgctggagcgtgacgtggacatcaacatctatgattggaatggagggacgccactgctgtacgctgtgcgcgggaaccacgtgaaatgcgttgaggccttgctggagacccttcagccacgttcttcagtggagaccaagatagcagagcccgaggcgctgacctcaccaccgaagccgactctggctacaccccgatggaccttgccgtggccctgggataccggaaagtgcaacaggtgatcgagaaccacatcctcaagctcttccagagcaacctggtgcccgctgaccctgagtgaaggccgcctgccggggactcagacactcagggaacaaaatggtcagccagagctggggaaacccagaactgacttcaaaggcagcttctggacaggtggtgggaggggacccttcccaagaggaaccaataaaccttctgtgcagaa

SEQ ID NO: 368509 - DNA, 1449 bp, Homo sapiens
gaaggccaggcgcaactgccctcccaggacccagcggaacccacgccctcccctaagtcttaaagggccagaggcagcacttactgcccgggcccttcctcacttttggggggcgggggtgcgcaagcgcagtgggggagctctggggtgggggtagcggtcgagtatcaagttgctttctgtcccggcagaggaagccagatcgctgagggtccggtctccagtttgcctcctgctatatccattggaagagaaaagtttgtgacttgggcccccaagttttgagagaactgggctttcggcgcggggggacagaggaggctcgtggggagctttccccatggagcttacccagcctgcagaagacctcatccagacccagcagacccctgcctcagaacttggggaccctgaagaccccggagaggaggctgcagatggctcagacactgtggtcctcagtctctttccctgcacccctgagcctgtgaatcctgaaccggatgccagtgtttcctctccacaggggcagctccctgaagcactccaccactctcaccaaccggcagcgagggaacgaggtgtcagctctgccggccaccctagactgtgagtgggcccacggtccccaacaaggagaggagtaggagggtgggagggcctgtgaggagcaatcgtggacagagggtaaactgaggcacagagaagcaaggggatgagtgaggactctgcctctgtcctgccccagcccctgtccatccaccagctcgcagcacagggggagctggaccagctgaaggagcatttgcggaaaggtgcgtgtccacacacatgtgctggcatgtctgcacctggctggtgtgtgcatatgggtgtccatacccactcatgacgtgacctgtgagtgtccacgtgtatgattgtatctaactgtgtgtgtgaccgtgttcatgtatgtccatcaacatacgctccccctcattcccctgtctaaccccagccccccacctcgtccccatttggcagcactggggatagggggcaggggtgcagcctggtggtattgcccgcctcctcctgccaggtgacaacctcgtcaacaagccagacgagcgcggcttcacccccctcatctgggcctccgcctttggagagattgagaccgttcgcttcctgctggagtgggtgcgtcccagcccagctggcagcgtggggggttcccgggggccttagggtgggctggggttttggctgtgtctgctggcgccttgtctttgagatgcggctgctggctgggtgcagtggctcatgcctgtaatcccagcactttgggaggccgaggcgggtggatcacttgaggtcaggagttcaagaccagcccggccaacatgggtgaaaccctgtctctactaaaaaaatacaaaaattagccaggcgtcgtggtgggtg

SEQ ID NO: 368510 - DNA, 1404 bp, Homo sapiens
gcagagggcccgccctccccgctcctcagtctttgcggacaagaaaggggctgtgtgagacgcagggaaggaggcacacccgggggtggcgcagtgaggagggggcgcgacggccaggaggctggtggagcgacacccaggcaggagagggggaagaactctctccctttctgaacccccttttccttgagagacgagttgggggagtcctccacgcattacccactcgggccgcaaaaactcccttctttagccctctgcccccgcccttgcttataagcctttgagaccgcagaagggaccttgttgtggaacgggacggccaagaggaagccagatcgctgagggtccggtctccagtttgcctcctgctatatccattggaagagaaaagtttgtgacttgggcccccaagttttgagagaactgggctttcggcgcggggggacagaggaggctcgtggggagctttccccatggagcttacccagcctgcagaagacctcatccagacccagcagacccctgcctcagaacttggggaccctgaagaccccggagaggaggctgcagatggctcagacactgtggtcctcagtctctttccctgcacccctgagcctgtgaatcctgaaccggatgccagtgtttcctctccacaggggcagctccctgaagcactccaccactctcaccaaccggcagcgagggaacgaggtgtcagctctgccggccaccctagactccctgtccatccaccagctcgcagcacagggggagctggaccagctgaaggagcatttgcggaaaggtgacaacctcgtcaacaagccagacgagcgcggcttcacccccctcatctgggcctccgcctttggagagattgagaccgttcgcttcctgctggagtggggtgccgacccccacatcctggcaaaagagcgagagagcgccctgtcgctggccagcacaggcggctacacagacattgtggggctgctgctggagcgtgacgtggacatcaacatctatgattggaatggagggacgccactgctgtacgctgtgcgcgggaaccacgtgaaatgcgttgaggccttgctggcccgaggcgctgacctcaccaccgaagccgactctggctacaccccgatggaccttgccgtggccctgggataccggaaagtgcaacaggtgatcgagaaccacatcctcaagctcttccagagcaacctggtgcccgctgaccctgagtgaaggccgcctgccggggactcagacactcagggaacaaaatggtcagccagagctggggaaacccagaactgacttcaaaggcagcttctggacaggtggtgggaggggacccttcccaagaggaaccaataaaccttctgtgcagaa

SEQ ID NO: 368511 - DNA, 776 bp, Homo sapiens
gcagccccggcgactggagaagccaccctgaaactggatctgcagctgggagacacggatgagctggggaaactccagcgtcacccactgggagggccctggaagcagacagggaaactgaggcgcaagctcactgcaggcacagagccctgctatgcctgtctcattcacatagttcttggaatggaggggaagaaggaaattcggcacatgttcctttcctggtcgaaaagatgtttttttccaaactgccgagtgttgcgattcagcactgaactcaccctggaggcaccaggatcaaggcgaagagaggggctgagaccagctctcagctccgcggagggcctgacccccagatctgtccactgagggctcgaccccaggcttagggcctcgccactgcctgtccccacagactcttacctgctcactgtctctggacaaaccaaagagtgggtcatgtcggttccacaagacctcgcagggcttaggattgggcacagccttggttcgaatcccggcgcctcctcaagctacagggcggcgcgatcttggctacgccttggcctgaacgtcctcacctgtaacttgggacgagaaccgccactccctcgcccaccccagtcctaaatgtcgcctcgatcaatcccctgccggaaaatttgggagagaggatcagggaaaccgccaatgcccggaggccaggcctttcacaggaaacagatttcccgcgggtttcgggggcggtggctttttgtgcgaggctgtttctctgc

SEQ ID NO: 368512 - DNA, 1535 bp, Homo sapiens
gcagagggcccgccctccccgctcctcagtctttgcggacaagaaaggggctgtgtgagacgcagggaaggaggcacacccgggggtggcgcagtgaggagggggcgcgacggccaggaggctggtggagcgacacccaggcaggagagggggaagaactctctccctttctgaacccccttttccttgagagacgagttgggggagtcctccacgcattacccactcgggccgcaaaaactcccttctttagccctctgcccccgcccttgcttataagcctttgagaccgcagaagggaccttgttgtggaacgggacggccaaggtacgctgcccctttaagttccagacgccccgcgtacttcccctacttcttcttcttgagatagccccgcccatctacccgaagccggagccaattggctccctctggaaaaatctgtgggcagggtaaagaggaagccagatcgctgagggtccggtctccagtttgcctcctgctatatccattggaagagaaaagtttgtgacttgggcccccaagttttgagagaactgggctttcggcgcggggggacagaggaggctcgtggggagctttccccatggagcttacccagcctgcagaagacctcatccagacccagcagacccctgcctcagaacttggggaccctgaagaccccggagaggaggctgcagatggctcagacactgtggtcctcagtctctttccctgcacccctgagcctgtgaatcctgaaccggatgccagtgtttcctctccacaggggcagctccctgaagcactccaccactctcaccaaccggcagcgagggaacgaggtgtcagctctgccggccaccctagactccctgtccatccaccagctcgcagcacagggggagctggaccagctgaaggagcatttgcggaaaggtgacaacctcgtcaacaagccagacgagcgcggcttcacccccctcatctgggcctccgcctttggagagattgagaccgttcgcttcctgctggagtggggtgccgacccccacatcctggcaaaagagcgagagagcgccctgtcgctggccagcacaggcggctacacagacattgtggggctgctgctggagcgtgacgtggacatcaacatctatgattggaatggagggacgccactgctgtacgctgtgcgcgggaaccacgtgaaatgcgttgaggccttgctggcccgaggcgctgacctcaccaccgaagccgactctggctacaccccgatggaccttgccgtggccctgggataccggaaagtgcaacaggtgatcgagaaccacatcctcaagctcttccagagcaacctggtgcccgctgaccctgagtgaaggccgcctgccggggactcagacactcagggaacaaaatggtcagccagagctggggaaacccagaactgacttcaaaggcagcttctggacaggtggtgggaggggacccttcccaagaggaaccaataaaccttctgtgcagaa

SEQ ID NO: 368513 - DNA, 1202 bp, Homo sapiens
gaaggccaggcgcaactgccctcccaggacccagcggaacccacgccctcccctaagtcttaaagggccagaggcagcacttactgcccgggcccttcctcacttttggggggcgggggtgcgcaagcgcagtgggggagctctggggtgggggtagcggtcgagtatcaagttgctttctgtcccggcagaggaagccagatcgctgagggtccggtctccagtttgcctcctgctatatccattggaagagaaaagtttgtgacttgggcccccaagttttgagagaactgggctttcggcgcggggggacagaggaggctcgtggggagctttccccatggagcttacccagcctgcagaagacctcatccagacccagcagacccctgcctcagaacttggggaccctgaagaccccggagaggaggctgcagatggctcagacactgtggtcctcagtctctttccctgcacccctgagcctgtgaatcctgaaccggatgccagtgtttcctctccacaggggcagctccctgaagcactccaccactctcaccaaccggcagcgagggaacgaggtgtcagctctgccggccaccctagactgtgacaacctcgtcaacaagccagacgagcgcggcttcacccccctcatctgggcctccgcctttggagagattgagaccgttcgcttcctgctggagtggggtgccgacccccacatcctggcaaaagagcgagagagcgccctgtcgctggccagcacaggcggctacacagacattgtggggctgctgctggagcgtgacgtggacatcaacatctatgattggaatggagggacgccactgctgtacgctgtgcgcgggaaccacgtgaaatgcgttgaggccttgctggcccgaggcgctgacctcaccaccgaagccgactctggctacaccccgatggaccttgccgtggccctgggataccggaaagtgcaacaggtgatcgagaaccacatcctcaagctcttccagagcaacctggtgcccgctgaccctgagtgaaggccgcctgccggggactcagacactcagggaacaaaatggtcagccagagctggggaaacccagaactgacttcaaaggcagcttctggacaggtggtgggaggggacccttcccaagaggaaccaataaaccttctgtgcagaa

SEQ ID NO: 368514 - DNA, 1053 bp, Homo sapiens
acctcaaacagaccgtttccccgcgcacacacacgtctctcgtcgcaacctttgggcccccaagttttgagagaactgggctttcggcgcggggggacagaggaggctcgtggggagctttccccatggagcttacccagcctgcagaagacctcatccagacccagcagacccctgcctcagaacttggggaccctgaagaccccggagaggaggctgcagatggctcagacactgtggtcctcagtctctttccctgcacccctgagcctgtgaatcctgaaccggatgccagtgtttcctctccacaggggcagctccctgaagcactccaccactctcaccaaccggcagcgagggaacgaggtgtcagctctgccggccaccctagactccctgtccatccaccagctcgcagcacagggggagctggaccagctgaaggagcatttgcggaaaggtgacaacctcgtcaacaagccagacgagcgcggcttcacccccctcatctgggcctccgcctttggagagattgagaccgttcgcttcctgctggagtggggtgccgacccccacatcctggcaaaagagcgagagagcgccctgtcgctggccagcacaggcggctacacagacattgtggggctgctgctggagcgtgacgtggacatcaacatctatgattggaatggagggacgccactgctgtacgctgtgcgcgggaaccacgtgaaatgcgttgaggccttgctggcccgaggcgctgacctcaccaccgaagccgactctggctacaccccgatggaccttgccgtggccctgggataccggaaagtgcaacaggtgatcgagaaccacatcctcaagctcttccagagcaacctggtgcccgctgaccctgagtgaaggccgcctgccggggactcagacactcagggaacaaaatggtcagccagagctggggaaacccagaactgacttcaaaggcagcttctggacaggtggtgggaggggacccttcccaagaggaaccaataaaccttctgtgcagaa

SEQ ID NO: 368515 - DNA, 1408 bp, Homo sapiens
gaaggccaggcgcaactgccctcccaggacccagcggaacccacgccctcccctaagtcttaaagggccagaggcagcacttactgcccgggcccttcctcacttttggggggcgggggtgcgcaagcgcagtgggggagctctggggtgggggtagcggtcgagtatcaagttgctttctgtcccggcagaggaagccagatcgctgagggtccggtctccagtttgcctcctgctatatccattggaagagaaaagtttgtgacttgggcccccaagttttgagagaactgggctttcggcgcggggggacagaggaggctcgtggggagctttccccatggagcttacccagcctgcagaagacctcatccagacccagcagacccctgcctcagaacttggggaccctgaagaccccggagaggaggctgcagatggctcagacactgtggtcctcagtctctttccctgcacccctgagcctgtgaatcctgaaccggatgccagtgtttcctctccacaggggcagctccctgaagcactccaccactctcaccaaccggcagcgagggaacgaggtgtcagctctgccggccaccctagactgtgagtgggcccacggtccccaacaaggagaggagtaggagggtgggagggcctgtgaggagcaatcgtggacagagggtaaactgaggcacagagaagcaaggggatgagtgaggactctgcctctgtcctgccccagcccctgtccatccaccagctcgcagcacagggggagctggaccagctgaaggagcatttgcggaaaggtgacaacctcgtcaacaagccagacgagcgcggcttcacccccctcatctgggcctccgcctttggagagattgagaccgttcgcttcctgctggagtggggtgccgacccccacatcctggcaaaagagcgagagagcgccctgtcgctggccagcacaggcggctacacagacattgtggggctgctgctggagcgtgacgtggacatcaacatctatgattggaatggagggacgccactgctgtacgctgtgcgcgggaaccacgtgaaatgcgttgaggccttgctggcccgaggcgctgacctcaccaccgaagccgactctggctacaccccgatggaccttgccgtggccctgggataccggaaagtgcaacaggtgatcgagaaccacatcctcaagctcttccagagcaacctggtgcccgctgaccctgagtgaaggccgcctgccggggactcagacactcagggaacaaaatggtcagccagagctggggaaacccagaactgacttcaaaggcagcttctggacaggtggtgggaggggacccttcccaagaggaaccaataaaccttctgtgcagaa

SEQ ID NO: 368516 - DNA, 1617 bp, Homo sapiens
gaaggccaggcgcaactgccctcccaggacccagcggaacccacgccctcccctaagtcttaaagggccagaggcagcacttactgcccgggcccttcctcacttttggggggcgggggtgcgcaagcgcagtgggggagctctggggtgggggtagcggtcgagtatcaagttgctttctgtcccggcagaggaagccagatcgctgagggtccggtctccagtttgcctcctgctatatccattggaagagaaaagtttgtgacttgggcccccaagttttgagagaactgggctttcggcgcggggggacagaggaggctcgtggggagctttccccatggagcttacccagcctgcagaagacctcatccagacccagcagacccctgcctcagaacttggggaccctgaagaccccggagaggaggctgcagatggctcagacactgtggtcctcagtctctttccctgcacccctgagcctgtgaatcctgaaccggatgccagtgtttcctctccacaggggcagctccctgaagcactccaccactctcaccaaccggcagcgagggaacgaggtgtcagctctgccggccaccctagactgtgagtgggcccacggtccccaacaaggagaggagtaggagggtgggagggcctgtgaggagcaatcgtggacagagggtaaactgaggcacagagaagcaaggggatgagtgaggactctgcctctgtcctgccccagcccctgtccatccaccagctcgcagcacagggggagctggaccagctgaaggagcatttgcggaaaggtgcgtgtccacacacatgtgctggcatgtctgcacctggctggtgtgtgcatatgggtgtccatacccactcatgacgtgacctgtgagtgtccacgtgtatgattgtatctaactgtgtgtgtgaccgtgttcatgtatgtccatcaacatacgctccccctcattcccctgtctaaccccagccccccacctcgtccccatttggcagcactggggatagggggcaggggtgcagcctggtggtattgcccgcctcctcctgccaggtgacaacctcgtcaacaagccagacgagcgcggcttcaccggtgccgacccccacatcctggcaaaagagcgagagagcgccctgtcgctggccagcacaggcggctacacagacattgtggggctgctgctggagcgtgacgtggacatcaacatctatgattggaatggagggacgccactgctgtacgctgtgcgcgggaaccacgtgaaatgcgttgaggccttgctggcccgaggcgctgacctcaccaccgaagccgactctggctacaccccgatggaccttgccgtggccctgggataccggaaagtgcaacaggtgatcgagaaccacatcctcaagctcttccagagcaacctggtgcccgctgaccctgagtgaaggccgcctgccggggactcagacactcagggaacaaaatggtcagccagagctggggaaacccagaactgacttcaaaggcagcttctggacaggtggtgggaggggacccttcccaagaggaaccaataaaccttctgtgcagaa

SEQ ID NO: 368517 - DNA, 1040 bp, Homo sapiens
gaaggccaggcgcaactgccctcccaggacccagcggaacccacgccctcccctaagtcttaaagggccagaggcagcacttactgcccgggcccttcctcacttttggggggcgggggtgcgcaagcgcagtgggggagctctggggtgggggtagcggtcgagtatcaagttgctttctgtcccggcagaggaagccagatcgctgagggtccggtctccagtttgcctcctgctatatccattggaagagaaaagtttgtgacttgggcccccaagttttgagagaactgggctttcggcgcggggggacagaggaggctcgtggggagctttccccatggagcttacccagcctgcagaagacctcatccagacccagcagacccctgcctcagaacttggggaccctgaagaccccggagaggaggctgcagatggctcagacactgtggtcctcagtctctttccctgcacccctgagcctgtgaatcctgaaccggatgccagtgtttcctctccacaggggcagctccctgaagcactccaccactctcaccaaccggcagcgagggaacgaggtgtcagctctgccggccaccctagactccctgtccatccaccagctcgcagcacagggggagctggaccagctgaaggagcatttgcggaaaggtgacaacctcgtcaacaagccagacgagcgcggcttcacccccctcatctgggcctccgcctttggagagattgagaccgttcgcttcctgctggagtgggtgcgtcccagcccagctggcagcgtggggggttcccgggggccttagggtgggctggggttttggctgtgtctgctggcgccttgtctttgagatgcggctgctggctgggtgcagtggctcatgcctgtaatcccagcactttgggaggccgaggcgggtggatcacttgaggtcaggagttcaagaccagcccggccaacatgggtgaaaccctgtctctactaaaaaaatacaaaaattagccaggcgtcgtggtgggtg

SEQ ID NO: 368518 - DNA, 1124 bp, Homo sapiens
  misc_feature (902)..(902): n is a, c, g, or t
gaaggccaggcgcaactgccctcccaggacccagcggaacccacgccctcccctaagtcttaaagggccagaggcagcacttactgcccgggcccttcctcacttttggggggcgggggtgcgcaagcgcagtgggggagctctggggtgggggtagcggtcgagtatcaagttgctttctgtcccggcagaggaagccagatcgctgagggtccggtctccagtttgcctcctgctatatccattggaagagaaaagtttgtgacttgggcccccaagttttgagagaactgggctttcggcgcggggggacagaggaggctcgtggggagctttccccatggagcttacccagcctgcagaagacctcatccagacccagcagacccctgcctcagaacttggggaccctgaagaccccggagaggaggctgcagatggctcagacactgtggtcctcagtctctttccctgcacccctgagcctgtgaatcctgaaccggatgccagtgtttcctctccacaggggcagctccctgaagcactccaccactctcaccaaccggcagcgagggaacgaggtgtcagctctgccggccaccctagactgtgacaacctcgtcaacaagccagacgagcgcggcttcacccccctcatctgggcctccgcctttggagagattgagaccgttcgcttcctgctggagtggggtgccgacccccacatcctggcaaaagagcgagagagcgccctgtcgctggccagcacaggcggctacacagacattgtggggctgctgctggagcgtgacgtggacatcaacatctatgattggatggaggggacgcactgctgtacgctgtgcgcggaaccacgtgaatgggtgggctggtggccgagngctgactcacacgagcgatctggtaaccgatgactgccggcccggatacgaaggaccggatcagacacatccagtctcaagactggcgtgactggagagccgcggaccacaccgcaagtccaggaccaaggtcaggtggggggggggcccagaaactggaaaaaccgtctgggagggagagcttccctcagacggcgtacaacaaaacaaagagaggaccac

SEQ ID NO: 368519 - DNA, 564 bp, Homo sapiens
aaaaaaactaaaaaactcttaaaaaacctgaggactcctggatgaatactgttatgtgcctgtttctcaattacccctggcctgagtgaggaacttttggaactctttggctcccagactgtggtgggcactaccggtcagctgcccagcagccagccctagtcccacttctgcctcatttgttacaggttggaagtgccaggttcagggatgggcctgtgacccaagttttagctgaaaggaaacctactagggacttctaggagagattttcttgcttgtaaagggaaggctacacaaggagaaaagccctttctaaccacatccccttatttcatgcttgggatgctgaccatgtgaagacttggttgttggagctgtggtggcctccctgccatgatgaggggagaaggcactgccacactgagcgtggcagtgggtacaggaagagtccagtctccgggatgccttggttaattgacaggacaaaccctggaactgccaacttccatcttgttctgtaataataaatctctaatatttgtaccactttcagtcgagtat

SEQ ID NO: 368520 - DNA, 802 bp, Homo sapiens
tatgtatgagtgcgtgactgggatttcaatatcagtcgagaggcgggcgtctgtatcatgacctggaaggccgcggctgatagaatggatggaaccttcaatcttcctagtgacggctctgctgtggatgttcacatcaacatggaacaggccccgattcagagtgagccccgggtacggctggtgatggctcagcacatgatcagggatatacagaccttactatcccggatggagtgtcgaggagggccccaaccgcagcacagtcagccgcccccgcagccaccggctgtgaccccggagccagtagccttgagctctcaaacatcagaaccagttgaaagtgaagcacctccccgggagcccatggaggcagaagaagtggaggagcgtgccccagcccagaacccggagctcactcctggcccagccccagcgggcccaacacctgccccggaaacaaatgcacccaaccatccttcccctgcggagtatgtcgaggtgctccaggagctacagcggctggagagtcgcctccagcccttcttgcagcgctactacgaggttctgggtgctgctgccaccacggactacaataacaatcacgagggccgggaggaggatcagcggttgatcaacttggtaggggagagcctgcgactgctgggcaacacctttgttgcactgtctgacctgcgctgcaatctggcctgcacgcccccacgacacctgcatgtggtccggcctatgttataacacccatggtgtcagcggacatccctaagatcctgggacccgtgct

SEQ ID NO: 368521 - DNA, 700 bp, Homo sapiens
  misc_feature (467)..(467): n is a, c, g, or t
ggaggtggacctcgggacatggcctcttctgctcccgggagcccccctcaggagcaggagggggctcccgggatgaacaggatggagcttcagctgagacagaaccttgggcagctgcagtccccccagaatgggtccctattatccagcaggacattcagagccagcggaaggtgaaaccgcagccccctctgagtgatgcctacctcagtggtatgcctgccaagagacgcaagctccggtctgatatacaaaaacgactgcaggaagaccccaactacagtccccagcgcttccccaatgcccagcgggcctttgctgatgatccttagctctttgctctatggcccttcctcatcaggggaccgtttcccccctcttccttcacagtatttaagaaataaaagtcggatttttctggctgcttctctctagcagcagcgaaaaaaaaaaaaaaaaaaaaaaanaaaaaaaaaaaaaaagaaaaaagaaaacaaaaaaaaaaaaaaaaaaaaaaaaaaaaaagtactgatggtggtgaataaagaccaaagggtcctctctacctttgaaaactctcctggggtggaggagaccagggcaggatagacagacctctgcagtaagagagtggttgggaaacccagggtgttcccttggatctcagatctgagccatcgagggaagagtgggctgctaa

SEQ ID NO: 368522 - DNA, 519 bp, Homo sapiens
  misc_feature (21)..(21): n is a, c, g, or t
ttgagggtggaaatccccccncaattccggggacatggaattaggggcagaagagtttcctgacttaagcgggagaatgcttccccagcccctggaacaacagcagaagaggccatgtcccgaggtccacctcctgctcctgaggggggctcccgggatgaacaggatggagcttcagctgagacagaaccttgggcagctgcagtccccccagaatgggtccctattatccagcaggacattcagagccagcggaaggtgaaaccgcagccccctctgagtgatgcctacctcagtggtatgcctgccaagagacgcaagctccggtctgatatacaaaaacgactgcaggaagaccccaactacagtccccagcgcttccccaatgcccagcgggcctttgctgatgatccttagctctttgctctatggcccttcctcatcaggggaccgtttcccccctcttccttcacagtatttaagaaataaaagtcggatttttctggctgcttctctcta

SEQ ID NO: 368523 - DNA, 3297 bp, Homo sapiens
acaagagcctcccggaccttcaaaggagggtgcagggcccccggagagtaagcagtgagccccgggtacggctggtgatggctcagcacatgatcagggatatacagaccttactatcccggatggagactctcccctaccttcagtgtcgaggagggccccaaccgcagcacagtcagccgcccccgcagccaccggctgtgaccccggagccagtagccttgagctctcaaacatcagaaccagttgaaagtgaagcacctccccgggagcccatggaggcagaagaagtggaggagcgtgccccagcccagaacccggagctcactcctggcccagccccagcgggcccaacacctgccccggaaacaaatgcacccaaccatccttcccctgcggagtatgtcgaggtgctccaggagctacagcggctggagagtcgcctccagcccttcttgcagcgctactacgaggttctgggtgctgctgccaccacggactacaataacaatcacgagggccgggaggaggatcagcggttgatcaacttggtaggggagagcctgcgactgctgggcaacacctttgttgcactgtctgacctgcgctgcaatctggcctgcacgcccccacgacacctgcatgtggtccggcctatgtctcactacaccacccccatggtgctccagcaggcagccattcccatacagatcaatgtgggaaccactgtgaccatgacaggaaatgggactcggccccccccaactcccaatgcagaggcacctccccctggtcctgggcaggcctcatccgtggctccgtcttctaccaatgtcgagtcctcagctgagggggctcccccgccaggtccagctcccccgccagccaccagccacccgagggtcatccggatttcccaccagagtgtggaacccgtggtcatgatgcacatgaacattcaagattctggcacacagcctggtggtgttccgagtgctcccactggccccctgggaccccctggtcatggccaaaccctgggctccaccctcatccagctgccctccctgccccctgagttcatgcacgccgtcgcccaccagatcactcatcaggccatggtggcagctgttgcctccgcggccgcaggtaatgacctggaaggggaggcttgggaggtagggcacagtccatggtggcagctggctggcaagggcctggccctcagccctcttcggtctgtctcttctgccacccacaggacagcaggtgccaggcttcccaacagctccaacccgggtggtgattgcccggcccactcctccacaggctcggccttcccatcctggagggcccccagtctctgggacactgcagggcgccggtctgggtaccaatgcctcgttggcccagatggtgagcggccttgtggggcagcttcttatgcagccagtccttgtggctcaggggaccccaggtatggctccaccgccagcccctgccactgcttctgccagtgctggcaccaccaacacagctaccacagctggccccgctcctggggggcctgcccagcctccacccacccctcaaccctccatggctgatcttcagttctctcagcttctggggaacctgctagggcctgcagggccaggggctggagggtctggtgtggcttctcccaccatcactgtggcgatgcctggtgtccctgcctttctccaaggcatgactgacttcttgcaggcaacacagacagcccctccaccacccccacctcctccacccccaccacctgccccagagcagcagaccatgcccccaccaggctccccttctggtggcgcagggagtcctggaggcctgggtcttgagagcctgtcaccggagttttttacctcagtggtgcagggtgtgctcagctccctgctgggctccctgggggctcgggctggcagcagtgaaagtattgctgccttcatacaacgcctcagtggatccagcaacatctttgagcctggagctgatggggcccttggattctttggggccttgctttctcttctgtgccagaacttctctatggtggacgtagtgatgcttctccatgggcatttccagccactacaacggctccagccccagctgcgatccttcttccaccagcactacctgggtggtcaggagcccacacccagtaacatccggatggcaacccacacattgatcacggggctagaagagtatgtgcgggagagtttttccttggtgcaggttcagccaggtgtggacatcatccggacaaacctggaatttctccaagagcagtttaatagcattgctgcgcatgtgctgcattgcacagatagtggatttggggcccggttgctggagttgtgtaaccaaggcctgtttgaatgcctggccctaaacctgcactgcttggggggacagcagatggagcttgctgctgttatcaatggccgaattcgtcgtatgtctcgtggggtgaatccctccttggtgagctggctgaccactatgatgggactgaggcttcaggtggtactggagcacatgcctgtaggccctgatgccattctcagatacgttcgcagggttggtgatcccccccagccacttcctgaggagccaatggaagttcagggagcagaaagagcttcccctgagcctcagcgggagaatgcttccccagcccctggaacaacagcagaagaggccatgtcccgaggtccacctcctgctcctgaggggggctcccgggatgaacaggatggagcttcagctgagacagaaccttgggcagctgcagtccccccagaatgggtccctattatccagcaggacattcagagccagcggaaggtgaaaccgcagccccctctgagtgatgcctacctcagtggtatgcctgccaagagacgcaagacgatgcagggtgagggcccccagctgcttctctcagaggctgtgagccgggcagctaaggcagccggagctcggcccctgacgagccccgagagcctgagccgggacctggaggcaccagaggttcaggagagctacaggcagcagctccggtctgatatacaaaaacgactgcaggaagaccccaactacagtccccagcgcttccccaatgcccagcgggcctttgctgatgatccttagctctttgctctatggcccttcctcatcaggggaccgtttcccccctcttccttcacagtatttaagaaataaaagtcggatttttctggctgcttctctcta

SEQ ID NO: 368524 - DNA, 3409 bp, Homo sapiens
acaagagcctcccggaccttcaaaggagggtgcagggcccccggagagtaagcagtgagccccgggtacggctggtgatggctcagcacatgatcagggatatacagaccttactatcccggatggagactctcccctaccttcagtgtcgaggagggccccaaccgcagcacagtcagccgcccccgcagccaccggctgtgaccccggagccagtagccttgagctctcaaacatcagaaccagttgaaagtgaagcacctccccgggagcccatggaggcagaagaagtggaggagcgtgccccagcccagaacccggagctcactcctggcccagccccagcgggcccaacacctgccccggaaacaaatgcacccaaccatccttcccctgcggagtatgtcgaggtgctccaggagctacagcggctggagagtcgcctccagcccttcttgcagcgctactacgaggttctgggtgctgctgccaccacggactacaataacaatcacgagggccgggaggaggatcagcggttgatcaacttggtaggggagagcctgcgactgctgggcaacacctttgttgcactgtctgacctgcgctgcaatctggcctgcacgcccccacgacacctgcatgtggtccggcctatgtctcactacaccacccccatggtgctccagcaggcagccattcccatacagatcaatgtgggaaccactgtgaccatgacaggaaatgggactcggccccccccaactcccaatgcagaggcacctccccctggtcctgggcaggcctcatccgtggctccgtcttctaccaatgtcgagtcctcagctgagggggctcccccgccaggtccagctcccccgccagccaccagccacccgagggtcatccggatttcccaccagagtgtggaacccgtggtcatgatgcacatgaacattcaagattctggcacacagcctggtggtgttccgagtgctcccactggccccctgggaccccctggtcatggccaaaccctgggggtaagagtgagggcatcagggcaggctgagctctgggtagagaaagggaagggctgagtgggtgggttgaaggggtccaggttcaaggttacatcagacccgccccccaggctccaccctcatccagctgccctccctgccccctgagttcatgcacgccgtcgcccaccagatcactcatcaggccatggtggcagctgttgcctccgcggccgcaggtaatgacctggaaggggaggcttgggaggtagggcacagtccatggtggcagctggctggcaagggcctggccctcagccctcttcggtctgtctcttctgccacccacaggacagcaggtgccaggcttcccaacagctccaacccgggtggtgattgcccggcccactcctccacaggctcggccttcccatcctggagggcccccagtctctgggacactgcagggcgccggtctgggtaccaatgcctcgttggcccagatggtgagcggccttgtggggcagcttcttatgcagccagtccttgtggctcaggggaccccaggtatggctccaccgccagcccctgccactgcttctgccagtgctggcaccaccaacacagctaccacagctggccccgctcctggggggcctgcccagcctccacccacccctcaaccctccatggctgatcttcagttctctcagcttctggggaacctgctagggcctgcagggccaggggctggagggtctggtgtggcttctcccaccatcactgtggcgatgcctggtgtccctgcctttctccaaggcatgactgacttcttgcaggcaacacagacagcccctccaccacccccacctcctccacccccaccacctgccccagagcagcagaccatgcccccaccaggctccccttctggtggcgcagggagtcctggaggcctgggtcttgagagcctgtcaccggagttttttacctcagtggtgcagggtgtgctcagctccctgctgggctccctgggggctcgggctggcagcagtgaaagtattgctgccttcatacaacgcctcagtggatccagcaacatctttgagcctggagctgatggggcccttggattctttggggccttgctttctcttctgtgccagaacttctctatggtggacgtagtgatgcttctccatgggcatttccagccactacaacggctccagccccagctgcgatccttcttccaccagcactacctgggtggtcaggagcccacacccagtaacatccggatggcaacccacacattgatcacggggctagaagagtatgtgcgggagagtttttccttggtgcaggttcagccaggtgtggacatcatccggacaaacctggaatttctccaagagcagtttaatagcattgctgcgcatgtgctgcattgcacagatagtggatttggggcccggttgctggagttgtgtaaccaaggcctgtttgaatgcctggccctaaacctgcactgcttggggggacagcagatggagcttgctgctgttatcaatggccgaattcgtcgtatgtctcgtggggtgaatccctccttggtgagctggctgaccactatgatgggactgaggcttcaggtggtactggagcacatgcctgtaggccctgatgccattctcagatacgttcgcagggttggtgatcccccccagccacttcctgaggagccaatggaagttcagggagcagaaagagcttcccctgagcctcagcgggagaatgcttccccagcccctggaacaacagcagaagaggccatgtcccgaggtccacctcctgctcctgaggggggctcccgggatgaacaggatggagcttcagctgagacagaaccttgggcagctgcagtccccccagaatgggtccctattatccagcaggacattcagagccagcggaaggtgaaaccgcagccccctctgagtgatgcctacctcagtggtatgcctgccaagagacgcaagacgatgcagggtgagggcccccagctgcttctctcagaggctgtgagccgggcagctaaggcagccggagctcggcccctgacgagccccgagagcctgagccgggacctggaggcaccagaggttcaggagagctacaggcagcagctccggtctgatatacaaaaacgactgcaggaagaccccaactacagtccccagcgcttccccaatgcccagcgggcctttgctgatgatccttagctctttgctctatggcccttcctcatcaggggaccgtttcccccctcttccttcacagtatttaagaaataaaagtcggatttttctggctgcttctctcta

SEQ ID NO: 368525 - DNA, 3222 bp, Homo sapiens
acaagagcctcccggaccttcaaaggagggtgcagggcccccggagagtaagcagtgagccccgggtacggctggtgatggctcagcacatgatcagggatatacagaccttactatcccggatggagactctcccctaccttcagtgtcgaggagggccccaaccgcagcacagtcagccgcccccgcagccaccggctgtgaccccggagccagtagccttgagctctcaaacatcagaaccagttgaaagtgaagcacctccccgggagcccatggaggcagaagaagtggaggagcgtgccccagcccagaacccggagctcactcctggcccagccccagcgggcccaacacctgccccggaaacaaatgcacccaaccatccttcccctgcggagtatgtcgaggtgctccaggagctacagcggctggagagtcgcctccagcccttcttgcagcgctactacgaggttctgggtgctgctgccaccacggactacaataacaatcacgagggccgggaggaggatcagcggttgatcaacttggtaggggagagcctgcgactgctgggcaacacctttgttgcactgtctgacctgcgctgcaatctggcctgcacgcccccacgacacctgcatgtggtccggcctatgtctcactacaccacccccatggtgctccagcaggcagccattcccatacagatcaatgtgggaaccactgtgaccatgacaggaaatgggactcggccccccccaactcccaatgcagaggcacctccccctggtcctgggcaggcctcatccgtggctccgtcttctaccaatgtcgagtcctcagctgagggggctcccccgccaggtccagctcccccgccagccaccagccacccgagggtcatccggatttcccaccagagtgtggaacccgtggtcatgatgcacatgaacattcaagattctggcacacagcctggtggtgttccgagtgctcccactggccccctgggaccccctggtcatggccaaaccctgggctccaccctcatccagctgccctccctgccccctgagttcatgcacgccgtcgcccaccagatcactcatcaggccatggtggcactggctggcaagggcctggccctcagccctcttcggtctgtctcttctgccacccacaggacagcaggtgccaggcttcccaacagctccaacccgggtggtgattgcccggcccactcctccacaggctcggccttcccatcctggagggcccccagtctctgggacactgcagggcgccggtctgggtaccaatgcctcgttggcccagatggtgagcggccttgtggggcagcttcttatgcagccagtccttgtggctcaggggaccccaggtatggctccaccgccagcccctgccactgcttctgccagtgctggcaccaccaacacagctaccacagctggccccgctcctggggggcctgcccagcctccacccacccctcaaccctccatggctgatcttcagttctctcagcttctggggaacctgctagggcctgcagggccaggggctggagggtctggtgtggcttctcccaccatcactgtggcgatgcctggtgtccctgcctttctccaaggcatgactgacttcttgcaggcaacacagacagcccctccaccacccccacctcctccacccccaccacctgccccagagcagcagaccatgcccccaccaggctccccttctggtggcgcagggagtcctggaggcctgggtcttgagagcctgtcaccggagttttttacctcagtggtgcagggtgtgctcagctccctgctgggctccctgggggctcgggctggcagcagtgaaagtattgctgccttcatacaacgcctcagtggatccagcaacatctttgagcctggagctgatggggcccttggattctttggggccttgctttctcttctgtgccagaacttctctatggtggacgtagtgatgcttctccatgggcatttccagccactacaacggctccagccccagctgcgatccttcttccaccagcactacctgggtggtcaggagcccacacccagtaacatccggatggcaacccacacattgatcacggggctagaagagtatgtgcgggagagtttttccttggtgcaggttcagccaggtgtggacatcatccggacaaacctggaatttctccaagagcagtttaatagcattgctgcgcatgtgctgcattgcacagatagtggatttggggcccggttgctggagttgtgtaaccaaggcctgtttgaatgcctggccctaaacctgcactgcttggggggacagcagatggagcttgctgctgttatcaatggccgaattcgtcgtatgtctcgtggggtgaatccctccttggtgagctggctgaccactatgatgggactgaggcttcaggtggtactggagcacatgcctgtaggccctgatgccattctcagatacgttcgcagggttggtgatcccccccagccacttcctgaggagccaatggaagttcagggagcagaaagagcttcccctgagcctcagcgggagaatgcttccccagcccctggaacaacagcagaagaggccatgtcccgaggtccacctcctgctcctgaggggggctcccgggatgaacaggatggagcttcagctgagacagaaccttgggcagctgcagtccccccagaatgggtccctattatccagcaggacattcagagccagcggaaggtgaaaccgcagccccctctgagtgatgcctacctcagtggtatgcctgccaagagacgcaagacgatgcagggtgagggcccccagctgcttctctcagaggctgtgagccgggcagctaaggcagccggagctcggcccctgacgagccccgagagcctgagccgggacctggaggcaccagaggttcaggagagctacaggcagcagctccggtctgatatacaaaaacgactgcaggaagaccccaactacagtccccagcgcttccccaatgcccagcgggcctttgctgatgatccttagctctttgctctatggcccttcctcatcaggggaccgtttcccccctcttccttcacagtatttaagaaataaaagtcggatttttctggctgcttctctcta

SEQ ID NO: 368526 - DNA, 3361 bp, Homo sapiens
acaagagcctcccggaccttcaaaggagggtgcagggcccccggagagtaagcagtgagccccgggtacggctggtgatggctcagcacatgatcagggatatacagaccttactatcccggatggagactctcccctaccttcagtgtcgaggagggccccaaccgcagcacagtcagccgcccccgcagccaccggctgtgaccccggagccagtagccttgagctctcaaacatcagaaccagttgaaagtgaagcacctccccgggagcccatggaggcagaagaagtggaggagcgtgccccagcccagaacccggagctcactcctggcccagccccagcgggcccaacacctgccccggaaacaaatgcacccaaccatccttcccctgcggagtatgtcgaggtgctccaggagctacagcggctggagagtcgcctccagcccttcttgcagcgctactacgaggttctgggtgctgctgccaccacggactacaataacaatcacgagggccgggaggaggatcagcggttgatcaacttggtaggggagagcctgcgactgctgggcaacacctttgttgcactgtctgacctgcgctgcaatctggcctgcacgcccccacgacacctgcatgtggtccggcctatgtctcactacaccacccccatggtgctccagcaggcagccattcccatacagatcaatgtgggaaccactgtgaccatgacaggaaatgggactcggccccccccaactcccaatgcagaggcacctccccctggtcctgggcaggcctcatccgtggctccgtcttctaccaatgtcgagtcctcagctgagggggctcccccgccaggtccagctcccccgccagccaccagccacccgagggtcatccggatttcccaccagagtgtggaacccgtggtcatgatgcacatgaacattcaagggccactgtctctgtctccctgcccagattctggcacacagcctggtggtgttccgagtgctcccactggccccctgggaccccctggtcatggccaaaccctgggggtaagagtgagggcatcagggcaggctgagctctgggtagagaaagggaagggctgagtgggtgggttgaaggggtccaggttcaaggttacatcagacccgccccccaggctccaccctcatccagctgccctccctgccccctgagttcatgcacgccgtcgcccaccagatcactcatcaggccatggtggcactggctggcaagggcctggccctcagccctcttcggtctgtctcttctgccacccacaggacagcaggtgccaggcttcccaacagctccaacccgggtggtgattgcccggcccactcctccacaggctcggccttcccatcctggagggcccccagtctctgggacactgcagggcgccggtctgggtaccaatgcctcgttggcccagatggtgagcggccttgtggggcagcttcttatgcagccagtccttgtggctcaggggaccccaggtatggctccaccgccagcccctgccactgcttctgccagtgctggcaccaccaacacagctaccacagctggccccgctcctggggggcctgcccagcctccacccacccctcaaccctccatggctgatcttcagttctctcagcttctggggaacctgctagggcctgcagggccaggggctggagggtctggtgtggcttctcccaccatcactgtggcgatgcctggtgtccctgcctttctccaaggcatgactgacttcttgcaggcaacacagacagcccctccaccacccccacctcctccacccccaccacctgccccagagcagcagaccatgcccccaccaggctccccttctggtggcgcagggagtcctggaggcctgggtcttgagagcctgtcaccggagttttttacctcagtggtgcagggtgtgctcagctccctgctgggctccctgggggctcgggctggcagcagtgaaagtattgctgccttcatacaacgcctcagtggatccagcaacatctttgagcctggagctgatggggcccttggattctttggggccttgctttctcttctgtgccagaacttctctatggtggacgtagtgatgcttctccatgggcatttccagccactacaacggctccagccccagctgcgatccttcttccaccagcactacctgggtggtcaggagcccacacccagtaacatccggatggcaacccacacattgatcacggggctagaagagtatgtgcgggagagtttttccttggtgcaggttcagccaggtgtggacatcatccggacaaacctggaatttctccaagagcagtttaatagcattgctgcgcatgtgctgcattgcacagatagtggatttggggcccggttgctggagttgtgtaaccaaggcctgtttgaatgcctggccctaaacctgcactgcttggggggacagcagatggagcttgctgctgttatcaatggccgaattcgtcgtatgtctcgtggggtgaatccctccttggtgagctggctgaccactatgatgggactgaggcttcaggtggtactggagcacatgcctgtaggccctgatgccattctcagatacgttcgcagggttggtgatcccccccagccacttcctgaggagccaatggaagttcagggagcagaaagagcttcccctgagcctcagcgggagaatgcttccccagcccctggaacaacagcagaagaggccatgtcccgaggtccacctcctgctcctgaggggggctcccgggatgaacaggatggagcttcagctgagacagaaccttgggcagctgcagtccccccagaatgggtccctattatccagcaggacattcagagccagcggaaggtgaaaccgcagccccctctgagtgatgcctacctcagtggtatgcctgccaagagacgcaagacgatgcagggtgagggcccccagctgcttctctcagaggctgtgagccgggcagctaaggcagccggagctcggcccctgacgagccccgagagcctgagccgggacctggaggcaccagaggttcaggagagctacaggcagcagctccggtctgatatacaaaaacgactgcaggaagaccccaactacagtccccagcgcttccccaatgcccagcgggcctttgctgatgatccttagctctttgctctatggcccttcctcatcaggggaccgtttcccccctcttccttcacagtatttaagaaataaaagtcggatttttctggctgcttctctcta

SEQ ID NO: 368527 - DNA, 3235 bp, Homo sapiens
  misc_feature (3210)..(3210): n is a, c, g, or t
  misc_feature (3214)..(3214): n is a, c, g, or t
  misc_feature (3217)..(3217): n is a, c, g, or t
acaagagcctcccggaccttcaaaggagggtgcagggcccccggagagtaagcagtgagccccgggtacggctggtgatggctcagcacatgatcagggatatacagaccttactatcccggatggagactctcccctaccttcagtgtcgaggagggccccaaccgcagcacagtcagccgcccccgcagccaccggctgtgaccccggagccagtagccttgagctctcaaacatcagaaccagttgaaagtgaagcacctccccgggagcccatggaggcagaagaagtggaggagcgtgccccagcccagaacccggagctcactcctggcccagccccagcgggcccaacacctgccccggaaacaaatgcacccaaccatccttcccctgcggagtatgtcgaggtgctccaggagctacagcggctggagagtcgcctccagcccttcttgcagcgctactacgaggttctgggtgctgctgccaccacggactacaataacaatcacgagggccgggaggaggatcagcggttgatcaacttggtaggggagagcctgcgactgctgggcaacacctttgttgcactgtctgacctgcgctgcaatctggcctgcacgcccccacgacacctgcatgtggtccggcctatgtctcactacaccacccccatggtgctccagcaggcagccattcccatacagatcaatgtgggaaccactgtgaccatgacaggaaatgggactcggccccccccaactcccaatgcagaggcacctccccctggtcctgggcaggcctcatccgtggctccgtcttctaccaatgtcgagtcctcagctgagggggctcccccgccaggtccagctcccccgccagccaccagccacccgagggtcatccggatttcccaccagagtgtggaacccgtggtcatgatgcacatgaacattcaagattctggcacacagcctggtggtgttccgagtgctcccactggccccctgggaccccctggtcatggccaaaccctgggctccaccctcatccagctgccctccctgccccctgagttcatgcacgccgtcgcccaccagatcactcatcaggccatggtggcagctgttgcctccgcggccgcaggacagcaggtgccaggcttcccaacagctccaacccgggtggtgattgcccggcccactcctccacaggctcggccttcccatcctggagggcccccagtctctgggacactgcagggcgccggtctgggtaccaatgcctcgttggcccagatggtgagcggccttgtggggcagcttcttatgcagccagtccttgtggctcaggggaccccaggtatggctccaccgccagcccctgccactgcttctgccagtgctggcaccaccaacacagctaccacagctggccccgctcctggggggcctgcccagcctccacccacccctcaaccctccatggctgatcttcagttctctcagcttctggggaacctgctagggcctgcagggccaggggctggagggtctggtgtggcttctcccaccatcactgtggcgatgcctggtgtccctgcctttctccaaggcatgactgacttcttgcaggcaacacagacagcccctccaccacccccacctcctccacccccaccacctgccccagagcagcagaccatgcccccaccaggctccccttctggtggcgcagggagtcctggaggcctgggtcttgagagcctgtcaccggagttttttacctcagtggtgcagggtgtgctcagctccctgctgggctccctgggggctcgggctggcagcagtgaaagtattgctgccttcatacaacgcctcagtggatccagcaacatctttgagcctggagctgatggggcccttggattctttggggccttgctttctcttctgtgccagaacttctctatggtggacgtagtgatgcttctccatgggcatttccagccactacaacggctccagccccagctgcgatccttcttccaccagcactacctgggtggtcaggagcccacacccagtaacatccggatggcaacccacacattgatcacggggctagaagagtatgtgcgggagagtttttccttggtgcaggttcagccaggtgtggacatcatccggacaaacctggaatttctccaagagcagtttaatagcattgctgcgcatgtgctgcattgcacagatagtggatttggggcccggttgctggagttgtgtaaccaaggcctgtttgaatgcctggccctaaacctgcactgcttggggggacagcagatggagcttgctgctgttatcaatggccgaattcgtcgtatgtctcgtggggtgaatccctccttggtgagctggctgaccactatgatgggactgaggcttcaggtggtactggagcacatgcctgtaggccctgatgccattctcagatacgttcgcagggttggtgatcccccccagccacttcctgaggagccaatggaagttcagggagcagaaagagcttcccctgagcctcagcgggagaatgcttccccagcccctggaacaacagcagaagaggccatgtcccgaggtccacctcctgctcctgaggggggctcccgggatgaacaggatggagcttcagctgagacagaaccttgggcagctgcagtccccccagaatgggtccctattatccagcaggacattcagagccagcggaaggtgaaaccgcagccccctctgagtgatgcctacctcagtggtatgcctgccaagagacgcaagacgatgcagggtgagggcccccagctgcttctctcagaggctgtgagccgggcagctaaggcagccggagctcggcccctgacgagccccgagagcctgagccgggacctggaggcaccagaggttcaggagagctacaggcagcagctccggtctgatatacaaaaacgactgcaggaagaccccaactacagtccccagcgcttccccaatgcccagcgggcctttgctgatgatccttagctctttgctctatggcccttcctcatcaggggaccgtttcccccctcttccttcacagtatttaagaaataaaagtcggatttttctggctgcttctctctaaaaaaaaacaacaagacacacaaanacancancacaacacacaaaagggg

SEQ ID NO: 368528 - DNA, 3451 bp, Homo sapiens
  misc_feature (3218)..(3218): n is a, c, g, or t
acaagagcctcccggaccttcaaaggagggtgcagggcccccggagagtaagcagtgagccccgggtacggctggtgatggctcagcacatgatcagggatatacagaccttactatcccggatggagactctcccctaccttcagtgtcgaggagggccccaaccgcagcacagtcagccgcccccgcagccaccggctgtgaccccggagccagtagccttgagctctcaaacatcagaaccagttgaaagtgaagcacctccccgggagcccatggaggcagaagaagtggaggagcgtgccccagcccagaacccggagctcactcctggcccagccccagcgggcccaacacctgccccggaaacaaatgcacccaaccatccttcccctgcggagtatgtcgaggtgctccaggagctacagcggctggagagtcgcctccagcccttcttgcagcgctactacgaggttctgggtgctgctgccaccacggactacaataacaatcacgagggccgggaggaggatcagcggttgatcaacttggtaggggagagcctgcgactgctgggcaacacctttgttgcactgtctgacctgcgctgcaatctggcctgcacgcccccacgacacctgcatgtggtccggcctatgtctcactacaccacccccatggtgctccagcaggcagccattcccatacagatcaatgtgggaaccactgtgaccatgacaggaaatgggactcggccccccccaactcccaatgcagaggcacctccccctggtcctgggcaggcctcatccgtggctccgtcttctaccaatgtcgagtcctcagctgagggggctcccccgccaggtccagctcccccgccagccaccagccacccgagggtcatccggatttcccaccagagtgtggaacccgtggtcatgatgcacatgaacattcaagattctggcacacagcctggtggtgttccgagtgctcccactggccccctgggaccccctggtcatggccaaaccctgggctccaccctcatccagctgccctccctgccccctgagttcatgcacgccgtcgcccaccagatcactcatcaggccatggtggcagctgttgcctccgcggccgcaggacagcaggtgccaggcttcccaacagctccaacccgggtggtgattgcccggcccactcctccacaggctcggccttcccatcctggagggcccccagtctctgggacactgcagggcgccggtctgggtaccaatgcctcgttggcccagatggtgagcggccttgtggggcagcttcttatgcagccagtccttgtggctcaggggaccccaggtatggctccaccgccagcccctgccactgcttctgccagtgctggcaccaccaacacagctaccacagctggccccgctcctggggggcctgcccagcctccacccacccctcaaccctccatggctgatcttcagttctctcagcttctggggaacctgctagggcctgcagggccaggggctggagggtctggtgtggcttctcccaccatcactgtggcgatgcctggtgtccctgcctttctccaaggcatgactgacttcttgcaggcaacacagacagcccctccaccacccccacctcctccacccccaccacctgccccagagcagcagaccatgcccccaccaggctccccttctggtggcgcagggagtcctggaggcctgggtcttgagagcctgtcaccggagttttttacctcagtggtgcagggtgtgctcagctccctgctgggctccctgggggctcgggctggcagcagtgaaagtattgctgccttcatacaacgcctcagtggatccagcaacatctttgagcctggagctgatggggcccttggattctttggggccttgctttctcttctgtgccagaacttctctatggtggacgtagtgatgcttctccatgggcatttccagccactacaacggctccagccccagctgcgatccttcttccaccagcactacctgggtggtcaggagcccacacccagtaacatccggatggcaacccacacattgatcacggggctagaagagtatgtgcgggagagtttttccttggtgcaggttcagccaggtgtggacatcatccggacaaacctggaatttctccaagagcagtttaatagcattgctgcgcatgtgctgcattgcacagatagtggatttggggcccggttgctggagttgtgtaaccaaggcctgtttgaatgcctggccctaaacctgcactgcttggggggacagcagatggagcttgctgctgttatcaatggccgaattcgtcgtatgtctcgtggggtgaatccctccttggtgagctggctgaccactatgatgggactgaggcttcaggtggtactggagcacatgcctgtaggccctgatgccattctcagatacgttcgcagggttggtgatcccccccagccacttcctgaggagccaatggaagttcagggagcagaaagagcttcccctgagcctcagcgggagaatgcttccccagcccctggaacaacagcagaagaggccatgtcccgaggtccacctcctgctcctgaggggggctcccgggatgaacaggatggagcttcagctgagacagaaccttgggcagctgcagtccccccagaatgggtccctattatccagcaggacattcagagccagcggaaggtgaaaccgcagccccctctgagtgatgcctacctcagtggtatgcctgccaagagacgcaagacgatgcagggtgagggcccccagctgcttctctcagaggctgtgagccgggcagctaaggcagccggagctcggcccctgacgagccccgagagcctgagccgggacctggaggcaccagaggttcaggagagctacaggcagcagctccggtctgatatacaaaaacgactgcaggaagaccccaactacagtccccagcgcttccccaatgcccagcgggcctttgctgatgatccttagctctttgctctatggcccttcctcatcaggggaccgtttcccccctcttccttcacagtatttaagaaataaaagtcggatttttctggctgcttctctctagcagcagcgaaaaaaaaaaaaaaaaaaaaaaanaaaaaaaaaaaaaaagaaaaaagaaaacaaaaaaaaaaaaaaaaaaaaaaaaaaaaaagtactgatggtggtgaataaagaccaaagggtcctctctacctttgaaaactctcctggggtggaggagaccagggcaggatagacagacctctgcagtaagagagtggttgggaaacccagggtgttcccttggatctcagatctgagccatcgagggaagagtgggctgctaa

SEQ ID NO: 368529 - DNA, 3242 bp, Homo sapiens
acaagagcctcccggaccttcaaaggagggtgcagggcccccggagagtaagcagtgagccccgggtacggctggtgatggctcagcacatgatcagggatatacagaccttactatcccggatggagactctcccctaccttcagtgtcgaggagggccccaaccgcagcacagtcagccgcccccgcagccaccggctgtgaccccggagccagtagccttgagctctcaaacatcagaaccagttgaaagtgaagcacctccccgggagcccatggaggcagaagaagtggaggagcgtgccccagcccagaacccggagctcactcctggcccagccccagcgggcccaacacctgccccggaaacaaatgcacccaaccatccttcccctgcggagtatgtcgaggtgctccaggagctacagcggctggagagtcgcctccagcccttcttgcagcgctactacgaggttctgggtgctgctgccaccacggactacaataacaatcacgagggccgggaggaggatcagcggttgatcaacttggtaggggagagcctgcgactgctgggcaacacctttgttgcactgtctgacctgcgctgcaatctggcctgcacgcccccacgacacctgcatgtggtccggcctatgtctcactacaccacccccatggtgctccagcaggcagccattcccatacagatcaatgtgggaaccactgtgaccatgacaggaaatgggactcggccccccccaactcccaatgcagaggcacctccccctggtcctgggcaggcctcatccgtggctccgtcttctaccaatgtcgagtcctcagctgagggggctcccccgccaggtccagctcccccgccagccaccagccacccgagggtcatccggatttcccaccagagtgtggaacccgtggtcatgatgcacatgaacattcaagattctggcacacagcctggtggtgttccgagtgctcccactggccccctgggaccccctggtcatggccaaaccctgggctccaccctcatccagctgccctccctgccccctgagttcatgcacgccgtcgcccaccagatcactcatcaggccatggtggcagctgttgcctccgcggccgcaggacagcaggtgccaggcttcccaacagctccaacccgggtggtgattgcccggcccactcctccacaggctcggccttcccatcctggagggcccccagtctctgggacactgcagggcgccggtctgggtaccaatgcctcgttggcccagatggtgagcggccttgtggggcagcttcttatgcagccagtccttgtggctcaggggaccccaggtatggctccaccgccagcccctgccactgcttctgccagtgctggcaccaccaacacagctaccacagctggccccgctcctggggggcctgcccagcctccacccacccctcaaccctccatggctgatcttcagttctctcagcttctggggaacctgctagggcctgcagggccaggggctggagggtctggtgtggcttctcccaccatcactgtggcgatgcctggtgtccctgcctttctccaaggcatgactgacttcttgcaggcaacacagacagcccctccaccacccccacctcctccacccccaccacctgccccagagcagcagaccatgcccccaccaggctccccttctggtggcgcagggagtcctggaggcctgggtcttgagagcctgtcaccggagttttttacctcagtggtgcagggtgtgctcagctccctgctgggctccctgggggctcgggctggcagcagtgaaagtattgctgccttcatacaacgcctcagtggatccagcaacatctttgagcctggagctgatggggcccttggattctttggggccttgctttctcttctgtgccagaacttctctatggtggacgtagtgatgcttctccatgggcatttccagccactacaacggctccagccccagctgcgatccttcttccaccagcactacctgggtggtcaggagcccacacccagtaacatccggatggcaacccacacattgatcacggggctagaagagtatgtgcgggagagtttttccttggtgcaggttcagccaggtgtggacatcatccggacaaacctggaatttctccaagagcagtttaatagcattgctgcgcatgtgctgcattgcacagatagtggatttggggcccggttgctggagttgtgtaaccaaggcctgtttgaatgcctggccctaaacctgcactgcttggggggacagcagatggagcttgctgctgttatcaatggccgaattcgtcgtatgtctcgtggggtgaatccctccttggtgagctggctgaccactatgatgggactgaggcttcaggtggtactggagcacatgcctgtaggccctgatgccattctcagatacgttcgcagggttggtgatcccccccagccacttcctgaggagccaatggaagttcagggagcagaaagagcttcccctgagcctcagcgggagaatgcttccccagcccctggaacaacagcagaagaggccatgtcccgaggtccacctcctgctcctgaggggggctcccgggatgaacaggatggagcttcagctgagacagaaccttgggcagctgcagtccccccagaatgggtccctattatccagcaggacattcagagccagcggaaggtgaaaccgcagccccctctgagtgatgcctacctcagtggtatgcctgccaagagacgcaagctccggtctgatatacaaaaacgactgcaggaagaccccaactacagtccccagcgcttccccaatgcccagcgggcctttgctgatgatccttagctctttgctctatggcccttcctcatcaggggaccgtttcccccctcttccttcacagtatttaagaaataaaagtcggatttttctggctgcttctctctaaacaaaaacccacaaccccccccccacacaacaccgactgccacgcccgcacaccccaaccaacaaacacgcgcgcccgcgccccccgacacaacacaccccccccgcaggaccaccccaagctcgcacaccccacactcgacccgccacaccgaagcgccccccccaccggcccccccccccacgcacccgccgcgccgaccc

SEQ ID NO: 368530 - DNA, 3088 bp, Homo sapiens
  misc_feature (3063)..(3063): n is a, c, g, or t
  misc_feature (3067)..(3067): n is a, c, g, or t
  misc_feature (3070)..(3070): n is a, c, g, or t
acaagagcctcccggaccttcaaaggagggtgcagggcccccggagagtaagcagtgagccccgggtacggctggtgatggctcagcacatgatcagggatatacagaccttactatcccggatggagactctcccctaccttcagtgtcgaggagggccccaaccgcagcacagtcagccgcccccgcagccaccggctgtgaccccggagccagtagccttgagctctcaaacatcagaaccagttgaaagtgaagcacctccccgggagcccatggaggcagaagaagtggaggagcgtgccccagcccagaacccggagctcactcctggcccagccccagcgggcccaacacctgccccggaaacaaatgcacccaaccatccttcccctgcggagtatgtcgaggtgctccaggagctacagcggctggagagtcgcctccagcccttcttgcagcgctactacgaggttctgggtgctgctgccaccacggactacaataacaatcacgagggccgggaggaggatcagcggttgatcaacttggtaggggagagcctgcgactgctgggcaacacctttgttgcactgtctgacctgcgctgcaatctggcctgcacgcccccacgacacctgcatgtggtccggcctatgtctcactacaccacccccatggtgctccagcaggcagccattcccatacagatcaatgtgggaaccactgtgaccatgacaggaaatgggactcggccccccccaactcccaatgcagaggcacctccccctggtcctgggcaggcctcatccgtggctccgtcttctaccaatgtcgagtcctcagctgagggggctcccccgccaggtccagctcccccgccagccaccagccacccgagggtcatccggatttcccaccagagtgtggaacccgtggtcatgatgcacatgaacattcaagattctggcacacagcctggtggtgttccgagtgctcccactggccccctgggaccccctggtcatggccaaaccctgggctccaccctcatccagctgccctccctgccccctgagttcatgcacgccgtcgcccaccagatcactcatcaggccatggtggcagctgttgcctccgcggccgcaggacagcaggtgccaggcttcccaacagctccaacccgggtggtgattgcccggcccactcctccacaggctcggccttcccatcctggagggcccccagtctctgggacactgcagggcgccggtctgggtaccaatgcctcgttggcccagatggtgagcggccttgtggggcagcttcttatgcagccagtccttgtggctcaggggaccccaggtatggctccaccgccagcccctgccactgcttctgccagtgctggcaccaccaacacagctaccacagctggccccgctcctggggggcctgcccagcctccacccacccctcaaccctccatggctgatcttcagttctctcagcttctggggaacctgctagggcctgcagggccaggggctggagggtctggtgtggcttctcccaccatcactgtggcgatgcctggtgtccctgcctttctccaaggcatgactgacttcttgcaggcaacacagacagcccctccaccacccccacctcctccacccccaccacctgccccagagcagcagaccatgcccccaccaggctccccttctggtggcgcagggagtcctggaggcctgggtcttgagagcctgtcaccggagttttttacctcagtggtgcagggtgtgctcagctccctgctgggctccctgggggctcgggctggcagcagtgaaagtattgctgccttcatacaacgcctcagtggatccagcaacatctttgagcctggagctgatggggcccttggattctttggggccttgctttctcttctgtgccagaacttctctatggtggacgtagtgatgcttctccatgggcatttccagccactacaacggctccagccccagctgcgatccttcttccaccagcactacctgggtggtcaggagcccacacccagtaacatccggatggcaacccacacattgatcacggggctagaagagtatgtgcgggagagtttttccttggtgcaggttcagccaggtgtggacatcatccggacaaacctggaatttctccaagagcagtttaatagcattgctgcgcatgtgctgcattgcacagatagtggatttggggcccggttgctggagttgtgtaaccaaggcctgtttgaatgcctggccctaaacctgcactgcttggggggacagcagatggagcttgctgctgttatcaatggccgaattcgtcgtatgtctcgtggggtgaatccctccttggtgagctggctgaccactatgatgggactgaggcttcaggtggtactggagcacatgcctgtaggccctgatgccattctcagatacgttcgcagggttggtgatcccccccagccacttcctgaggagccaatggaagttcagggagcagaaagagcttcccctgagcctcagcgggagaatgcttccccagcccctggaacaacagcagaagaggccatgtcccgaggtccacctcctgctcctgaggggggctcccgggatgaacaggatggagcttcagctgagacagaaccttgggcagctgcagtccccccagaatgggtccctattatccagcaggacattcagagccagcggaaggtgaaaccgcagccccctctgagtgatgcctacctcagtggtatgcctgccaagagacgcaagctccggtctgatatacaaaaacgactgcaggaagaccccaactacagtccccagcgcttccccaatgcccagcgggcctttgctgatgatccttagctctttgctctatggcccttcctcatcaggggaccgtttcccccctcttccttcacagtatttaagaaataaaagtcggatttttctggctgcttctctctaaaaaaaaacaacaagacacacaaanacancancacaacacacaaaagggg

SEQ ID NO: 368531 - DNA, 3167 bp, Homo sapiens
acaagagcctcccggaccttcaaaggagggtgcagggcccccggagagtaagcagtgagccccgggtacggctggtgatggctcagcacatgatcagggatatacagaccttactatcccggatggagactctcccctaccttcagtgtcgaggagggccccaaccgcagcacagtcagccgcccccgcagccaccggctgtgaccccggagccagtagccttgagctctcaaacatcagaaccagttgaaagtgaagcacctccccgggagcccatggaggcagaagaagtggaggagcgtgccccagcccagaacccggagctcactcctggcccagccccagcgggcccaacacctgccccggaaacaaatgcacccaaccatccttcccctgcggagtatgtcgaggtgctccaggagctacagcggctggagagtcgcctccagcccttcttgcagcgctactacgaggttctgggtgctgctgccaccacggactacaataacaatcacgagggccgggaggaggatcagcggttgatcaacttggtaggggagagcctgcgactgctgggcaacacctttgttgcactgtctgacctgcgctgcaatctggcctgcacgcccccacgacacctgcatgtggtccggcctatgtctcactacaccacccccatggtgctccagcaggcagccattcccatacagatcaatgtgggaaccactgtgaccatgacaggaaatgggactcggccccccccaactcccaatgcagaggcacctccccctggtcctgggcaggcctcatccgtggctccgtcttctaccaatgtcgagtcctcagctgagggggctcccccgccaggtccagctcccccgccagccaccagccacccgagggtcatccggatttcccaccagagtgtggaacccgtggtcatgatgcacatgaacattcaagattctggcacacagcctggtggtgttccgagtgctcccactggccccctgggaccccctggtcatggccaaaccctgggctccaccctcatccagctgccctccctgccccctgagttcatgcacgccgtcgcccaccagatcactcatcaggccatggtggcagctgttgcctccgcggccgcaggacagcaggtgccaggcttcccaacagctccaacccgggtggtgattgcccggcccactcctccacaggctcggccttcccatcctggagggcccccagtctctgggacactgcagggcgccggtctgggtaccaatgcctcgttggcccagatggtgagcggccttgtggggcagcttcttatgcagccagtccttgtggctcaggggaccccaggtatggctccaccgccagcccctgccactgcttctgccagtgctggcaccaccaacacagctaccacagctggccccgctcctggggggcctgcccagcctccacccacccctcaaccctccatggctgatcttcagttctctcagcttctggggaacctgctagggcctgcagggccaggggctggagggtctggtgtggcttctcccaccatcactgtggcgatgcctggtgtccctgcctttctccaaggcatgactgacttcttgcaggcaacacagacagcccctccaccacccccacctcctccacccccaccacctgccccagagcagcagaccatgcccccaccaggctccccttctggtggcgcagggagtcctggaggcctgggtcttgagagcctgtcaccggagttttttacctcagtggtgcagggtgtgctcagctccctgctgggctccctgggggctcgggctggcagcagtgaaagtattgctgccttcatacaacgcctcagtggatccagcaacatctttgagcctggagctgatggggcccttggattctttggggccttgctttctcttctgtgccagaacttctctatggtggacgtagtgatgcttctccatgggcatttccagccactacaacggctccagccccagctgcgatccttcttccaccagcactacctgggtggtcaggagcccacacccagtaacatccggatggcaacccacacattgatcacggggctagaagagtatgtgcgggagagtttttccttggtgcaggttcagccaggtgtggacatcatccggacaaacctggaatttctccaagagcagtttaatagcattgctgcgcatgtgctgcattgcacagatagtggatttggggcccggttgctggagttgtgtaaccaaggcctgtttgaatgcctggccctaaacctgcactgcttggggggacagcagatggagcttgctgctgttatcaatggccgaattcgtcgtatgtctcgtggggtgaatccctccttggtgagctggctgaccactatgatgggactgaggcttcaggtggtactggagcacatgcctgtaggccctgatgccattctcagatacgttcgcaggccacttcctgaggagccaatggaagttcagggagcagaaagagcttcccctgagcctcagcgggagaatgcttccccagcccctggaacaacagcagaagaggccatgtcccgaggtccacctcctgctcctgaggggggctcccgggatgaacaggatggagcttcagctgagacagaaccttgggcagctgcagtccccccagaatgggtccctattatccagcaggacattcagagccagcggaaggtgaaaccgcagccccctctgagtgatgcctacctcagtggtatgcctgccaagagacgcaagacgatgcagggtgagggcccccagctgcttctctcagaggctgtgagccgggcagctaaggcagccggagctcggcccctgacgagccccgagagcctgagccgggacctggaggcaccagaggttcaggagagctacaggcagcagctccggtctgatatacaaaaacgactgcaggaagaccccaactacagtccccagcgcttccccaatgcccagcgggcctttgctgatgatccttagctctttgctctatggcccttcctcatcaggggaccgtttcccccctcttccttcacagtatttaagaaataaaagtcggatttttctggctgcttctctcta

SEQ ID NO: 368532 - DNA, 2914 bp, Homo sapiens
  misc_feature (2843)..(2843): n is a, c, g, or t
  misc_feature (2858)..(2858): n is a, c, g, or t
acaagagcctcccggaccttcaaaggagggtgcagggcccccggagagtaagcagtgagccccgggtacggctggtgatggctcagcacatgatcagggatatacagaccttactatcccggatggagactctcccctaccttcagtgtcgaggagggccccaaccgcagcacagtcagccgcccccgcagccaccggctgtgaccccggagccagtagccttgagctctcaaacatcagaaccagttgaaagtgaagcacctccccgggagcccatggaggcagaagaagtggaggagcgtgccccagcccagaacccggagctcactcctggcccagccccagcgggcccaacacctgccccggaaacaaatgcacccaaccatccttcccctgcggagtatgtcgaggtgctccaggagctacagcggctggagagtcgcctccagcccttcttgcagcgctactacgaggttctgggtgctgctgccaccacggactacaataacaatcacgagggccgggaggaggatcagcggttgatcaacttggtaggggagagcctgcgactgctgggcaacacctttgttgcactgtctgacctgcgctgcaatctggcctgcacgcccccacgacacctgcatgtggtccggcctatgtctcactacaccacccccatggtgctccagcaggcagccattcccatacagatcaatgtgggaaccactgtgaccatgacaggaaatgggactcggccccccccaactcccaatgcagaggcacctccccctggtcctgggcaggcctcatccgtggctccgtcttctaccaatgtcgagtcctcagctgagggggctcccccgccaggtccagctcccccgccagccaccagccacccgagggtcatccggatttcccaccagagtgtggaacccgtggtcatgatgcacatgaacattcaagattctggcacacagcctggtggtgttccgagtgctcccactggccccctgggaccccctggtcatggccaaaccctgggctccaccctcatccagctgccctccctgccccctgagttcatgcacgccgtcgcccaccagatcactcatcaggccatggtggcagctgttgcctccgcggccgcaggacagcaggtgccaggcttcccaacagctccaacccgggtggtgattgcccggcccactcctccacaggctcggccttcccatcctggagggcccccagtctctgggacactgcagggcgccggtctgggtaccaatgcctcgttggcccagatggtgagcggccttgtggggcagcttcttatgcagccagtccttgtggctcaggggaccccaggtatggctccaccgccagcccctgccactgcttctgccagtgctggcaccaccaacacagctaccacagctggccccgctcctggggggcctgcccagcctccacccacccctcaaccctccatggctgatcttcagttctctcagcttctggggaacctgctagggcctgcagggccaggggctggagggtctggtgtggcttctcccaccatcactgtggcgatgcctggtgtccctgcctttctccaaggcatgactgacttcttgcaggcaacacagacagcccctccaccacccccacctcctccacccccaccacctgccccagagcagcagaccatgcccccaccaggctccccttctggtggcgcagggagtcctggaggcctgggtcttgagagcctgtcaccggagttttttacctcagtggtgcagggtgtgctcagctccctgctgggctccctgggggctcgggctggcagcagtgaaagtattgctgccttcatacaacgcctcagtggatccagcaacatctttgagcctggagctgatggggcccttggattctttggggccttgctttctcttctgtgccagaacttctctatggtggacgtagtgatgcttctccatgggcatttccagccactacaacggctccagccccagctgcgatccttcttccaccagcactacctgggtggtcaggagcccacacccagtaacatccggatggcaacccacacattgatcacggggctagaagagtatgtgcgggagagtttttccttggtgcaggttcagccaggtgtggacatcatccggacaaacctggaatttctccaagagcagtttaatagcattgctgcgcatgtgctgcattgcacagatagtggatttggggcccggttgctggagttgtgtaaccaaggcctgtttgaatgcctggccctaaacctgcactgcttggggggacagcagatggagcttgctgctgttatcaatggccgaattcgtcgtatgtctcgtggggtgaatccctccttggtgagctggctgaccactatgatgggactgaggcttcaggtggtactggagcacatgcctgtaggccctgatgccattctcagatacgttcgcagggttggtgatcccccccagccacttcctgaggagccaatggaagttcagggagcagaaagagcttcccctgagcctcagcgggagaatgcttccccagcccctggaacaacagcagaagaggccatgtcccgaggtccacctcctgctcctgaggggggctcccgggatgaacaggatggagcttcagctgagacagaaccttgggcagctgcagtccccccagaatgggtccctattatccagcaggacattcagagccagcggaaggtgaaaccgcagccccctctgagtgatgcctacctcagtggtatgcctgccaagagacgcaagctncatcctgttcatccngggagcccccttaaggagcaggaggtggacctcgggacatggcctcttctgctgtt

SEQ ID NO: 368533 - DNA, 3041 bp, Homo sapiens
acaagagcctcccggaccttcaaaggagggtgcagggcccccggagagtaagcagtgagccccgggtacggctggtgatggctcagcacatgatcagggatatacagaccttactatcccggatggagactctcccctaccttcagtgtcgaggagggccccaaccgcagcacagtcagccgcccccgcagccaccggctgtgaccccggagccagtagccttgagctctcaaacatcagaaccagttgaaagtgaagcacctccccgggagcccatggaggcagaagaagtggaggagcgtgccccagcccagaacccggagctcactcctggcccagccccagcgggcccaacacctgccccggaaacaaatgcacccaaccatccttcccctgcggagtatgtcgaggtgctccaggagctacagcggctggagagtcgcctccagcccttcttgcagcgctactacgaggttctgggtgctgctgccaccacggactacaataacaatcacgagggccgggaggaggatcagcggttgatcaacttggtaggggagagcctgcgactgctgggcaacacctttgttgcactgtctgacctgcgctgcaatctggcctgcacgcccccacgacacctgcatgtggtccggcctatgtctcactacaccacccccatggtgctccagcaggcagccattcccatacagatcaatgtgggaaccactgtgaccatgacaggaaatgggactcggccccccccaactcccaatgcagaggcacctccccctggtcctgggcaggcctcatccgtggctccgtcttctaccaatgtcgagtcctcagctgagggggctcccccgccaggtccagctcccccgccagccaccagccacccgagggtcatccggatttcccaccagagtgtggaacccgtggtcatgatgcacatgaacattcaagattctggcacacagcctggtggtgttccgagtgctcccactggccccctgggaccccctggtcatggccaaaccctgggctccaccctcatccagctgccctccctgccccctgagttcatgcacgccgtcgcccaccagatcactcatcaggccatggtggcagctgttgcctccgcggccgcaggacagcaggtgccaggcttcccaacagctccaacccgggtggtgattgcccggcccactcctccacaggctcggccttcccatcctggagggcccccagtctctgggacactgcagggcgccggtctgggtaccaatgcctcgttggcccagatggtgagcggccttgtggggcagcttcttatgcagccagtccttgtggctcaggggaccccaggtatggctccaccgccagcccctgccactgcttctgccagtgctggcaccaccaacacagctaccacagctggccccgctcctggggggcctgcccagcctccacccacccctcaaccctccatggctgatcttcagttctctcagcttctggggaacctgctagggcctgcagggccaggggctggagggtctggtgtggcttctcccaccatcactgtggcgatgcctggtgtccctgcctttctccaaggcatgactgacttcttgcaggcaacacagacagcccctccaccacccccacctcctccacccccaccacctgccccagagcagcagaccatgcccccaccaggctccccttctggtggcgcagggagtcctggaggcctgggtcttgagagcctgtcaccggagttttttacctcagtggtgcagggtgtgctcagctccctgctgggctccctgggggctcgggctggcagcagtgaaagtattgctgccttcatacaacgcctcagtggatccagcaacatctttgagcctggagctgatggggcccttggattctttggggccttgctttctcttctgtgccagaacttctctatggtggacgtagtgatgcttctccatgggcatttccagccactacaacggctccagccccagctgcgatccttcttccaccagcactacctgggtggtcaggagcccacacccagtaacatccggatggcaacccacacattgatcacggggctagaagagtatgtgcgggagagtttttccttggtgcaggttcagccaggtgtggacatcatccggacaaacctggaatttctccaagagcagtttaatagcattgctgcgcatgtgctgcattgcacagatagtggatttggggcccggttgctggagttgtgtaaccaaggcctgtttgaatgcctggccctaaacctgcactgcttggggggacagcagatggagcttgctgctgttatcaatggccgaattcgtcgtatgtctcgtggggtgaatccctccttggtgagctggctgaccactatgatgggactgaggcttcaggtggtactggagcacatgcctgtaggccctgatgccattctcagatacgttcgcagggttggtgatcccccccagccacttcctgaggagccaatggaagttcagggagcagaaagagcttcccctgagcctcaggaatgggtccctattatccagcaggacattcagagccagcggaaggtgaaaccgcagccccctctgagtgatgcctacctcagtggtatgcctgccaagagacgcaagacgatgcagggtgagggcccccagctgcttctctcagaggctgtgagccgggcagctaaggcagccggagctcggcccctgacgagccccgagagcctgagccgggacctggaggcaccagaggttcaggagagctacaggcagcagctccggtctgatatacaaaaacgactgcaggaagaccccaactacagtccccagcgcttccccaatgcccagcgggcctttgctgatgatccttagctctttgctctatggcccttcctcatcaggggaccgtttcccccctcttccttcacagtatttaagaaataaaagtcggatttttctggctgcttctctcta

SEQ ID NO: 368534 - DNA, 2127 bp, Homo sapiens
acaagagcctcccggaccttcaaaggagggtgcagggcccccggagagtaagcagtgagccccgggtacggctggtgatggctcagcacatgatcagggatatacagaccttactatcccggatggagactctcccctaccttcagtgtcgaggagggccccaaccgcagcacagtcagccgcccccgcagccaccggctgtgaccccggagccagtagccttgagctctcaaacatcagaaccagttgaaagtgaagcacctccccgggagcccatggaggcagaagaagtggaggagcgtgccccagcccagaacccggagctcactcctggcccagccccagcgggcccaacacctgccccggaaacaaatgcacccaaccatccttcccctgcggagtatgtcgaggtgctccaggagctacagcggctggagagtcgcctccagcccttcttgcagcgctactacgaggttctgggtgctgctgccaccacggactacaataacaatcacgagggccgggaggaggatcagcggttgatcaacttggtaggggagagcctgcgactgctgggcaacacctttgttgcactgtctgacctgcgctgcaatctggcctgcacgcccccacgacacctgcatgtggtccggcctatgtctcactacaccacccccatggtgctccagcaggcagccattcccatacagatcaatgtgggaaccactgtgaccatgacaggaaatgggactcggccccccccaactcccaatgcagaggcacctccccctggtcctgggcaggcctcatccgtggctccgtcttctaccaatgtcgagtcctcagctgagggggctcccccgccaggtccagctcccccgccagccaccagccacccgagggtcatccggatttcccaccagagtgtggaacccgtggtcatgatgcacatgaacattcaagattctggcacacagcctggtggtgttccgagtgctcccactggccccctgggaccccctggtcatggccaaaccctggatggcaacccacacattgatcacggggctagaagagtatgtgcgggagagtttttccttggtgcaggttcagccaggtgtggacatcatccggacaaacctggaatttctccaagagcagtttaatagcattgctgcgcatgtgctgcattgcacagatagtggatttggggcccggttgctggagttgtgtaaccaaggcctgtttgaatgcctggccctaaacctgcactgcttggggggacagcagatggagcttgctgctgttatcaatggccgaattcgtcgtatgtctcgtggggtgaatccctccttggtgagctggctgaccactatgatgggactgaggcttcaggtggtactggagcacatgcctgtaggccctgatgccattctcagatacgttcgcagggttggtgatcccccccagccacttcctgaggagccaatggaagttcagggagcagaaagagcttcccctgagcctcagcgggagaatgcttccccagcccctggaacaacagcagaagaggccatgtcccgaggtccacctcctgctcctgaggggggctcccgggatgaacaggatggagcttcagctgagacagaaccttgggcagctgcagtccccccagaatgggtccctattatccagcaggacattcagagccagcggaaggtgaaaccgcagccccctctgagtgatgcctacctcagtggtatgcctgccaagagacgcaagacgatgcagggtgagggcccccagctgcttctctcagaggctgtgagccgggcagctaaggcagccggagctcggcccctgacgagccccgagagcctgagccgggacctggaggcaccagaggttcaggagagctacaggcagcagctccggtctgatatacaaaaacgactgcaggaagaccccaactacagtccccagcgcttccccaatgcccagcgggcctttgctgatgatccttagctctttgctctatggcccttcctcatcaggggaccgtttcccccctcttccttcacagtatttaagaaataaaagtcggatttttctggctgcttctctcta

SEQ ID NO: 368535 - DNA, 2809 bp, Homo sapiens
acaagagcctcccggaccttcaaaggagggtgcagggcccccggagagtaagcagtgagccccgggtacggctggtgatggctcagcacatgatcagggatatacagaccttactatcccggatggagactctcccctaccttcagtgtcgaggagggccccaaccgcagcacagtcagccgcccccgcagccaccggctgtgaccccggagccagtagccttgagctctcaaacatcagaaccagttgaaagtgaagcacctccccgggagcccatggaggcagaagaagtggaggagcgtgccccagcccagaacccggagctcactcctggcccagccccagcgggcccaacacctgccccggaaacaaatgcacccaaccatccttcccctgcggagtatgtcgaggtgctccaggagctacagcggctggagagtcgcctccagcccttcttgcagcgctactacgaggttctgggtgctgctgccaccacggactacaataacaatcacgagggccgggaggaggatcagcggttgatcaacttggtaggggagagcctgcgactgctgggcaacacctttgttgcactgtctgacctgcgctgcaatctggcctgcacgcccccacgacacctgcatgtggtccggcctatgtctcactacaccacccccatggtgctccagcaggcagccattcccatacagatcaatgtgggaaccactgtgaccatgacaggaaatgggactcggccccccccaactcccaatgcagaggcacctccccctggtcctgggcaggcctcatccgtggctccgtcttctaccaatgtcgagtcctcagctgagggggctcccccgccaggtccagctcccccgccagccaccagccacccgagggtcatccggatttcccaccagagtgtggaacccgtggtcatgatgcacatgaacattcaagattctggcacacagcctggtggtgttccgagtgctcccactggccccctgggaccccctggtcatggccaaaccctgggctccaccctcatccagctgccctccctgccccctgagttcatgcacgccgtcgcccaccagatcactcatcaggccatggtggcagctgttgcctccgcggccgcaggacagcaggtgccaggcttcccaacagctccaacccgggtggtgattgcccggcccactcctccacaggctcggccttcccatcctggagggcccccagtctctgggacactgcagggcgccggtctgggtaccaatgcctcgttggcccagatggtgagcggccttgtggggcagcttcttatgcagccagtccttgtggctcaggggaccccaggtatggctccaccgccagcccctgccactgcttctgccagtgctggcaccaccaacacagctaccacagctggccccgctcctggggggcctgcccagcctccacccacccctcaaccctccatggctgatcttcagttctctcagcttctggggaacctgctagggcctgcagggccaggggctggagggtctggtgtggcttctcccaccatcactgtggcgatgcctggtgtccctgcctttctccaaggcatgactgacttcttgcaggcaacacagacagcccctccaccacccccacctcctccacccccaccacctgccccagagcagcagaccatgcccccaccaggctccccttctggtggcgcagggagtcctggaggcctgggtcttgagagcctgtcaccggagttttttacctcagtggtgcagggtgtgctcagctccctgctgggctccctgggggctcgggctggcagcagtgaaagtattgctgccttcatacaacgcctcagtggatccagcaacatctttgagcctggagctgatggggcccttggattctttggggccttgctttctcttctgtgccagaacttctctatggtggacgtagtgatgcttctccatgggcatttccagccactacaacggctccagccccagctgcgatccttcttccaccagcactacctgggtggtcaggagcccacacccagtaacatccggatggcaacccacacattgatcacggggctagaagagtatgtgcgggagagtttttccttggtgcaggttcagccaggtgtggacatcatccggacaaacctggaatttctccaagagcagtttaatagcattgctgcgcatgtgctgcattgcacagatagtggatttggggcccggttgctggagttgtgtaaccaaggcctgtttgaatgcctggccctaaacctgcactgcttggggggacagcagatggagcttgctgctgttatcaatggccgaattcgtcgtatgtctcgtggggtgaatccctccttggtgagctggctgaccactatgatgggactgaggcttcaggtggtactggagcacatgcctgtaggccctgatgccattctcagatacgttcgcagggttggtgatcccccccagccacttcctgaggagccaatggaagttcagggagcagaaagagcttcccctgagcctcagttcaggagagctacaggcagcagctccggtctgatatacaaaaacgactgcaggaagaccccaactacagtccccagcgcttccccaatgcccagcgggcctttgctgatgatccttagctctttgctctatggcccttcctcatcaggggaccgtttcccccctcttccttcacagtatttaagaaataaaagtcggatttttctggctgcttctctcta

SEQ ID NO: 368536 - DNA, 2589 bp, Homo sapiens
acaagagcctcccggaccttcaaaggagggtgcagggcccccggagagtaagcagtgagccccgggtacggctggtgatggctcagcacatgatcagggatatacagaccttactatcccggatggagactctcccctaccttcagtgtcgaggagggccccaaccgcagcacagtcagccgcccccgcagccaccggctgtgaccccggagccagtagccttgagctctcaaacatcagaaccagttgaaagtgaagcacctccccgggagcccatggaggcagaagaagtggaggagcgtgccccagcccagaacccggagctcactcctggcccagccccagcgggcccaacacctgccccggaaacaaatgcacccaaccatccttcccctgcggagtatgtcgaggtgctccaggagctacagcggctggagagtcgcctccagcccttcttgcagcgctactacgaggttctgggtgctgctgccaccacggactacaataacaatcacgagggccgggaggaggatcagcggttgatcaacttggtaggggagagcctgcgactgctgggcaacacctttgttgcactgtctgacctgcgctgcaatctggcctgcacgcccccacgacacctgcatgtggtccggcctatgtctcactacaccacccccatggtgctccagcaggcagccattcccatacagatcaatgtgggaaccactgtgaccatgacaggaaatgggactcggccccccccaactcccaatgcagaggcacctccccctggtcctgggcaggcctcatccgtggctccgtcttctaccaatgtcgagtcctcagctgagggggctcccccgccaggtccagctcccccgccagccaccagccacccgagggtcatccggatttcccaccagagtgtggaacccgtggtcatgatgcacatgaacattcaagattctggcacacagcctggtggtgttccgagtgctcccactggccccctgggaccccctggtcatggccaaaccctgggctccaccctcatccagctgccctccctgccccctgagttcatgcacgccgtcgcccaccagatcactcatcaggccatggtggcagctgttgcctccgcggccgcaggacagcaggtgccaggcttcccaacagctccaacccgggtggtgattgcccggcccactcctccacaggctcggccttcccatcctggagggcccccagtctctgggacactgcagggcgccggtctgggtaccaatgcctcgttggcccagatggtgagcggccttgtggggcagcttcttatgcagccagtccttgtggctcaggggaccccaggtatggctccaccgccagcccctgccactgcttctgccagtgctggcaccaccaacacagctaccacagctggccccgctcctggggggcctgcccagcctccacccacccctcaaccctccatggctgatcttcagttctctcagcttctggggaacctgctagggcctgcagggccaggggctggagggtctggtgtggcttctcccaccatcactgtggcgatgcctggtgtccctgcctttctccaaggcatgactgacttcttgcaggcaacacagacagcccctccaccacccccacctcctccacccccaccacctgccccagagcagcagaccatgcccccaccaggctccccttctggtggcgcagggagtcctggaggcctgggtcttgagagcctgtcaccggagttttttacctcagtggtgcagggtgtgctcagctccctgctgggctccctgggggctcgggctggcagcagtgaaagtattgctgccttcatacaacgcctcagtggatccagcaacatctttgagcctggagctgatggggcccttggattctttggggccttgctttctcttctgtgccagaacttctctatggtggacgtagtgatgcttctccatgggcatttccagccactacaacggctccagccccagctgcgatccttcttccaccagcactacctgggtggtcaggagcccacacccagtaacatccggatggcaacccacacattgatcacggggctagaagagtatgtgcgggagagtttttccttggtgcaggttcagccaggtgtggacatcatccggacaaacctggaatttctccaagagcagtttaatagcattgctgcgcatgtgctgcattgcacagatagtggatttggggcccggttgctggagttgtgtaaccaaggcctgtttgaatgcctggccctaaacctgcactgcttggggggacagcagatggagcttgctgctgttatcaatggccgaattcgtcgtatgtctcgtggggtgaatccctccttggtgagctggctgaccactatgatgggactgaggcttcaggtggtactggagcacatgcctgtaggccctgatgccattctcagatacgttcgcagggttggtgatcccccccagccacttcctgatgtctcaatggcttctgaatgactgttctaataaatgatcttaaaacagt

SEQ ID NO: 368537 - DNA, 2033 bp, Homo sapiens
  misc_feature (1800)..(1800): n is a, c, g, or t
acaagagcctcccggaccttcaaaggagggtgcagggcccccggagagtaagcagtgagccccgggtacggctggtgatggctcagcacatgatcagggatatacagaccttactatcccggatggagactctcccctaccttcagtgtcgaggagggccccaaccgcagcacagtcagccgcccccgcagccaccggctgtgaccccggagccagtagccttgagctctcaaacatcagaaccagttgaaagtgaagcacctccccgggagcccatggaggcagaagaagtggaggagcgtgccccagcccagaacccggagctcactcctggcccagccccagcgggcccaacacctgccccggaaacaaatgcacccaaccatccttcccctgcggagtatgtcgaggtgctccaggagctacagcggctggagagtcgcctccagcccttcttgcagcgctactacgaggttctgggtgctgctgccaccacggactacaataacaatcacgagggccgggaggaggatcagcggttgatcaacttggtaggggagagcctgcgactgctgggcaacacctttgttgcactgtctgacctgcgctgcaatctggcctgcacgcccccacgacacctgcatgtggtccggcctatgtctcactacaccacccccatggtgctccagcaggcagccattcccatacagatcaatgtgggaaccactgtgaccatgacaggaaatgggactcggccccccccaactcccaatgcagaggcacctccccctggtcctgggcaggcctcatccgtggctccgtcttctaccaatgtcgagtcctcagctgagggggctcccccgccaggtccagctcccccgccagccaccagccacccgagggtcatccggatttcccaccagagtgtggaacccgtggtcatgatgcacatgaacattcaagattctggcacacagcctggtggtgttccgagtgctcccactggccccctgggaccccctggtcatggccaaaccctgggctccaccctcatccagctgccctccctgccccctgagttcatgcacgccgtcgcccaccagatcactcatcaggccatggtggcagctgttgcctccgcggccgcaggtaatgacctggaaggggaggcttgggaggtagggcacagtccatggtggcagctggctggcaagggcctggccctcagccctcttcggtctgtctcttctgccacccacaggacagcaggtgccaggcttcccaacagctccaacccgggtggtgattgcccggcccactcctccacaggctcggccttcccatcctggagggcccccagtctctgggacactgcagggcgccggtctgggtaccaatgcctcgttggcccagatggtgagcggccttgtggggcagcttcttatgcagccagtccttgtggctcaggggaccccaggtatggctccaccgccagcccctgccactgcttctgccagtgctggcaccaccaacacagctaccacagctggccccgctcctggggggcctgcccagcctccacccacccctcaaccctccatggctgatcttcagttctctcagcttctggggaacctgctagggcctgcagggccaggggctggagggtctggtgtggcttctcccaccatcactgtggcgatgcctggtgtccctgcctttctccaaggcatgactgacttcttgcaggcaacacagacagcccctgcagcagcgaaaaaaaaaaaaaaaaaaaaaaanaaaaaaaaaaaaaaagaaaaaagaaaacaaaaaaaaaaaaaaaaaaaaaaaaaaaaaagtactgatggtggtgaataaagaccaaagggtcctctctacctttgaaaactctcctggggtggaggagaccagggcaggatagacagacctctgcagtaagagagtggttgggaaacccagggtgttcccttggatctcagatctgagccatcgagggaagagtgggctgctaa

SEQ ID NO: 368538 - DNA, 1813 bp, Homo sapiens
  misc_feature (1580)..(1580): n is a, c, g, or t
acaagagcctcccggaccttcaaaggagggtgcagggcccccggagagtaagcagtgagccccgggtacggctggtgatggctcagcacatgatcagggatatacagaccttactatcccggatggagactctcccctaccttcagtgtcgaggagggccccaaccgcagcacagtcagccgcccccgcagccaccggctgtgaccccggagccagtagccttgagctctcaaacatcagaaccagttgaaagtgaagcacctccccgggagcccatggaggcagaagaagtggaggagcgtgccccagcccagaacccggagctcactcctggcccagccccagcgggcccaacacctgccccggaaacaaatgcacccaaccatccttcccctgcggagtatgtcgaggtgctccaggagctacagcggctggagagtcgcctccagcccttcttgcagcgctactacgaggttctgggtgctgctgccaccacggactacaataacaatcacgagggccgggaggaggatcagcggttgatcaacttggtaggggagagcctgcgactgctgggcaacacctttgttgcactgtctgacctgcgctgcaatctggcctgcacgcccccacgacacctgcatgtggtccggcctatgtctcactacaccacccccatggtgctccagcaggcagccattcccatacagatcaatgtgggaaccactgtgaccatgacaggaaatgggactcggccccccccaactcccaatgcagaggcacctccccctggtcctgggcaggcctcatccgtggctccgtcttctaccaatgtcgagtcctcagctgagggggctcccccgccaggtccagctcccccgccagccaccagccacccgagggtcatccggatttcccaccagagtgtggaacccgtggtcatgatgcacatgaacattcaagattctggcacacagcctggtggtgttccgagtgctcccactggccccctgggaccccctggtcatggccaaaccctgggacagcaggtgccaggcttcccaacagctccaacccgggtggtgattgcccggcccactcctccacaggctcggccttcccatcctggagggcccccagtctctgggacactgcagggcgccggtctgggtaccaatgcctcgttggcccagatggtgagcggccttgtggggcagcttcttatgcagccagtccttgtggctcaggggaccccaggtatggctccaccgccagcccctgccactgcttctgccagtgctggcaccaccaacacagctaccacagctggccccgctcctggggggcctgcccagcctccacccacccctcaaccctccatggctgatcttcagttctctcagcttctggggaacctgctagggcctgcagggccaggggctggagggtctggtgtggcttctcccaccatcactgtggcgatgcctggtgtccctgcctttctccaaggcatgactgacttcttgcaggcaacacagacagcccctgcagcagcgaaaaaaaaaaaaaaaaaaaaaaanaaaaaaaaaaaaaaagaaaaaagaaaacaaaaaaaaaaaaaaaaaaaaaaaaaaaaaagtactgatggtggtgaataaagaccaaagggtcctctctacctttgaaaactctcctggggtggaggagaccagggcaggatagacagacctctgcagtaagagagtggttgggaaacccagggtgttcccttggatctcagatctgagccatcgagggaagagtgggctgctaa

SEQ ID NO: 368539 - DNA, 2937 bp, Homo sapiens
  misc_feature (2749)..(2749): n is a, c, g, or t
acaagagcctcccggaccttcaaaggagggtgcagggcccccggagagtaagcagtgagccccgggtacggctggtgatggctcagcacatgatcagggatatacagaccttactatcccggatggagactctcccctaccttcagtgtcgaggagggccccaaccgcagcacagtcagccgcccccgcagccaccggctgtgaccccggagccagtagccttgagctctcaaacatcagaaccagttgaaagtgaagcacctccccgggagcccatggaggcagaagaagtggaggagcgtgccccagcccagaacccggagctcactcctggcccagccccagcgggcccaacacctgccccggaaacaaatgcacccaaccatccttcccctgcggagtatgtcgaggtgctccaggagctacagcggctggagagtcgcctccagcccttcttgcagcgctactacgaggttctgggtgctgctgccaccacggactacaataacaatcacgagggccgggaggaggatcagcggttgatcaacttggtaggggagagcctgcgactgctgggcaacacctttgttgcactgtctgacctgcgctgcaatctggcctgcacgcccccacgacacctgcatgtggtccggcctatgtctcactacaccacccccatggtgctccagcaggcagccattcccatacagatcaatgtgggaaccactgtgaccatgacaggaaatgggactcggccccccccaactcccaatgcagaggcacctccccctggtcctgggcaggcctcatccgtggctccgtcttctaccaatgtcgagtcctcagctgagggggctcccccgccaggtccagctcccccgccagccaccagccacccgagggtcatccggatttcccaccagagtgtggaacccgtggtcatgatgcacatgaacattcaagattctggcacacagcctggtggtgttccgagtgctcccactggccccctgggaccccctggtcatggccaaaccctgggctccaccctcatccagctgccctccctgccccctgagttcatgcacgccgtcgcccaccagatcactcatcaggccatggtggcagctgttgcctccgcggccgcaggacagcaggtgccaggcttcccaacagctccaacccgggtggtgattgcccggcccactcctccacaggctcggccttcccatcctggagggcccccagtctctgggacactgcagggcgccggtctgggtaccaatgcctcgttggcccagatggtgagcggccttgtggggcagcttcttatgcagccagtccttgtggctcaggggaccccaggtatggctccaccgccagcccctgccactgcttctgccagtgctggcaccaccaacacagctaccacagctggccccgctcctggggggcctgcccagcctccacccacccctcaaccctccatggctgatcttcagttctctcagcttctggggaacctgctagggcctgcagggccaggggctggagggtctggtgtggcttctcccaccatcactgtggcgatgcctggtgtccctgcctttctccaaggcatgactgacttcttgcaggcaacacagacagcccctccaccacccccacctcctccacccccaccacctgccccagagcagcagaccatgcccccaccaggctccccttctggtggcgcagggagtcctggaggcctgggtcttgagagcctgtcaccggagttttttacctcagtggtgcagggtgtgctcagctccctgctgggctccctgggggctcgggctggcagcagtgaaagtattgctgccttcatacaacgcctcagtggatccagcaacatctttgagcctggagctgatggggcccttggattctttggggccttgctttctcttctgtgccagaacttctctatggtggacgtagtgatgcttctccatgggcatttccagccactacaacggctccagccccagctgcgatccttcttccaccagcactacctgggtggtcaggagcccacacccagtaacatccggatggcaacccacacattgatcacggggctagaagagtatgtgcgggagagttttgtgagtaacccttctctattcctttcctctcctgggtctggtcaaggcagctgcctcctccactcccagtcttatgattcttgattttgggatctttgtgttatcttgtctctcagtccttggtgcaggttcagccaggtgtggacatcatccggacaaacctggaatttctccaagagcagtttaatagcattgctgcgcatgtgctgcattgcacaggtcaggggctggccaggcgggggcaagtggggcctgttgcatgtgcagggctgccacgtgccagcattccctccttgtattttgcccacagatagtggatttggggcccggttgctggagttgtgtaaccaaggcctgtttgaatgcctggccctaaacctgcactgcttggggggacagcagatggagcttgctgctgttatcaatggccgaattgtaagcaccacctagccccagatccttagccttttgtttcctgaggtttccattctctgcagttttcatttttcttttctaaactgacattctgtaacctggatctaatctatttctaaaggtggttgaggctgggggtcaacctgcttctgtccccaagntgaagactcgggggggaaccccgggggacgggcgcccatatgcggcgagcgctggggatgggagcaatgcgtagaccgaaccactctcgcgggggtggtgcccccccagagagaggcgaggcgagggcgacacaaagcgacctgcgagaggtccttcaccccggagcagtcgaacgctctcatggacc

SEQ ID NO: 368540 - DNA, 149 bp, Homo sapiens
ggagaaaaggaggtagggctccagggaatgaattggaggtgtggaggccttagtgttggcttctcccagaacaacttcccttaccctttccccagagtgacggctctgctgtggatgttcacatcaacatggaacaggccccgattcag

SEQ ID NO: 368541 - DNA, 655 bp, Homo sapiens
cagacagtgacgacggcgtactcggttttgtattgcacttgatgggccatgcgcttacattgatatcattagctggcagtcggctgacaatttcacagtgctcccactggccccctgggaccccctggtcatggccaaaccctgggacagcaggtgccaggcttcccaacagctccaacccgggtggtgattgcccggcccactcctccacaggctcggccttcccatcctggagggcccccagtctctgggacactgcagggcgccggtctgggtaccaatgcctcgttggcccagatggtgagcggccttgtggggcagcttcttatgcagccagtccttgtggctcaggggaccccaggtatggctccaccgccagcccctgccactgcttctgccagtgctggcaccaccaacacagctaccacagctggccccgctcctggggggcctgcccagcctccacccacccctcaaccctccatggctgatcttcagttctctcagcttctggggaacctgctagggcctgcagggccaggggctggagggtctggtgtggcttctcccaccatcactgtggcgatgcctggtgtccctgcctttctccaaggcatgactgacttcttgcaggtgagtggctggcttgccattc

SEQ ID NO: 368542 - DNA, 852 bp, Homo sapiens
ccgtcatgcctggaatcaaactatgtagagatggtgggagctcttgttattcagtctcccctcccctcgtttaatgaggaaactttttctgggattcagacttgctcttggttgttgcataaccatacaggacttgaccttagtctgtttgctagcagtcctgtattagttgctcagctgcctaatccccatgtgcttagatcccattttcctttaaggtgggtttcctcttgtggattacctagctctgaatcccggatggcttgaccccttctgcctttcgttttgaagagcacgttcaagcacattcactttagttttggctagtgccaaagagaattaggaaggcatttctgctgtaaaaaccacatcctggactcttaatttcccctctctccactagcatggagactcagtggagtggttgactcatggaaagggtgagccggatggtggcactggatctgacgttgatcctcttttccctcccaaccccctgtcccccagacgatgcagggtgagggcccccagctgcttctctcagaggctgtgagccgggcagctaaggcagccggagctcggcccctgacgagccccgagagcctgagccgggacctggaggcaccagaggttcaggagagctacaggcagcagctccggtctgatatacaaaaacgactgcaggaagaccccaactacagtccccagcgcttccccaatgcccagcgggcctttgctgatgatccttagctctttgctctatggcccttcctcatcaggggaccgtttcccccctcttccttcacagtatttaagaaataaaagtcggatttttctggctgcttctctcta

SEQ ID NO: 368543 - DNA, 3185 bp, Homo sapiens
acaagagcctcccggaccttcaaaggagggtgcagggcccccggagagtaagcagtgagccccgggtacggctggtgatggctcagcacatgatcagggatatacagaccttactatcccggatggagactctcccctaccttcagtgtcgaggagggccccaaccgcagcacagtcagccgcccccgcagccaccggctgtgaccccggagccagtagccttgagctctcaaacatcagaaccagttgaaagtgaagcacctccccgggagcccatggaggcagaagaagtggaggagcgtgccccagcccagaacccggagctcactcctggcccagccccagcgggcccaacacctgccccggaaacaaatgcacccaaccatccttcccctgcggagtatgtcgaggtgctccaggagctacagcggctggagagtcgcctccagcccttcttgcagcgctactacgaggttctgggtgctgctgccaccacggactacaataacaatcacgagggccgggaggaggatcagcggttgatcaacttggtaggggagagcctgcgactgctgggcaacacctttgttgcactgtctgacctgcgctgcaatctggcctgcacgcccccacgacacctgcatgtggtccggcctatgtctcactacaccacccccatggtgctccagcaggcagccattcccatacagatcaatgtgggaaccactgtgaccatgacaggaaatgggactcggccccccccaactcccaatgcagaggcacctccccctggtcctgggcaggcctcatccgtggctccgtcttctaccaatgtcgagtcctcagctgagggggctcccccgccaggtccagctcccccgccagccaccagccacccgagggtcatccggatttcccaccagagtgtggaacccgtggtcatgatgcacatgaacattcaagattctggcacacagcctggtggtgttccgagtgctcccactggccccctgggaccccctggtcatggccaaaccctgggctccaccctcatccagctgccctccctgccccctgagttcatgcacgccgtcgcccaccagatcactcatcaggccatggtggcagctgttgcctccgcggccgcaggacagcaggtgccaggcttcccaacagctccaacccgggtggtgattgcccggcccactcctccacaggctcggccttcccatcctggagggcccccagtctctgggacactgcagggcgccggtctgggtaccaatgcctcgttggcccagatggtgagcggccttgtggggcagcttcttatgcagccagtccttgtggctcaggggaccccaggtatggctccaccgccagcccctgccactgcttctgccagtgctggcaccaccaacacagctaccacagctggccccgctcctggggggcctgcccagcctccacccacccctcaaccctccatggctgatcttcagttctctcagcttctggggaacctgctagggcctgcagggccaggggctggagggtctggtgtggcttctcccaccatcactgtggcgatgcctggtgtccctgcctttctccaaggcatgactgacttcttgcaggcaacacagacagcccctccaccacccccacctcctccacccccaccacctgccccagagcagcagaccatgcccccaccaggctccccttctggtggcgcagggagtcctggaggcctgggtcttgagagcctgtcaccggagttttttacctcagtggtgcagggtgtgctcagctccctgctgggctccctgggggctcgggctggcagcagtgaaagtattgctgccttcatacaacgcctcagtggatccagcaacatctttgagcctggagctgatggggcccttggattctttggggccttgctttctcttctgtgccagaacttctctatggtggacgtagtgatgcttctccatgggcatttccagccactacaacggctccagccccagctgcgatccttcttccaccagcactacctgggtggtcaggagcccacacccagtaacatccggatggcaacccacacattgatcacggggctagaagagtatgtgcgggagagtttttccttggtgcaggttcagccaggtgtggacatcatccggacaaacctggaatttctccaagagcagtttaatagcattgctgcgcatgtgctgcattgcacagatagtggatttggggcccggttgctggagttgtgtaaccaaggcctgtttgaatgcctggccctaaacctgcactgcttggggggacagcagatggagcttgctgctgttatcaatggccgaattcgtcgtatgtctcgtggggtgaatccctccttggtgagctggctgaccactatgatgggactgaggcttcaggtggtactggagcacatgcctgtaggccctgatgccattctcagatacgttcgcagggttggtgatcccccccagccacttcctgaggagccaatggaagttcagggagcagaaagagcttcccctgagcctcagcgggagaatgcttccccagcccctggaacaacagcagaagaggccatgtcccgaggtccacctcctgctcctgaggggggctcccgggatgaacaggatggagcttcagctgagacagaaccttgggcagctgcagtccccccagaatgggtccctattatccagcaggacattcagagccagcggaaggtgaaaccgcagccccctctgagtgatgcctacctcagtggtatgcctgccaagagacgcaagacgatgcagggtgagggcccccagctgcttctctcagaggctgtgagccgggcagctaaggcagccggagctcggcccctgacgagccccgagagcctgagccgggacctggaggcaccagaggttcaggagagctacaggcagcagctccggtctgatatacaaaaacgactgcaggaagaccccaactacagtccccagcgcttccccaatgcccagcgggcctttgctgatgatccttagctctttgctctatggcccttcctcatcaggggaccgtttcccccctcttccttcacagtatttaagaaataaaagtcggatttttctggctgcttctctcta

SEQ ID NO: 368544 - DNA, 3077 bp, Homo sapiens
acaagagcctcccggaccttcaaaggagggtgcagggcccccggagagtaagcagtgagccccgggtacggctggtgatggctcagcacatgatcagggatatacagaccttactatcccggatggagactctcccctaccttcagtgtcgaggagggccccaaccgcagcacagtcagccgcccccgcagccaccggctgtgaccccggagccagtagccttgagctctcaaacatcagaaccagttgaaagtgaagcacctccccgggagcccatggaggcagaagaagtggaggagcgtgccccagcccagaacccggagctcactcctggcccagccccagcgggcccaacacctgccccggaaacaaatgcacccaaccatccttcccctgcggagtatgtcgaggtgctccaggagctacagcggctggagagtcgcctccagcccttcttgcagcgctactacgaggttctgggtgctgctgccaccacggactacaataacaatcacgagggccgggaggaggatcagcggttgatcaacttggtaggggagagcctgcgactgctgggcaacacctttgttgcactgtctgacctgcgctgcaatctggcctgcacgcccccacgacacctgcatgtggtccggcctatgtctcactacaccacccccatggtgctccagcaggcagccattcccatacagatcaatgtgggaaccactgtgaccatgacaggaaatgggactcggccccccccaactcccaatgcagaggcacctccccctggtcctgggcaggcctcatccgtggctccgtcttctaccaatgtcgagtcctcagctgagggggctcccccgccaggtccagctcccccgccagccaccagccacccgagggtcatccggatttcccaccagagtgtggaacccgtggtcatgatgcacatgaacattcaagattctggcacacagcctggtggtgttccgagtgctcccactggccccctgggaccccctggtcatggccaaaccctgggacagcaggtgccaggcttcccaacagctccaacccgggtggtgattgcccggcccactcctccacaggctcggccttcccatcctggagggcccccagtctctgggacactgcagggcgccggtctgggtaccaatgcctcgttggcccagatggtgagcggccttgtggggcagcttcttatgcagccagtccttgtggctcaggggaccccaggtatggctccaccgccagcccctgccactgcttctgccagtgctggcaccaccaacacagctaccacagctggccccgctcctggggggcctgcccagcctccacccacccctcaaccctccatggctgatcttcagttctctcagcttctggggaacctgctagggcctgcagggccaggggctggagggtctggtgtggcttctcccaccatcactgtggcgatgcctggtgtccctgcctttctccaaggcatgactgacttcttgcaggcaacacagacagcccctccaccacccccacctcctccacccccaccacctgccccagagcagcagaccatgcccccaccaggctccccttctggtggcgcagggagtcctggaggcctgggtcttgagagcctgtcaccggagttttttacctcagtggtgcagggtgtgctcagctccctgctgggctccctgggggctcgggctggcagcagtgaaagtattgctgccttcatacaacgcctcagtggatccagcaacatctttgagcctggagctgatggggcccttggattctttggggccttgctttctcttctgtgccagaacttctctatggtggacgtagtgatgcttctccatgggcatttccagccactacaacggctccagccccagctgcgatccttcttccaccagcactacctgggtggtcaggagcccacacccagtaacatccggatggcaacccacacattgatcacggggctagaagagtatgtgcgggagagtttttccttggtgcaggttcagccaggtgtggacatcatccggacaaacctggaatttctccaagagcagtttaatagcattgctgcgcatgtgctgcattgcacagatagtggatttggggcccggttgctggagttgtgtaaccaaggcctgtttgaatgcctggccctaaacctgcactgcttggggggacagcagatggagcttgctgctgttatcaatggccgaattcgtcgtatgtctcgtggggtgaatccctccttggtgagctggctgaccactatgatgggactgaggcttcaggtggtactggagcacatgcctgtaggccctgatgccattctcagatacgttcgcagggttggtgatcccccccagccacttcctgaggagccaatggaagttcagggagcagaaagagcttcccctgagcctcagcgggagaatgcttccccagcccctggaacaacagcagaagaggccatgtcccgaggtccacctcctgctcctgaggggggctcccgggatgaacaggatggagcttcagctgagacagaaccttgggcagctgcagtccccccagaatgggtccctattatccagcaggacattcagagccagcggaaggtgaaaccgcagccccctctgagtgatgcctacctcagtggtatgcctgccaagagacgcaagacgatgcagggtgagggcccccagctgcttctctcagaggctgtgagccgggcagctaaggcagccggagctcggcccctgacgagccccgagagcctgagccgggacctggaggcaccagaggttcaggagagctacaggcagcagctccggtctgatatacaaaaacgactgcaggaagaccccaactacagtccccagcgcttccccaatgcccagcgggcctttgctgatgatccttagctctttgctctatggcccttcctcatcaggggaccgtttcccccctcttccttcacagtatttaagaaataaaagtcggatttttctggctgcttctctcta

SEQ ID NO: 368545 - DNA, 3436 bp, Homo sapiens
acaagagcctcccggaccttcaaaggagggtgcagggcccccggagagtaagcagtgagccccgggtacggctggtgatggctcagcacatgatcagggatatacagaccttactatcccggatggagactctcccctaccttcagtgtcgaggagggccccaaccgcagcacagtcagccgcccccgcagccaccggctgtgaccccggagccagtagccttgagctctcaaacatcagaaccagttgaaagtgaagcacctccccgggagcccatggaggcagaagaagtggaggagcgtgccccagcccagaacccggagctcactcctggcccagccccagcgggcccaacacctgccccggaaacaaatgcacccaaccatccttcccctgcggagtatgtcgaggtgctccaggagctacagcggctggagagtcgcctccagcccttcttgcagcgctactacgaggttctgggtgctgctgccaccacggactacaataacaatcacgagggccgggaggaggatcagcggttgatcaacttggtaggggagagcctgcgactgctgggcaacacctttgttgcactgtctgacctgcgctgcaatctggcctgcacgcccccacgacacctgcatgtggtccggcctatgtctcactacaccacccccatggtgctccagcaggcagccattcccatacagatcaatgtgggaaccactgtgaccatgacaggaaatgggactcggccccccccaactcccaatgcagaggcacctccccctggtcctgggcaggcctcatccgtggctccgtcttctaccaatgtcgagtcctcagctgagggggctcccccgccaggtccagctcccccgccagccaccagccacccgagggtcatccggatttcccaccagagtgtggaacccgtggtcatgatgcacatgaacattcaagggccactgtctctgtctccctgcccagattctggcacacagcctggtggtgttccgagtgctcccactggccccctgggaccccctggtcatggccaaaccctgggggtaagagtgagggcatcagggcaggctgagctctgggtagagaaagggaagggctgagtgggtgggttgaaggggtccaggttcaaggttacatcagacccgccccccaggctccaccctcatccagctgccctccctgccccctgagttcatgcacgccgtcgcccaccagatcactcatcaggccatggtggcagctgttgcctccgcggccgcaggtaatgacctggaaggggaggcttgggaggtagggcacagtccatggtggcagctggctggcaagggcctggccctcagccctcttcggtctgtctcttctgccacccacaggacagcaggtgccaggcttcccaacagctccaacccgggtggtgattgcccggcccactcctccacaggctcggccttcccatcctggagggcccccagtctctgggacactgcagggcgccggtctgggtaccaatgcctcgttggcccagatggtgagcggccttgtggggcagcttcttatgcagccagtccttgtggctcaggggaccccaggtatggctccaccgccagcccctgccactgcttctgccagtgctggcaccaccaacacagctaccacagctggccccgctcctggggggcctgcccagcctccacccacccctcaaccctccatggctgatcttcagttctctcagcttctggggaacctgctagggcctgcagggccaggggctggagggtctggtgtggcttctcccaccatcactgtggcgatgcctggtgtccctgcctttctccaaggcatgactgacttcttgcaggcaacacagacagcccctccaccacccccacctcctccacccccaccacctgccccagagcagcagaccatgcccccaccaggctccccttctggtggcgcagggagtcctggaggcctgggtcttgagagcctgtcaccggagttttttacctcagtggtgcagggtgtgctcagctccctgctgggctccctgggggctcgggctggcagcagtgaaagtattgctgccttcatacaacgcctcagtggatccagcaacatctttgagcctggagctgatggggcccttggattctttggggccttgctttctcttctgtgccagaacttctctatggtggacgtagtgatgcttctccatgggcatttccagccactacaacggctccagccccagctgcgatccttcttccaccagcactacctgggtggtcaggagcccacacccagtaacatccggatggcaacccacacattgatcacggggctagaagagtatgtgcgggagagtttttccttggtgcaggttcagccaggtgtggacatcatccggacaaacctggaatttctccaagagcagtttaatagcattgctgcgcatgtgctgcattgcacagatagtggatttggggcccggttgctggagttgtgtaaccaaggcctgtttgaatgcctggccctaaacctgcactgcttggggggacagcagatggagcttgctgctgttatcaatggccgaattcgtcgtatgtctcgtggggtgaatccctccttggtgagctggctgaccactatgatgggactgaggcttcaggtggtactggagcacatgcctgtaggccctgatgccattctcagatacgttcgcagggttggtgatcccccccagccacttcctgaggagccaatggaagttcagggagcagaaagagcttcccctgagcctcagcgggagaatgcttccccagcccctggaacaacagcagaagaggccatgtcccgaggtccacctcctgctcctgaggggggctcccgggatgaacaggatggagcttcagctgagacagaaccttgggcagctgcagtccccccagaatgggtccctattatccagcaggacattcagagccagcggaaggtgaaaccgcagccccctctgagtgatgcctacctcagtggtatgcctgccaagagacgcaagacgatgcagggtgagggcccccagctgcttctctcagaggctgtgagccgggcagctaaggcagccggagctcggcccctgacgagccccgagagcctgagccgggacctggaggcaccagaggttcaggagagctacaggcagcagctccggtctgatatacaaaaacgactgcaggaagaccccaactacagtccccagcgcttccccaatgcccagcgggcctttgctgatgatccttagctctttgctctatggcccttcctcatcaggggaccgtttcccccctcttccttcacagtatttaagaaataaaagtcggatttttctggctgcttctctcta

SEQ ID NO: 368546 - DNA, 3038 bp, Homo sapiens
acaagagcctcccggaccttcaaaggagggtgcagggcccccggagagtaagcagtgagccccgggtacggctggtgatggctcagcacatgatcagggatatacagaccttactatcccggatggagactctcccctaccttcagtgtcgaggagggccccaaccgcagcacagtcagccgcccccgcagccaccggctgtgaccccggagccagtagccttgagctctcaaacatcagaaccagttgaaagtgaagcacctccccgggagcccatggaggcagaagaagtggaggagcgtgccccagcccagaacccggagctcactcctggcccagccccagcgggcccaacacctgccccggaaacaaatgcacccaaccatccttcccctgcggagtatgtcgaggtgctccaggagctacagcggctggagagtcgcctccagcccttcttgcagcgctactacgaggttctgggtgctgctgccaccacggactacaataacaatcacgagggccgggaggaggatcagcggttgatcaacttggtaggggagagcctgcgactgctgggcaacacctttgttgcactgtctgacctgcgctgcaatctggcctgcacgcccccacgacacctgcatgtggtccggcctatgtctcactacaccacccccatggtgctccagcaggcagccattcccatacagatcaatgtgggaaccactgtgaccatgacaggaaatgggactcggccccccccaactcccaatgcagaggcacctccccctggtcctgggcaggcctcatccgtggctccgtcttctaccaatgtcgagtcctcagctgagggggctcccccgccaggtccagctcccccgccagccaccagccacccgagggtcatccggatttcccaccagagtgtggaacccgtggtcatgatgcacatgaacattcaagattctggcacacagcctggtggtgttccgagtgctcccactggccccctgggaccccctggtcatggccaaaccctgggctccaccctcatccagctgccctccctgccccctgagttcatgcacgccgtcgcccaccagatcactcatcaggccatggtggcagctgttgcctccgcggccgcaggacagcaggtgccaggcttcccaacagctccaacccgggtggtgattgcccggcccactcctccacaggctcggccttcccatcctggagggcccccagtctctgggacactgcagggcgccggtctgggtaccaatgcctcgttggcccagatggtgagcggccttgtggggcagcttcttatgcagccagtccttgtggctcaggggaccccaggtatggctccaccgccagcccctgccactgcttctgccagtgctggcaccaccaacacagctaccacagctggccccgctcctggggggcctgcccagcctccacccacccctcaaccctccatggctgatcttcagttctctcagcttctggggaacctgctagggcctgcagggccaggggctggagggtctggtgtggcttctcccaccatcactgtggcgatgcctggtgtccctgcctttctccaaggcatgactgacttcttgcaggcaacacagacagcccctccaccacccccacctcctccacccccaccacctgccccagagcagcagaccatgcccccaccaggctccccttctggtggcgcagggagtcctggaggcctgggtcttgagagcctgtcaccggagttttttacctcagtggtgcagggtgtgctcagctccctgctgggctccctgggggctcgggctggcagcagtgaaagtattgctgccttcatacaacgcctcagtggatccagcaacatctttgagcctggagctgatggggcccttggattctttggggccttgctttctcttctgtgccagaacttctctatggtggacgtagtgatgcttctccatgggcatttccagccactacaacggctccagccccagctgcgatccttcttccaccagcactacctgggtggtcaggagcccacacccagtaacatccggatggcaacccacacattgatcacggggctagaagagtatgtgcgggagagtttttccttggtgcaggttcagccaggtgtggacatcatccggacaaacctggaatttctccaagagcagtttaatagcattgctgcgcatgtgctgcattgcacagatagtggatttggggcccggttgctggagttgtgtaaccaaggcctgtttgaatgcctggccctaaacctgcactgcttggggggacagcagatggagcttgctgctgttatcaatggccgaattcgtcgtatgtctcgtggggtgaatccctccttggtgagctggctgaccactatgatgggactgaggcttcaggtggtactggagcacatgcctgtaggccctgatgccattctcagatacgttcgcagggttggtgatcccccccagccacttcctgaggagccaatggaagttcagggagcagaaagagcttcccctgagcctcagcgggagaatgcttccccagcccctggaacaacagcagaagaggccatgtcccgaggtccacctcctgctcctgaggggggctcccgggatgaacaggatggagcttcagctgagacagaaccttgggcagctgcagtccccccagaatgggtccctattatccagcaggacattcagagccagcggaaggtgaaaccgcagccccctctgagtgatgcctacctcagtggtatgcctgccaagagacgcaagctccggtctgatatacaaaaacgactgcaggaagaccccaactacagtccccagcgcttccccaatgcccagcgggcctttgctgatgatccttagctctttgctctatggcccttcctcatcaggggaccgtttcccccctcttccttcacagtatttaagaaataaaagtcggatttttctggctgcttctctcta

SEQ ID NO: 368547 - DNA, 3458 bp, Homo sapiens
acaagagcctcccggaccttcaaaggagggtgcagggcccccggagagtaagcagtgagccccgggtacggctggtgatggctcagcacatgatcagggatatacagaccttactatcccggatggagactctcccctaccttcagtgtcgaggagggccccaaccgcagcacagtcagccgcccccgcagccaccggctgtgaccccggagccagtagccttgagctctcaaacatcagaaccagttgaaagtgaagcacctccccgggagcccatggaggcagaagaagtggaggagcgtgccccagcccagaacccggagctcactcctggcccagccccagcgggcccaacacctgccccggaaacaaatgcacccaaccatccttcccctgcggagtatgtcgaggtgctccaggagctacagcggctggagagtcgcctccagcccttcttgcagcgctactacgaggttctgggtgctgctgccaccacggactacaataacaatcacgagggccgggaggaggatcagcggttgatcaacttggtaggggagagcctgcgactgctgggcaacacctttgttgcactgtctgacctgcgctgcaatctggcctgcacgcccccacgacacctgcatgtggtccggcctatgtctcactacaccacccccatggtgctccagcaggcagccattcccatacagatcaatgtgggaaccactgtgaccatgacaggaaatgggactcggccccccccaactcccaatgcagaggcacctccccctggtcctgggcaggcctcatccgtggctccgtcttctaccaatgtcgagtcctcagctgagggggctcccccgccaggtccagctcccccgccagccaccagccacccgagggtcatccggatttcccaccagagtgtggaacccgtggtcatgatgcacatgaacattcaagattctggcacacagcctggtggtgttccgagtgctcccactggccccctgggaccccctggtcatggccaaaccctgggctccaccctcatccagctgccctccctgccccctgagttcatgcacgccgtcgcccaccagatcactcatcaggccatggtggcagctgttgcctccgcggccgcaggacagcaggtgccaggcttcccaacagctccaacccgggtggtgattgcccggcccactcctccacaggctcggccttcccatcctggagggcccccagtctctgggacactgcagggcgccggtctgggtaccaatgcctcgttggcccagatggtgagcggccttgtggggcagcttcttatgcagccagtccttgtggctcaggggaccccaggtatggctccaccgccagcccctgccactgcttctgccagtgctggcaccaccaacacagctaccacagctggccccgctcctggggggcctgcccagcctccacccacccctcaaccctccatggctgatcttcagttctctcagcttctggggaacctgctagggcctgcagggccaggggctggagggtctggtgtggcttctcccaccatcactgtggcgatgcctggtgtccctgcctttctccaaggcatgactgacttcttgcaggcaacacagacagcccctccaccacccccacctcctccacccccaccacctgccccagagcagcagaccatgcccccaccaggctccccttctggtggcgcagggagtcctggaggcctgggtcttgagagcctgtcaccggagttttttacctcagtggtgcagggtgtgctcagctccctgctgggctccctgggggctcgggctggcagcagtgaaagtattgctgccttcatacaacgcctcagtggatccagcaacatctttgagcctggagctgatggggcccttggattctttggggccttgctttctcttctgtgccagaacttctctatggtggacgtagtgatgcttctccatgggcatttccagccactacaacggctccagccccagctgcgatccttcttccaccagcactacctgggtggtcaggagcccacacccagtaacatccggatggcaacccacacattgatcacggggctagaagagtatgtgcgggagagtttttccttggtgcaggttcagccaggtgtggacatcatccggacaaacctggaatttctccaagagcagtttaatagcattgctgcgcatgtgctgcattgcacagatagtggatttggggcccggttgctggagttgtgtaaccaaggcctgtttgaatgcctggccctaaacctgcactgcttggggggacagcagatggagcttgctgctgttatcaatggccgaattcgtcgtatgtctcgtggggtgaatccctccttggtgagctggctgaccactatgatgggactgaggcttcaggtggtactggagcacatgcctgtaggccctgatgccattctcagatacgttcgcagggttggtgatcccccccagccacttcctgaggagccaatggaagttcagggagcagaaagagcttcccctgagcctcagcgggagaatgcttccccagcccctggaacaacagcagaagaggccatgtcccgaggtccacctcctgctcctgaggggggctcccgggatgaacaggatggagcttcagctgagacagaaccttgggcagctgcagtccccccagaatgggtccctattatccagcaggacattcagagccagcggaaggtgaaaccgcagccccctctgagtgatgcctacctcagtggtatgcctgccaagagacgcaagacgatgcagggtgagggcccccagctgcttctctcagaggctgtgagccgggcagctaaggcagccggagctcggcccctgacgagccccgagagcctgagccgggacctggaggcaccagaggttcaggagagctacaggcagcaggtgccaccttgaagcagaatagggatggtctagtgggaggggttgggctagggtccctcttccctggatcccttcagcgatgaactggtcagcctggtgctaccatttgttttcccctttggcatctgggaaggcttgacagtgccaccccgggctatttgacagtgtgcttggggggggaaatgttagcttctgagggatggccttgtgtgcttgctgggatcatagggacttggccagcgtttctccaacctgcttactttttctctttagctccggtctgatatacaaaaacgactgcaggaagaccccaactacagtccccagcgcttccccaatgcccagcgggcctttgctgatgatccttagctctttgctctatggcccttcctcatcaggggaccgtttcccccctcttccttcacagtatttaagaaataaaagtcggatttttctggctgcttctctcta

SEQ ID NO: 368548 - DNA, 3304 bp, Homo sapiens
  misc_feature (3071)..(3071): n is a, c, g, or t
acaagagcctcccggaccttcaaaggagggtgcagggcccccggagagtaagcagtgagccccgggtacggctggtgatggctcagcacatgatcagggatatacagaccttactatcccggatggagactctcccctaccttcagtgtcgaggagggccccaaccgcagcacagtcagccgcccccgcagccaccggctgtgaccccggagccagtagccttgagctctcaaacatcagaaccagttgaaagtgaagcacctccccgggagcccatggaggcagaagaagtggaggagcgtgccccagcccagaacccggagctcactcctggcccagccccagcgggcccaacacctgccccggaaacaaatgcacccaaccatccttcccctgcggagtatgtcgaggtgctccaggagctacagcggctggagagtcgcctccagcccttcttgcagcgctactacgaggttctgggtgctgctgccaccacggactacaataacaatcacgagggccgggaggaggatcagcggttgatcaacttggtaggggagagcctgcgactgctgggcaacacctttgttgcactgtctgacctgcgctgcaatctggcctgcacgcccccacgacacctgcatgtggtccggcctatgtctcactacaccacccccatggtgctccagcaggcagccattcccatacagatcaatgtgggaaccactgtgaccatgacaggaaatgggactcggccccccccaactcccaatgcagaggcacctccccctggtcctgggcaggcctcatccgtggctccgtcttctaccaatgtcgagtcctcagctgagggggctcccccgccaggtccagctcccccgccagccaccagccacccgagggtcatccggatttcccaccagagtgtggaacccgtggtcatgatgcacatgaacattcaagattctggcacacagcctggtggtgttccgagtgctcccactggccccctgggaccccctggtcatggccaaaccctgggctccaccctcatccagctgccctccctgccccctgagttcatgcacgccgtcgcccaccagatcactcatcaggccatggtggcagctgttgcctccgcggccgcaggacagcaggtgccaggcttcccaacagctccaacccgggtggtgattgcccggcccactcctccacaggctcggccttcccatcctggagggcccccagtctctgggacactgcagggcgccggtctgggtaccaatgcctcgttggcccagatggtgagcggccttgtggggcagcttcttatgcagccagtccttgtggctcaggggaccccaggtatggctccaccgccagcccctgccactgcttctgccagtgctggcaccaccaacacagctaccacagctggccccgctcctggggggcctgcccagcctccacccacccctcaaccctccatggctgatcttcagttctctcagcttctggggaacctgctagggcctgcagggccaggggctggagggtctggtgtggcttctcccaccatcactgtggcgatgcctggtgtccctgcctttctccaaggcatgactgacttcttgcaggcaacacagacagcccctccaccacccccacctcctccacccccaccacctgccccagagcagcagaccatgcccccaccaggctccccttctggtggcgcagggagtcctggaggcctgggtcttgagagcctgtcaccggagttttttacctcagtggtgcagggtgtgctcagctccctgctgggctccctgggggctcgggctggcagcagtgaaagtattgctgccttcatacaacgcctcagtggatccagcaacatctttgagcctggagctgatggggcccttggattctttggggccttgctttctcttctgtgccagaacttctctatggtggacgtagtgatgcttctccatgggcatttccagccactacaacggctccagccccagctgcgatccttcttccaccagcactacctgggtggtcaggagcccacacccagtaacatccggatggcaacccacacattgatcacggggctagaagagtatgtgcgggagagtttttccttggtgcaggttcagccaggtgtggacatcatccggacaaacctggaatttctccaagagcagtttaatagcattgctgcgcatgtgctgcattgcacagatagtggatttggggcccggttgctggagttgtgtaaccaaggcctgtttgaatgcctggccctaaacctgcactgcttggggggacagcagatggagcttgctgctgttatcaatggccgaattcgtcgtatgtctcgtggggtgaatccctccttggtgagctggctgaccactatgatgggactgaggcttcaggtggtactggagcacatgcctgtaggccctgatgccattctcagatacgttcgcagggttggtgatcccccccagccacttcctgaggagccaatggaagttcagggagcagaaagagcttcccctgagcctcagcgggagaatgcttccccagcccctggaacaacagcagaagaggccatgtcccgaggtccacctcctgctcctgaggggggctcccgggatgaacaggatggagcttcagctgagacagaaccttgggcagctgcagtccccccagaatgggtccctattatccagcaggacattcagagccagcggaaggtgaaaccgcagccccctctgagtgatgcctacctcagtggtatgcctgccaagagacgcaagctccggtctgatatacaaaaacgactgcaggaagaccccaactacagtccccagcgcttccccaatgcccagcgggcctttgctgatgatccttagctctttgctctatggcccttcctcatcaggggaccgtttcccccctcttccttcacagtatttaagaaataaaagtcggatttttctggctgcttctctctagcagcagcgaaaaaaaaaaaaaaaaaaaaaaanaaaaaaaaaaaaaaagaaaaaagaaaacaaaaaaaaaaaaaaaaaaaaaaaaaaaaaagtactgatggtggtgaataaagaccaaagggtcctctctacctttgaaaactctcctggggtggaggagaccagggcaggatagacagacctctgcagtaagagagtggttgggaaacccagggtgttcccttggatctcagatctgagccatcgagggaagagtgggctgctaa

SEQ ID NO: 368549 - DNA, 3392 bp, Homo sapiens
acaagagcctcccggaccttcaaaggagggtgcagggcccccggagagtaagcagtgagccccgggtacggctggtgatggctcagcacatgatcagggatatacagaccttactatcccggatggagactctcccctaccttcagtgtcgaggagggccccaaccgcagcacagtcagccgcccccgcagccaccggctgtgaccccggagccagtagccttgagctctcaaacatcagaaccagttgaaagtgaagcacctccccgggagcccatggaggcagaagaagtggaggagcgtgccccagcccagaacccggagctcactcctggcccagccccagcgggcccaacacctgccccggaaacaaatgcacccaaccatccttcccctgcggagtatgtcgaggtgctccaggagctacagcggctggagagtcgcctccagcccttcttgcagcgctactacgaggttctgggtgctgctgccaccacggactacaataacaatcacgagggccgggaggaggatcagcggttgatcaacttggtaggggagagcctgcgactgctgggcaacacctttgttgcactgtctgacctgcgctgcaatctggcctgcacgcccccacgacacctgcatgtggtccggcctatgtctcactacaccacccccatggtgctccagcaggcagccattcccatacagatcaatgtgggaaccactgtgaccatgacaggaaatgggactcggccccccccaactcccaatgcagaggcacctccccctggtcctgggcaggcctcatccgtggctccgtcttctaccaatgtcgagtcctcagctgagggggctcccccgccaggtccagctcccccgccagccaccagccacccgagggtcatccggatttcccaccagagtgtggaacccgtggtcatgatgcacatgaacattcaagattctggcacacagcctggtggtgttccgagtgctcccactggccccctgggaccccctggtcatggccaaaccctgggctccaccctcatccagctgccctccctgccccctgagttcatgcacgccgtcgcccaccagatcactcatcaggccatggtggcagctgttgcctccgcggccgcaggacagcaggtgccaggcttcccaacagctccaacccgggtggtgattgcccggcccactcctccacaggctcggccttcccatcctggagggcccccagtctctgggacactgcagggcgccggtctgggtaccaatgcctcgttggcccagatggtgagcggccttgtggggcagcttcttatgcagccagtccttgtggctcaggggaccccaggtatggctccaccgccagcccctgccactgcttctgccagtgctggcaccaccaacacagctaccacagctggccccgctcctggggggcctgcccagcctccacccacccctcaaccctccatggctgatcttcagttctctcagcttctggggaacctgctagggcctgcagggccaggggctggagggtctggtgtggcttctcccaccatcactgtggcgatgcctggtgtccctgcctttctccaaggcatgactgacttcttgcaggcaacacagacagcccctccaccacccccacctcctccacccccaccacctgccccagagcagcagaccatgcccccaccaggctccccttctggtggcgcagggagtcctggaggcctgggtcttgagagcctgtcaccggagttttttacctcagtggtgcagggtgtgctcagctccctgctgggctccctgggggctcgggctggcagcagtgaaagtattgctgccttcatacaacgcctcagtggatccagcaacatctttgagcctggagctgatggggcccttggattctttggggccttgctttctcttctgtgccagaacttctctatggtggacgtagtgatgcttctccatgggcatttccagccactacaacggctccagccccagctgcgatccttcttccaccagcactacctgggtggtcaggagcccacacccagtaacatccggatggcaacccacacattgatcacggggctagaagagtatgtgcgggagagttttgtgagtaacccttctctattcctttcctctcctgggtctggtcaaggcagctgcctcctccactcccagtcttatgattcttgattttgggatctttgtgttatcttgtctctcagtccttggtgcaggttcagccaggtgtggacatcatccggacaaacctggaatttctccaagagcagtttaatagcattgctgcgcatgtgctgcattgcacaggtcaggggctggccaggcgggggcaagtggggcctgttgcatgtgcagggctgccacgtgccagcattccctccttgtattttgcccacagatagtggatttggggcccggttgctggagttgtgtaaccaaggcctgtttgaatgcctggccctaaacctgcactgcttggggggacagcagatggagcttgctgctgttatcaatggccgaattcgtcgtatgtctcgtggggtgaatccctccttggtgagctggctgaccactatgatgggactgaggcttcaggtggtactggagcacatgcctgtaggccctgatgccattctcagatacgttcgcagggttggtgatcccccccagccacttcctgaggagccaatggaagttcagggagcagaaagagcttcccctgagcctcagcgggagaatgcttccccagcccctggaacaacagcagaagaggccatgtcccgaggtccacctcctgctcctgaggggggctcccgggatgaacaggatggagcttcagctgagacagaaccttgggcagctgcagtccccccagaatgggtccctattatccagcaggacattcagagccagcggaaggtgaaaccgcagccccctctgagtgatgcctacctcagtggtatgcctgccaagagacgcaagacgatgcagggtgagggcccccagctgcttctctcagaggctgtgagccgggcagctaaggcagccggagctcggcccctgacgagccccgagagcctgagccgggacctggaggcaccagaggttcaggagagctacaggcagcagctccggtctgatatacaaaaacgactgcaggaagaccccaactacagtccccagcgcttccccaatgcccagcgggcctttgctgatgatccttagctctttgctctatggcccttcctcatcaggggaccgtttcccccctcttccttcacagtatttaagaaataaaagtcggatttttctggctgcttctctcta

SEQ ID NO: 368550 - DNA, 3116 bp, Homo sapiens
acaagagcctcccggaccttcaaaggagggtgcagggcccccggagagtaagcagtgagccccgggtacggctggtgatggctcagcacatgatcagggatatacagaccttactatcccggatggagactctcccctaccttcagtgtcgaggagggccccaaccgcagcacagtcagccgcccccgcagccaccggctgtgaccccggagccagtagccttgagctctcaaacatcagaaccagttgaaagtgaagcacctccccgggagcccatggaggcagaagaagtggaggagcgtgccccagcccagaacccggagctcactcctggcccagccccagcgggcccaacacctgccccggaaacaaatgcacccaaccatccttcccctgcggagtatgtcgaggtgctccaggagctacagcggctggagagtcgcctccagcccttcttgcagcgctactacgaggttctgggtgctgctgccaccacggactacaataacaatcacgagggccgggaggaggatcagcggttgatcaacttggtaggggagagcctgcgactgctgggcaacacctttgttgcactgtctgacctgcgctgcaatctggcctgcacgcccccacgacacctgcatgtggtccggcctatgtctcactacaccacccccatggtgctccagcaggcagccattcccatacagatcaatgtgggaaccactgtgaccatgacaggaaatgggactcggccccccccaactcccaatgcagaggcacctccccctggtcctgggcaggcctcatccgtggctccgtcttctaccaatgtcgagtcctcagctgagggggctcccccgccaggtccagctcccccgccagccaccagccacccgagggtcatccggatttcccaccagagtgtggaacccgtggtcatgatgcacatgaacattcaagattctggcacacagcctggtggtgttccgagtgctcccactggccccctgggaccccctggtcatggccaaaccctgggctccaccctcatccagctgccctccctgccccctgagttcatgcacgccgtcgcccaccagatcactcatcaggccatggtggcagctgttgcctccgcggccgcaggacagcaggtgccaggcttcccaacagctccaacccgggtggtgattgcccggcccactcctccacaggctcggccttcccatcctggagggcccccagtctctgggacactgcagggcgccggtctgggtaccaatgcctcgttggcccagatggtgagcggccttgtggggcagcttcttatgcagccagtccttgtggctcaggggaccccaggtatggctccaccgccagcccctgccactgcttctgccagtgctggcaccaccaacacagctaccacagctggccccgctcctggggggcctgcccagcctccacccacccctcaaccctccatggctgatcttcagttctctcagcttctggggaacctgctagggcctgcagggccaggggctggagggtctggtgtggcttctcccaccatcactgtggcgatgcctggtgtccctgcctttctccaaggcatgactgacttcttgcaggcaacacagacagcccctccaccacccccacctcctccacccccaccacctgccccagagcagcagaccatgcccccaccaggctccccttctggtggcgcagggagtcctggaggcctgggtcttgagagcctgtcaccggagttttttacctcagtggtgcagggtgtgctcagctccctgctgggctccctgggggctcgggctggcagcagtgaaagtattgctgccttcatacaacgcctcagtggatccagcaacatctttgagcctggagctgatggggcccttggattctttggggccttgctttctcttctgtgccagaacttctctatggtggacgtagtgatgcttctccatgggcatttccagccactacaacggctccagccccagctgcgatccttcttccaccagcactacctgggtggtcaggagcccacacccagtaacatccggatggcaacccacacattgatcacggggctagaagagtatgtgcgggagagtttttccttggtgcaggttcagccaggtgtggacatcatccggacaaacctggaatttctccaagagcagtttaatagcattgctgcgcatgtgctgcattgcacagatagtggatttggggcccggttgctggagttgtgtaaccaaggcctgtttgaatgcctggccctaaacctgcactgcttggggggacagcagatggagcttgctgctgttatcaatggccgaattcgtcgtatgtctcgtggggtgaatccctccttggtgagctggctgaccactatgatgggactgaggcttcaggtggtactggagcacatgcctgtaggccctgatgccattctcagatacgttcgcagggttggtgatcccccccagccacttcctgaggagccaatggaagttcagggagcagaaagagcttcccctgagcctcagcgggagaatgcttccccagcccctggaacaacagcagaagaggccatgtcccgaggtccacctcctgctcctgaggggggctcccgggatgaacaggatggagcttcagctgagacagaaccttgggcagctgcagtccccccagtaagtgtcaggaagtaatccagtgggtcatggcagctgaaagtcaaggacattactattttctcttttcctccccaggaatgggtccctattatccagcaggacattcagagccagcggaaggtgaaaccgcagccccctctgagtgatgcctacctcagtggtatgcctgccaagagacgcaagctccggtctgatatacaaaaacgactgcaggaagaccccaactacagtccccagcgcttccccaatgcccagcgggcctttgctgatgatccttagctctttgctctatggcccttcctcatcaggggaccgtttcccccctcttccttcacagtatttaagaaataaaagtcggatttttctggctgcttctctcta

SEQ ID NO: 368551 - DNA, 2894 bp, Homo sapiens
acaagagcctcccggaccttcaaaggagggtgcagggcccccggagagtaagcagtgagccccgggtacggctggtgatggctcagcacatgatcagggatatacagaccttactatcccggatggagactctcccctaccttcagtgtcgaggagggccccaaccgcagcacagtcagccgcccccgcagccaccggctgtgaccccggagccagtagccttgagctctcaaacatcagaaccagttgaaagtgaagcacctccccgggagcccatggaggcagaagaagtggaggagcgtgccccagcccagaacccggagctcactcctggcccagccccagcgggcccaacacctgccccggaaacaaatgcacccaaccatccttcccctgcggagtatgtcgaggtgctccaggagctacagcggctggagagtcgcctccagcccttcttgcagcgctactacgaggttctgggtgctgctgccaccacggactacaataacaatcacgagggccgggaggaggatcagcggttgatcaacttggtaggggagagcctgcgactgctgggcaacacctttgttgcactgtctgacctgcgctgcaatctggcctgcacgcccccacgacacctgcatgtggtccggcctatgtctcactacaccacccccatggtgctccagcaggcagccattcccatacagatcaatgtgggaaccactgtgaccatgacaggaaatgggactcggccccccccaactcccaatgcagaggcacctccccctggtcctgggcaggcctcatccgtggctccgtcttctaccaatgtcgagtcctcagctgagggggctcccccgccaggtccagctcccccgccagccaccagccacccgagggtcatccggatttcccaccagagtgtggaacccgtggtcatgatgcacatgaacattcaagattctggcacacagcctggtggtgttccgagtgctcccactggccccctgggaccccctggtcatggccaaaccctgggctccaccctcatccagctgccctccctgccccctgagttcatgcacgccgtcgcccaccagatcactcatcaggccatggtggcagctgttgcctccgcggccgcaggacagcaggtgccaggcttcccaacagctccaacccgggtggtgattgcccggcccactcctccacaggctcggccttcccatcctggagggcccccagtctctgggacactgcagggcgccggtctgggtaccaatgcctcgttggcccagatggtgagcggccttgtggggcagcttcttatgcagccagtccttgtggctcaggggaccccaggtatggctccaccgccagcccctgccactgcttctgccagtgctggcaccaccaacacagctaccacagctggccccgctcctggggggcctgcccagcctccacccacccctcaaccctccatggctgatcttcagttctctcagcttctggggaacctgctagggcctgcagggccaggggctggagggtctggtgtggcttctcccaccatcactgtggcgatgcctggtgtccctgcctttctccaaggcatgactgacttcttgcaggcaacacagacagcccctccaccacccccacctcctccacccccaccacctgccccagagcagcagaccatgcccccaccaggctccccttctggtggcgcagggagtcctggaggcctgggtcttgagagcctgtcaccggagttttttacctcagtggtgcagggtgtgctcagctccctgctgggctccctgggggctcgggctggcagcagtgaaagtattgctgccttcatacaacgcctcagtggatccagcaacatctttgagcctggagctgatggggcccttggattctttggggccttgctttctcttctgtgccagaacttctctatggtggacgtagtgatgcttctccatgggcatttccagccactacaacggctccagccccagctgcgatccttcttccaccagcactacctgggtggtcaggagcccacacccagtaacatccggatggcaacccacacattgatcacggggctagaagagtatgtgcgggagagtttttccttggtgcaggttcagccaggtgtggacatcatccggacaaacctggaatttctccaagagcagtttaatagcattgctgcgcatgtgctgcattgcacagatagtggatttggggcccggttgctggagttgtgtaaccaaggcctgtttgaatgcctggccctaaacctgcactgcttggggggacagcagatggagcttgctgctgttatcaatggccgaattcgtcgtatgtctcgtggggtgaatccctccttggtgagctggctgaccactatgatgggactgaggcttcaggtggtactggagcacatgcctgtaggccctgatgccattctcagatacgttcgcagggttggtgatcccccccagccacttcctgaggagccaatggaagttcagggagcagaaagagcttcccctgagcctcaggaatgggtccctattatccagcaggacattcagagccagcggaaggtgaaaccgcagccccctctgagtgatgcctacctcagtggtatgcctgccaagagacgcaagctccggtctgatatacaaaaacgactgcaggaagaccccaactacagtccccagcgcttccccaatgcccagcgggcctttgctgatgatccttagctctttgctctatggcccttcctcatcaggggaccgtttcccccctcttccttcacagtatttaagaaataaaagtcggatttttctggctgcttctctcta

SEQ ID NO: 368552 - DNA, 2786 bp, Homo sapiens
acaagagcctcccggaccttcaaaggagggtgcagggcccccggagagtaagcagtgagccccgggtacggctggtgatggctcagcacatgatcagggatatacagaccttactatcccggatggagactctcccctaccttcagtgtcgaggagggccccaaccgcagcacagtcagccgcccccgcagccaccggctgtgaccccggagccagtagccttgagctctcaaacatcagaaccagttgaaagtgaagcacctccccgggagcccatggaggcagaagaagtggaggagcgtgccccagcccagaacccggagctcactcctggcccagccccagcgggcccaacacctgccccggaaacaaatgcacccaaccatccttcccctgcggagtatgtcgaggtgctccaggagctacagcggctggagagtcgcctccagcccttcttgcagcgctactacgaggttctgggtgctgctgccaccacggactacaataacaatcacgagggccgggaggaggatcagcggttgatcaacttggtaggggagagcctgcgactgctgggcaacacctttgttgcactgtctgacctgcgctgcaatctggcctgcacgcccccacgacacctgcatgtggtccggcctatgtctcactacaccacccccatggtgctccagcaggcagccattcccatacagatcaatgtgggaaccactgtgaccatgacaggaaatgggactcggccccccccaactcccaatgcagaggcacctccccctggtcctgggcaggcctcatccgtggctccgtcttctaccaatgtcgagtcctcagctgagggggctcccccgccaggtccagctcccccgccagccaccagccacccgagggtcatccggatttcccaccagagtgtggaacccgtggtcatgatgcacatgaacattcaagattctggcacacagcctggtggtgttccgagtgctcccactggccccctgggaccccctggtcatggccaaaccctgggctccaccctcatccagctgccctccctgccccctgagttcatgcacgccgtcgcccaccagatcactcatcaggccatggtggcagctgttgcctccgcggccgcaggacagcaggtgccaggcttcccaacagctccaacccgggtggtgattgcccggcccactcctccacaggctcggccttcccatcctggagggcccccagtctctgggacactgcagggcgccggtctgggtaccaatgcctcgttggcccagatggtgagcggccttgtggggcagcttcttatgcagccagtccttgtggctcaggggaccccaggtatggctccaccgccagcccctgccactgcttctgccagtgctggcaccaccaacacagctaccacagctggccccgctcctggggggcctgcccagcctccacccacccctcaaccctccatggctgatcttcagttctctcagcttctggggaacctgctagggcctgcagggccaggggctggagggtctggtgtggcttctcccaccatcactgtggcgatgcctggtgtccctgcctttctccaaggcatgactgacttcttgcaggcaacacagacagcccctccaccacccccacctcctccacccccaccacctgccccagagcagcagaccatgcccccaccaggctccccttctggtggcgcagggagtcctggaggcctgggtcttgagagcctgtcaccggagttttttacctcagtggtgcagggtgtgctcagctccctgctgggctccctgggggctcgggctggcagcagtgaaagtattgctgccttcatacaacgcctcagtggatccagcaacatctttgagcctggagctgatggggcccttggattctttggggccttgctttctcttctgtgccagaacttctctatggtggacgtagtgatgcttctccatgggcatttccagccactacaacggctccagccccagctgcgatccttcttccaccagcactacctgggtggtcaggagcccacacccagtaacatccggatggcaacccacacattgatcacggggctagaagagtatgtgcgggagagtttttccttggtgcaggttcagccaggtgtggacatcatccggacaaacctggaatttctccaagagcagtttaatagcattgctgcgcatgtgctgcattgcacagatagtggatttggggcccggttgctggagttgtgtaaccaaggcctgtttgaatgcctggccctaaacctgcactgcttggggggacagcagatggagcttgctgctgttatcaatggccgaattcgtcgtatgtctcgtggggtgaatccctccttggtgagctggctgaccactatgatgggactgaggcttcaggtggtactggagcacatgcctgtaggccctgatgccattctcagatacgttcgcagggttggtgatcccccccagccacttcctgaggagccaatggaagttcagggagcagaaagagcttcccctgagcctcagctccggtctgatatacaaaaacgactgcaggaagaccccaactacagtccccagcgcttccccaatgcccagcgggcctttgctgatgatccttagctctttgctctatggcccttcctcatcaggggaccgtttcccccctcttccttcacagtatttaagaaataaaagtcggatttttctggctgcttctctcta

SEQ ID NO: 368553 - DNA, 1921 bp, Homo sapiens
  misc_feature (1688)..(1688): n is a, c, g, or t
acaagagcctcccggaccttcaaaggagggtgcagggcccccggagagtaagcagtgagccccgggtacggctggtgatggctcagcacatgatcagggatatacagaccttactatcccggatggagactctcccctaccttcagtgtcgaggagggccccaaccgcagcacagtcagccgcccccgcagccaccggctgtgaccccggagccagtagccttgagctctcaaacatcagaaccagttgaaagtgaagcacctccccgggagcccatggaggcagaagaagtggaggagcgtgccccagcccagaacccggagctcactcctggcccagccccagcgggcccaacacctgccccggaaacaaatgcacccaaccatccttcccctgcggagtatgtcgaggtgctccaggagctacagcggctggagagtcgcctccagcccttcttgcagcgctactacgaggttctgggtgctgctgccaccacggactacaataacaatcacgagggccgggaggaggatcagcggttgatcaacttggtaggggagagcctgcgactgctgggcaacacctttgttgcactgtctgacctgcgctgcaatctggcctgcacgcccccacgacacctgcatgtggtccggcctatgtctcactacaccacccccatggtgctccagcaggcagccattcccatacagatcaatgtgggaaccactgtgaccatgacaggaaatgggactcggccccccccaactcccaatgcagaggcacctccccctggtcctgggcaggcctcatccgtggctccgtcttctaccaatgtcgagtcctcagctgagggggctcccccgccaggtccagctcccccgccagccaccagccacccgagggtcatccggatttcccaccagagtgtggaacccgtggtcatgatgcacatgaacattcaagattctggcacacagcctggtggtgttccgagtgctcccactggccccctgggaccccctggtcatggccaaaccctgggctccaccctcatccagctgccctccctgccccctgagttcatgcacgccgtcgcccaccagatcactcatcaggccatggtggcagctgttgcctccgcggccgcaggacagcaggtgccaggcttcccaacagctccaacccgggtggtgattgcccggcccactcctccacaggctcggccttcccatcctggagggcccccagtctctgggacactgcagggcgccggtctgggtaccaatgcctcgttggcccagatggtgagcggccttgtggggcagcttcttatgcagccagtccttgtggctcaggggaccccaggtatggctccaccgccagcccctgccactgcttctgccagtgctggcaccaccaacacagctaccacagctggccccgctcctggggggcctgcccagcctccacccacccctcaaccctccatggctgatcttcagttctctcagcttctggggaacctgctagggcctgcagggccaggggctggagggtctggtgtggcttctcccaccatcactgtggcgatgcctggtgtccctgcctttctccaaggcatgactgacttcttgcaggcaacacagacagcccctgcagcagcgaaaaaaaaaaaaaaaaaaaaaaanaaaaaaaaaaaaaaagaaaaaagaaaacaaaaaaaaaaaaaaaaaaaaaaaaaaaaaagtactgatggtggtgaataaagaccaaagggtcctctctacctttgaaaactctcctggggtggaggagaccagggcaggatagacagacctctgcagtaagagagtggttgggaaacccagggtgttcccttggatctcagatctgagccatcgagggaagagtgggctgctaa

SEQ ID NO: 368554 - DNA, 2528 bp, Homo sapiens
acaagagcctcccggaccttcaaaggagggtgcagggcccccggagagtaagcagtgagccccgggtacggctggtgatggctcagcacatgatcagggatatacagaccttactatcccggatggagactctcccctaccttcagtgtcgaggagggccccaaccgcagcacagtcagccgcccccgcagccaccggctgtgaccccggagccagtagccttgagctctcaaacatcagaaccagttgaaagtgaagcacctccccgggagcccatggaggcagaagaagtggaggagcgtgccccagcccagaacccggagctcactcctggcccagccccagcgggcccaacacctgccccggaaacaaatgcacccaaccatccttcccctgcggagtatgtcgaggtgctccaggagctacagcggctggagagtcgcctccagcccttcttgcagcgctactacgaggttctgggtgctgctgccaccacggactacaataacaatcacgagggccgggaggaggatcagcggttgatcaacttggtaggggagagcctgcgactgctgggcaacacctttgttgcactgtctgacctgcgctgcaatctggcctgcacgcccccacgacacctgcatgtggtccggcctatgtctcactacaccacccccatggtgctccagcaggcagccattcccatacagatcaatgtgggaaccactgtgaccatgacaggaaatgggactcggccccccccaactcccaatgcagaggcacctccccctggtcctgggcaggcctcatccgtggctccgtcttctaccaatgtcgagtcctcagctgagggggctcccccgccaggtccagctcccccgccagccaccagccacccgagggtcatccggatttcccaccagagtgtggaacccgtggtcatgatgcacatgaacattcaagattctggcacacagcctggtggtgttccgagtgctcccactggccccctgggaccccctggtcatggccaaaccctgggctccaccctcatccagctgccctccctgccccctgagttcatgcacgccgtcgcccaccagatcactcatcaggccatggtggcagctgttgcctccgcggccgcaggacagcaggtgccaggcttcccaacagctccaacccgggtggtgattgcccggcccactcctccacaggctcggccttcccatcctggagggcccccagtctctgggacactgcagggcgccggtctgggtaccaatgcctcgttggcccagatggtgagcggccttgtggggcagcttcttatgcagccagtccttgtggctcaggggaccccaggtatggctccaccgccagcccctgccactgcttctgccagtgctggcaccaccaacacagctaccacagctggccccgctcctggggggcctgcccagcctccacccacccctcaaccctccatggctgatcttcagttctctcagcttctggggaacctgctagggcctgcagggccaggggctggagggtctggtgtggcttctcccaccatcactgtggcgatgcctggtgtccctgcctttctccaaggcatgactgacttcttgcaggcaacacagacagcccctcagcacagggcacgctgataaactgggtacccagcccgagggcacaccccaccagcgggacgcccccatgtaggactctcacaagacgcacgacagccaaggcacgcccagaatgcacccgggcaagcagaacaccccgccatcgcagagccaacacaacaccagcacacgcaagccaccgccgacagcgccaccaccaacaaactacatacaaaccgaaagaacaagagacgcctcctcaacctcacgacacagcgcaaccccaggccgacagcggaacaggcagtctacataaaccgccacgtgacgcgcggcacgactgctgcggacgccggggacacgagcacgacgagccagctaccagcgatgcggtgagcagtacacatagaccgaggggaaagcgccagcaacgtcgtcctggccagccacgagacgcacctgacgaccgagccccgcagcgcaagccgtccggaccactcgcgcgcgggccaggcgcagctgggaggcgcacccgaacgcacggccgggcgacatagcaaacgaccgacagagttagccagacagcgtgagaagctacaaacgacgacgacagcacaccgacagttcgaggccactggcagcacaaagcacccctccgtagcacacagccgcgccgaggcgccaaccacacccgaagacagaacgcagacaacaagagagcacccacgcgaatccaagagaacagagacgaatataccaatcagcgagacgaacacgacaaccagcccgacatcgcgcgccgtacgaagaacatccaagcagatcacctataggagcaagcgccacacgcagtcgtacagctagacgtgcacccaaaacaactagttaatatag

SEQ ID NO: 368555 - DNA, 930 bp, Homo sapiens
gctggcccggttgtctggtccaggttgtgctctcctggagatggacaggtcttggtgaggaatccctccttggtgagctggctgaccactatgatgggactgaggcttcaggtggtactggagcacatgcctgtaggccctgatgccattctcagatacgttcgcagggttggtgatcccccccaggtaagggacctgttgggcgatggggtcagggtacttgagagaactggagagatctgagaggaagtatggtgttctttaatttcacagccacttcctgaggagccaatggaagttcagggagcagaaagagcttcccctgagcctcagcgggagaatgcttccccagcccctggaacaacagcagaagaggccatgtcccgaggtccacctcctgctcctgaggggggctcccgggatgaacaggatggagcttcagctgagacagaaccttgggcagctgcagtccccccagaatgggtccctattatccagcaggacattcagagccagcggaaggtgaaaccgcagccccctctgagtgatgcctacctcagtggtatgcctgccaagagacgcaagacgatgcagggtgagggcccccagctgcttctctcagaggctgtgagccgggcagctaaggcagccggagctcggcccctgacgagccccgagagcctgagccgggacctggaggcaccagaggttcaggagagctacaggcagcagctccggtctgatatacaaaaacgactgcaggaagaccccaactacagtccccagcgcttccccaatgcccagcgggcctttgctgatgatccttagctctttgctctatggcccttcctcatcaggggaccgtttcccccctcttccttcacagtatttaagaaataaaagtcggatttttctggctgcttctctcta

SEQ ID NO: 368556 - DNA, 2499 bp, Homo sapiens
agatcgggggcgcgaggcctcacggagctcgtagtttcccggacgggccgctcccggcctcgcggcctcgcctccccacactacaactcccacggggcagcgggcgcggctccccgtacccaccagctggccgggcagggcagccacttcgcggtcgggcccgccggctgcgggcacccgcgcgacgggcgggaagatggcggacgtggtcgtgggtaaagacaagggcggggagcagcggctcatctcgctgcctctatcccgcatccgggtcatcatgaagagctcccccgaggtgtccagcatcaaccaggaggcgttggtgctcacggccaaggccacggagctctttgttcaatgcctagccacctattcctacagacacggcagtggaaaggaaaagaaagtactgacttacagtgatttagcaaacactgcacagcaatcagaaacttttcagtttcttgcagatatattaccaaagaagattttagctagtaaatacctgaaaatgcttaaagaggaaaagagggaagaagatgaggagaatgacaatgataatgaaagtgaccatgatgaagctgactcctaaaccaaaagtgctttaaaaaccagcctggcgaggacagccctggacccactccactgtctctaagtaaacacagcactgcccgcttttagcgtcttcacttcttcacagagttccagtgcgtggtattctttcgaggtattctttccaggccgagattgagcacctcatgtacctacgccacagacagccagagggaaagcgacccagacagcagcccctcctcgacaggcccaccctgcagctcaggcaccaagaaaacagccgatactggcagccattgcagctccaaactgcagaggcaaggccaattttaacttttcaatttacagtcgattttgaagagcttctacatatcggttatgtaaattcatatatgtatttttggaatcagttcttataaacagctcgattcagttttagctaaatttatagtttaggtagtatgttacatttgaatttttgtcttaagaaaagttgactgttcagatatttttctactgtaaagaaatatacttttctattaaagatctgtacatatttttacagtaaaatgctttatggaactagttttagagccctctatggctttaaggccttgcttactgcctgcaaattttgagaaatttaaaaataagcattctaacacttttattcccacagaaaaattccaagtcaaattatcaaatcaaacacaaaaataagtcttacctcttgtataagcatgttgtactaaaaaaaaattttgaaacattttgtatattggagatctctctcatcttactgttctttgctttaaattcctggcacttctttttactgtctataagagaaaacctatcataagcccaattttttttttccacttagggtaaatgtttggctcttctcatttcattatcttttttttttttttttaaagacagattctcactcagttgcccaggctggattgcgggggcgctgtctcagctcactgcaacctccgcctcccaggttcaagtgattctcctgcctcatcctcctgagtagctgggattacaggcgtgtgccaccatgcccaacctatttttgtattttttagtagagacggggttcaccatgttggccaggcttgtctcaaactcctaacctcaactgatccacctgcctcagcctcccaaagtgccgccgggattacaggcgtgagccaccatgcctggccttcattatctcttttttaaaaatgaaaaagtttataatttacattcagtaaaatcaccctttttagtgtctagtctgtgaattttgacaaatgcatggttttgtaaccaatcgataggacagttctgccacccaggacattcccctctgttcctctgttcctctcttctcctgccccctagcaaccactggtgttttctgtccctcttgttcattgacatttattttaaaataaaatattttaaaatctactttttggtgtacagttctgagttttggcaaatgcagtcaagtcactaccaccaccacaattaacagctatatcaccctccagtaaattccctgtggtcagctccttccccaccttttaccgtggcaaccgtcaagctattctctgtccctataccaggtgtcatcaaatttttttctggaaaggcccatgcagtaaatagttcaagctttgtgggcttttatagtctctgttgctgctgctgaactcagctgttgtagcacgaaagcagccaggtaattactagatgaaggaatgcaggtggctgtgtttcaatagagctttatttctgcaaactgaaacttgagttttgtgtaattttcatgtgtcatgaaatactgttttctccaaccatttaataatgtaaatacttgctagcttatgtgccattaaaaaatgacttgatttggcttacaaa

SEQ ID NO: 368557 - DNA, 380 bp, Homo sapiens
agagagagagagagagagagagagagacatgttggccaggcttgtctcaaactcctaacctcaactgatccacctgcctcagcctcccaaagtgccgccgggattacaggcgtgagccaccatgcctggccttcattatctcttttttaaaaatgaaaaagtttataatttacattcagtaaaatcaccctttttagtgtctagtctgtgaattttgacaaatgcatggttttgtaaccaatcgataggacagttctgccacccaggacattcccctctgttcctctgttcctctcttctcctgccccctagcaaccactggtgttttctgtccctcttgttcattgacatttattttaaaataaaatattttaaaatct

SEQ ID NO: 368558 - DNA, 2042 bp, Homo sapiens
agatcgggggcgcgaggcctcacggagctcgtagtttcccggacgggccgctcccggcctcgcggcctcgcctccccacactacaactcccacggggcagcgggcgcggctccccgtacccaccagctggccgggcagggcagccacttcgcggtcgggcccgccggctgcgggcacccgcgcgacgggcgggaagatggcggacgtggtcgtgggtaaagacaagggcggggagcagcggctcatctcgctgcctctatcccgcatccgggtcatcatgaagagctcccccgaggtgtccagcatcaaccaggaggcgttggtgctcacggccaaggccacggagctctttgttcaatgcctagccacctattcctacagacacggcagtggaaaggaaaagaaagtactgacttacagtgatttagcaaacactgcacagcaatcagaaacttttcagtttcttgcagatatattaccaaagaagattttagctagtaaatacctgaaaatgcttaaagaggaaaagagggaagaagatgaggagaatgacaatgataatgaaagtgaccatgatgaagctgactcctaaaccaaaagtgctttaaaaaccagcctggcgaggacagccctggacccactccactgtctctaagtaaacacagcactgcccgcttttagcgtcttcacttcttcacagagttccagtgcgtggtattctttcgaggtattctttccaggccgagattgagcacctcatgtacctacgccacagacagccagagggaaagcgacccagacagcagcccctcctcgacaggcccaccctgcagctcaggcaccaagaaaacagccgatactggcagccattgcagctccaaactgcagaggcaaggccaattttaacttttcaatttacagtcgattttgaagagcttctacatatcggttatgtaaattcatatatgtatttttggaatcagttcttataaacagctcgattcagttttagctaaatttatagtttaggtagtatgttacatttgaatttttgtcttaagaaaagttgactgttcagatatttttctactgtaaagaaatatacttttctattaaagatctgtacatatttttacagtaaaatgctttatggaactagttttagagccctctatggctttaaggccttgcttactgcctgcaaattttgagaaatttaaaaataagcattctaacacttttattcccacagaaaaattccaagtcaaattatcaaatcaaacacaaaaataagtcttacctcttgtataagcatgttgtactaaaaaaaaattttgaaacattttgtatattggagatctctctcatcttactgttctttgctttaaattcctggcacttctttttactgtctataagagaaaacctatcataagcccaattttttttttccacttagggtaaatgtttggctcttctcatttcattatcttttttttttttttttaaagacagattctcactcagttgcccaggctggattgcgggggcgctgtctcagctcactgcaacctccgcctcccaggttcaagtgattctcctgcctcatcctcctgagtagctgggattacaggcgtgtgccaccatgcccaacctatttttgtattttttagtagagacggggttcaccatgttggccaggcttgtctcaaactcctaacctcaactgatccacctgcctcagcctcccaaagtgccgccgggattacaggcgtgagccaccatgcctggccttcattatctcttttttaaaaatgaaaaagtttataatttacattcagtaaaatcaccctttttagtgtctagtctgtgaattttgacaaatgcatggttttgtaaccaatcgataggacagttctgccacccaggacattcccctctgttcctctgttcctctcttctcctgccccctagcaaccactggtgttttctgtccctcttgttcattgacatttattttaaaataaaatattttaaaatct

SEQ ID NO: 368559 - DNA, 2042 bp, Homo sapiens
agatcgggggcgcgaggcctcacggagctcgtagtttcccggacgggccgctcccggcctcgcggcctcgcctccccacactacaactcccacggggcagcgggcgcggctccccgtacccaccagctggccgggcagggcagccacttcgcggtcgggcccgccggctgcgggcacccgcgcgacgggcgggaagatggcggacgtggtcgtgggtaaagacaagggcggggagcagcggctcatctcgctgcctctatcccgcatccgggtcatcatgaagagctcccccgaggtgtccagcatcaaccaggaggcgttggtgctcacggccaaggccacggagctctttgttcaatgcctagccacctattcctacagacacggcagtggaaaggaaaagaaagtactgacttacagtgatttagcaaacactgcacagcaatcagaaacttttcagtttcttgcagatatattaccaaagaagattttagctagtaaatacctgaaaatgcttaaagaggaaaagagggaagaagatgaggagaatgacaatgataatgaaagtgaccatgatgaagctgactcctaaaccaaaagtgctttaaaaaccagcctggcgaggacagccctggacccactccactgtctctaagtaaacacagcactgcccgcttttagcgtcttcacttcttcacagagttccagtgcgtggtattctttcgaggtattctttccaggccgagattgagcacctcatgtacctacgccacagacagccagagggaaagcgacccagacagcagcccctcctcgacaggcccaccctgcagctcaggcaccaagaaaacagccgatactggcagccattgcagctccaaactgcagaggcaaggccaattttaacttttcaatttacagtcgattttgaagagcttctacatatcggttatgtaaattcatatatgtatttttggaatcagttcttataaacagctcgattcagttttagctaaatttatagtttaggtagtatgttacatttgaatttttgtcttaagaaaagttgactgttcagatatttttctactgtaaagaaatatacttttctattaaagatctgtacatatttttacagtaaaatgctttatggaactagttttagagccctctatggctttaaggccttgcttactgcctgcaaattttgagaaatttaaaaataagcattctaacacttttattcccacagaaaaattccaagtcaaattatcaaatcaaacacaaaaataagtcttacctcttgtataagcatgttgtactaaaaaaaaattttgaaacattttgtatattggagatctctctcatcttactgttctttgctttaaattcctggcacttctttttactgtctataagagaaaacctatcataagcccaattttttttttccacttagggtaaatgtttggctcttctcatttcattatcttttttttttttttttaaagacagattctcactcagttgcccaggctggattgcgggggcgctgtctcagctcactgcaacctccgcctcccaggttcaagtgattctcctgcctcatcctcctgagtagctgggattacaggcgtgtgccaccatgcccaacctatttttgtattttttagtagagacggggttcaccatgttggccaggcttgtctcaaactcctaacctcaactgatccacctgcctcagcctcccaaagtgccgccgggattacaggcgtgagccaccatgcctggccttcattatctcttttttaaaaatgaaaaagtttataatttacattcagtaaaatcaccctttttagtgtctagtctgtgaattttgacaaatgcatggttttgtaaccaatcgataggacagttctgccacccaggacattcccctctgttcctctgttcctctcttctccaccacaccccccaccccatggtgggtgagggtatcccctgtgtgtcccaggccaataaaatctacctgccactgaaaa

SEQ ID NO: 368560 - DNA, 1949 bp, Homo sapiens
agatcgggggcgcgaggcctcacggagctcgtagtttcccggacgggccgctcccggcctcgcggcctcgcctccccacactacaactcccacggggcagcgggcgcggctccccgtacccaccagctggccgggcagggcagccacttcgcggtcgggcccgccggctgcgggcacccgcgcgacgggcgggaagatggcggacgtggtcgtgggtaaagacaagggcggggagcagcggctcatctcgctgcctctatcccgcatccgggtcatcatgaagagctcccccgaggtgtccagcatcaaccaggaggcgttggtgctcacggccaaggccacggagctctttgttcaatgcctagccacctattcctacagacacggcagtggaaaggaaaagaaagtactgacttacagtgatttagcaaacactgcacagcaatcagaaacttttcagtttcttgcagatatattaccaaagaagattttagctagtaaatacctgaaaatgcttaaagaggaaaagagggaagaagatgaggagaatgacaatgataatgaaagtgaccatgatgaagctgactcctaaaccaaaagtgctttaaaaaccagcctggcgaggacagccctggacccactccactgtctctaagtaaacacagcactgcccgcttttagcgtcttcacttcttcacagagttccagtgcgtggtattctttcgaggtattctttccaggccgagattgagcacctcatgtacctacgccacagacagccagagggaaagcgacccagacagcagcccctcctcgacaggcccaccctgcagctcaggcaccaagaaaacagccgatactggcagccattgcagctccaaactgcagaggcaaggccaattttaacttttcaatttacagtcgattttgaagagcttctacatatcggttatgtaaattcatatatgtatttttggaatcagttcttataaacagctcgattcagttttagctaaatttatagtttaggtagtatgttacatttgaatttttgtcttaagaaaagttgactgttcagatatttttctactgtaaagaaatatacttttctattaaagatctgtacatatttttacagtaaaatgctttatggaactagttttagagccctctatggctttaaggccttgcttactgcctgcaaattttgagaaatttaaaaataagcattctaacacttttattcccacagaaaaattccaagtcaaattatcaaatcaaacacaaaaataagtcttacctcttgtataagcatgttgtactaaaaaaaaattttgaaacattttgtatattggagatctctctcatcttactgttctttgctttaaattcctggcacttctttttactgtctataagagaaaacctatcataagcccaattttttttttccacttagggtaaatgtttggctcttctcatttcattatcttttttttttttttttaaagacagattctcactcagttgcccaggctggattgcgggggcgctgtctcagctcactgcaacctccgcctcccaggagaatcgcttgaactggggaggaggctgaggcaggagaatcgcttgaactgggaaggaggctgaggcaggagaatggggaggcataggtcgcagtaagcgtgagatcatgccactcgtgcactccagccggggtgacagagtgagactgcgtctcaaaaaaaaaaaaaaaaattgggggctccaggcggggcgcaggttgtccagtgcctggtaatccccagtaccttggggaggctgaggggggaggatcattggaccccgggagttttaaagaccagtcggggcaaagttggtgaaccctcatttttcctaaaattgcaaaatttacctggggcgtggtgtggccaggccgtgtattccca

SEQ ID NO: 368561 - DNA, 761 bp, Homo sapiens
agatcgggggcgcgaggcctcacggagctcgtagtttcccggacgggccgctcccggcctcgcggcctcgcctccccacactacaactcccacggggcagcgggcgcggctccccgtacccaccagctggccgggcagggcagccacttcgcggtcgggcccgccggctgcgggcacccgcgcgacgggcgggaagatggcggacgtggtcgtgggtaaagacaagggcggggagcagcggctcatctcgctgcctctatcccgcatccgggtcatcatgaagagctcccccgaggtgtccagcatcaaccaggaggcgttggtgctcacggccaaggccacggagctctttgttcaatgcctagccacctattcctacagacacggcagtggaaaggaaaagaaagtactgacttacagtgatttagcaaacactgcacagcaatcagaaacttttcagtttcttgcagatatattaccaaagaagagaaatccccctggctttggttggtttcgtaaatttagctatatgtagcttgcgtgctttctcctgttcttttaattatgtgaaactgaagagttgcttttcttgttttcctttttagaagtttttttccttaatgtgaaagtaatttgaccaagttataatgcatttttgtttttaacaaatcccctccttaaacggagctataaggtggccaaatctgagaacaattaaattcattttagttataataaatttaatatttgtaaatgtaaaa

SEQ ID NO: 368562 - DNA, 347 bp, Homo sapiens
gagacaccatggtttgtactcattggactggaaagaggcctatagcgttcgttaggagacaatgctagtttctttgatattttacccagaaatgcagcctgaatttcatcttgttttggaacctcttatagaggtcaaagcaggaactagtacattttgaaatgtgcattgctgtgttcatagtctaccataaccaattgctgatgtacgctttatgtttttaagatatattaccaaagaagattttagctagtaaatacctgaaaatgcttaaagaggaaaagagggaagaagatgaggagaatgacaatgataatgaaagtgaccatgatgaagctgactcctaa

SEQ ID NO: 368563 - DNA, 814 bp, Homo sapiens
agatcgggggcgcgaggcctcacggagctcgtagtttcccggacgggccgctcccggcctcgcggcctcgcctccccacactacaactcccacggggcagcgggcgcggctccccgtacccaccagctggccgggcagggcagccacttcgcggtcgggcccgccggctgcgggcacccgcgcgacgggcgggaagatggcggacgtggtcgtgggtaaagacaagggcggggagcagcggctcatctcgctgcctctatcccgcatccgggtcatcatgaagagctcccccgaggtgtccagcatcaaccaggaggcgttggtgctcacggccaaggccacggagctctttgttcaatgcctagccacctattcctacagacacggcagtggaaaggaaaagaaagtactgacttacagtgatttagcaaacactgcacagcaatcagaaacttttcagtttcttgcagatatattaccaaagaagattttagctagtaaatacctgaaaatgcttaaagaggaaaagagggaagaagatgaggagaggaggtaagcgagaaaaaatggaaaggggagccggaaatggaggagagaggacaagcaaagagacagaaatgaagacttgaggaaaagctgggggaagcaggagaggaagggacgggatgtaggacggggaagaaaaaatcggagatgagaccaaaagaaatgtgtgggagacggtagagaacgaaatggcaggggtggtttggttttctcaagactgtgaaattgagcccatggctttgaagagagaggagggccggtcctgggt

SEQ ID NO: 368564 - DNA, 2372 bp, Homo sapiens
agatcgggggcgcgaggcctcacggagctcgtagtttcccggacgggccgctcccggcctcgcggcctcgcctccccacactacaactcccacggggcagcgggcgcggctccccgtacccaccagctggccgggcagggcagccacttcgcggtcgggcccgccggctgcgggcacccgcgcgacgggcgggaagatggcggacgtggtcgtgggtaaagacaagggcggggagcagcggctcatctcgctgcctctatcccgcatccgggtcatcatgaagagctcccccgaggtgtccagcatcaaccaggaggcgttggtgctcacggccaaggccacgatatattaccaaagaagattttagctagtaaatacctgaaaatgcttaaagaggaaaagagggaagaagatgaggagaatgacaatgataatgaaagtgaccatgatgaagctgactcctaaaccaaaagtgctttaaaaaccagcctggcgaggacagccctggacccactccactgtctctaagtaaacacagcactgcccgcttttagcgtcttcacttcttcacagagttccagtgcgtggtattctttcgaggtattctttccaggccgagattgagcacctcatgtacctacgccacagacagccagagggaaagcgacccagacagcagcccctcctcgacaggcccaccctgcagctcaggcaccaagaaaacagccgatactggcagccattgcagctccaaactgcagaggcaaggccaattttaacttttcaatttacagtcgattttgaagagcttctacatatcggttatgtaaattcatatatgtatttttggaatcagttcttataaacagctcgattcagttttagctaaatttatagtttaggtagtatgttacatttgaatttttgtcttaagaaaagttgactgttcagatatttttctactgtaaagaaatatacttttctattaaagatctgtacatatttttacagtaaaatgctttatggaactagttttagagccctctatggctttaaggccttgcttactgcctgcaaattttgagaaatttaaaaataagcattctaacacttttattcccacagaaaaattccaagtcaaattatcaaatcaaacacaaaaataagtcttacctcttgtataagcatgttgtactaaaaaaaaattttgaaacattttgtatattggagatctctctcatcttactgttctttgctttaaattcctggcacttctttttactgtctataagagaaaacctatcataagcccaattttttttttccacttagggtaaatgtttggctcttctcatttcattatcttttttttttttttttaaagacagattctcactcagttgcccaggctggattgcgggggcgctgtctcagctcactgcaacctccgcctcccaggttcaagtgattctcctgcctcatcctcctgagtagctgggattacaggcgtgtgccaccatgcccaacctatttttgtattttttagtagagacggggttcaccatgttggccaggcttgtctcaaactcctaacctcaactgatccacctgcctcagcctcccaaagtgccgccgggattacaggcgtgagccaccatgcctggccttcattatctcttttttaaaaatgaaaaagtttataatttacattcagtaaaatcaccctttttagtgtctagtctgtgaattttgacaaatgcatggttttgtaaccaatcgataggacagttctgccacccaggacattcccctctgttcctctgttcctctcttctcctgccccctagcaaccactggtgttttctgtccctcttgttcattgacatttattttaaaataaaatattttaaaatctactttttggtgtacagttctgagttttggcaaatgcagtcaagtcactaccaccaccacaattaacagctatatcaccctccagtaaattccctgtggtcagctccttccccaccttttaccgtggcaaccgtcaagctattctctgtccctataccaggtgtcatcaaatttttttctggaaaggcccatgcagtaaatagttcaagctttgtgggcttttatagtctctgttgctgctgctgaactcagctgttgtagcacgaaagcagccaggtaattactagatgaaggaatgcaggtggctgtgtttcaatagagctttatttctgcaaactgaaacttgagttttgtgtaattttcatgtgtcatgaaatactgttttctccaaccatttaataatgtaaatacttgctagcttatgtgccattaaaaaatgacttgatttggcttacaaa

SEQ ID NO: 368565 - DNA, 1828 bp, Homo sapiens
  misc_feature (18)..(18): n is a, c, g, or t
acaaggctggtacgcccnggatgttatggagggccgctcccggcctcgcggcctcgcctccccacactacaactcccacggggcagcgggcgcggctccccgtacccaccagctggccgggcagggcaacagcagcccctcctcgacaggcccaccctgcagctcaggcaccaagaaaacagccgatactggcagccattgcagctccaaactgcagaggcaaggccaattttaacttttcaatttacagtcgattttgaagagcttctacatatcggttatgtaaattcatatatgtatttttggaatcagttcttataaacagctcgattcagttttagctaaatttatagtttaggtagtatgttacatttgaatttttgtcttaagaaaagttgactgttcagatatttttctactgtaaagaaatatacttttctattaaagatctgtacatatttttacagtaaaatgctttatggaactagttttagagccctctatggctttaaggccttgcttactgcctgcaaattttgagaaatttaaaaataagcattctaacacttttattcccacagaaaaattccaagtcaaattatcaaatcaaacacaaaaataagtcttacctcttgtataagcatgttgtactaaaaaaaaattttgaaacattttgtatattggagatctctctcatcttactgttctttgctttaaattcctggcacttctttttactgtctataagagaaaacctatcataagcccaattttttttttccacttagggtaaatgtttggctcttctcatttcattatcttttttttttttttttaaagacagattctcactcagttgcccaggctggattgcgggggcgctgtctcagctcactgcaacctccgcctcccaggttcaagtgattctcctgcctcatcctcctgagtagctgggattacaggcgtgtgccaccatgcccaacctatttttgtattttttagtagagacggggttcaccatgttggccaggcttgtctcaaactcctaacctcaactgatccacctgcctcagcctcccaaagtgccgccgggattacaggcgtgagccaccatgcctggccttcattatctcttttttaaaaatgaaaaagtttataatttacattcagtaaaatcaccctttttagtgtctagtctgtgaattttgacaaatgcatggttttgtaaccaatcgataggacagttctgccacccaggacattcccctctgttcctctgttcctctcttctcctgccccctagcaaccactggtgttttctgtccctcttgttcattgacatttattttaaaataaaatattttaaaatctactttttggtgtacagttctgagttttggcaaatgcagtcaagtcactaccaccaccacaattaacagctatatcaccctccagtaaattccctgtggtcagctccttccccaccttttaccgtggcaaccgtcaagctattctctgtccctataccaggtgtcatcaaatttttttctggaaaggcccatgcagtaaatagttcaagctttgtgggcttttatagtctctgttgctgctgctgaactcagctgttgtagcacgaaagcagccaggtaattactagatgaaggaatgcaggtggctgtgtttcaatagagctttatttctgcaaactgaaacttgagttttgtgtaattttcatgtgtcatgaaatactgttttctccaaccatttaataatgtaaatacttgctagcttatgtgccattaaaaaatgacttgatttggcttacaaa

SEQ ID NO: 368566 - DNA, 817 bp, Homo sapiens
ggtgggggaggatgtggccaccaggctctgacagcaggcacagagcagcagcacggggggggtggagcgggagcagccctggtgggggaggatgtggccaccctgagacccggaggagacgggcgtctgcctgggtttgcggagagccgcttatgggtgtggtccgtccagacaccttgtttcaagggggatgggcgtgagcgggcaagcagagcatccccaccgctgagcaagaactttttcttgtttttaaaccatcacgtcctcatttcacattggaataaagtgagtttttgaaacctgcgaaaaaaaaaaaaaaaaaaaaaaaaaaaaaaaaaaagagagaaaaaaaaaaagaaaaaaaaagggggggggggggtaaaagagattttctcccatgaggggggcgcccaaggtttgagggcgcgcagccacaggtttttggtgcgagaacagaaggggggcccacaaagaggagaggggctgttttataagacgggaggagcgtgcgcccagcgggattaaaaaagaggcgggagcgcgcgggagaacacacgagggcggccggggggagccctttcgggccaggagcaacccctcccaccggggcggggcggggcacaacaggggaacagacatcccgaaagagaggtctttgaggaccacaccgaggggggcaccacaaaacacgcgcaaaacagggcgaacaaaaggggccgcaccacacaaacacggggcgaaaacaacaacagggagcaggaacaaggtggagcacacacggagcaaacgacaacgcgagacaccaattaccaccccg

SEQ ID NO: 368567 - DNA, 5733 bp, Homo sapiens
ggcggccgccccggccgacagcgcccgggaacacggctcgcaggccgggggcaaggggcggccgggcgcggccggtgagcggggccagggccagcgggccgctgggcggggggcgccggaccagggcgggcgggttcgggactccgcggggatcgccgccttccctccgcgtcgggcccggttgtatctcgctggggccttcaccgggtcgcccccgcgctgaaggtcaccttcacagtcgcccccggctgcggcccgggtttcgcacgtgcggtcccgtggagggcagcctcggctggcaccctcggcgggcacacgcgcgcctcatcgcggggacacgtgcgcgcacacgcggtttcggggtgcgccgccgccgcagaccgaaagaatcggcggccccaccccctctgcgcccgagcatgggagctctctgagctggggtcgctccgacgtttgcgggacagcccccttcggcacctgctccgcggcggcctcccaggcattccctgtgcgcagggctgcagccctgggagtgaagctccgctcgaggcttcccaggcttggtttgtgggaagagcacgagagctgccatcagtcatgctcttaaacggggactgcccagagagcctgaagaaggaggcggcggcggccgagccacccagggaaaatgggcttgacgaggccggcccgggagatgagaccaccggccaggaagtcattgtcattcaggacacgggcttttctgtgaagatcctcgcccctgggatcgagcccttctccctgcaggtgtccccccaggagatggtgcaggagattcaccaggtgctcatggaccgggaggacacgtgtcaccgtacctgcttctcactgcacctggatggcaacgtgctggaccacttctcggagctgcgcagcgtcgaggggctgcaggagggctctgtgctgcgtgtggtggaagagccgtacacggtgcgtgaggcccgcatccacgtgcgccatgtccgagacctgctcaagagcctggacccatccgatgccttcaacggggttgactgcaactccttgtccttcctgagtgtcttcaccgacggcgacctgggagacagcgggaagcggaagaagggcttggagatggaccccatcgactgcacaccacccgagtacatcctgccagggagccgggagcggccactgtgtcccctgcagccccaaaaccgtgactggaagcccttgcagtgcctgaaagtactcaccatgagcggatggaacccgcccccggggaaccggaagatgcacggggacctcatgtacctgtttgtgatcacagccgaggaccggcaagtcagcatcaccgcgtccacacggggcttttacctgaatcagtccacagcttatcacttcaaccccaagcccgccagcccccgcttcctaagccattccctagtggagctgctcaaccagatcagcccgaccttcaagaagaacttcgctgtgctgcagaagaaaagggtccagcgccacccgttcgagaggatcgccaccccattccaggtgtacagctggacagccccccaggcggagcatgccatggattgcgtgcgtgcagaggacgcctacacctcgaggctgggctatgaggagcacattcctggacagacccgagactggaatgaggagctgcagacgacgagggagctgcctcgcaagaacctgcctgagcggctgctccgagaaagggccatattcaaggtgcacagcgacttcaccgcggcagccaccaggggcgccatggccgtcattgacggcaacgtgatggccatcaaccccagcgaggagaccaagatgcagatgttcatctggaacaacatcttcttcagcctgggcttcgacgtccgagaccactacaaggacttcgggggggacgtggcggcctacgtggcgcccaccaacgacctgaatggcgtccgcacgtacaacgcggtggacgtggaggggctgtacacgctgggcacggtggtggtggattaccgcggctaccgggtcacggcccagtccatcatccccggcatcctggagcgggaccaggagcagagcgtcatctacggctccatcgacttcggcaagaccgtggtgtcacacccgcggtacctggagctgctggagcgcacgagtcggcccctcaagatcctgcggcaccaggtgctcaacgaccgtgacgaggaggtggagctctgctcctcggtcgagtgcaagggcatcattggcaacgacgggcgccactacatcctcgacctgctgcgcaccttccccccggacctcaacttcctgcccgtgcctggcgaggagctgcctgaggaatgcgcccgcgccggcttcccccgcgcccaccggcacaagctctgctgcctgcgccaggagctggtggacgccttcgtggagcacaggtacctcctctttatgaagctggccgccttgcagctgatgcagcagaacgccagccagctggagaccccctcctccctggaaaatggtggtccttcctccttggagtccaagtctgaggatcctccaggacaggaggcgggaagtgaggaggagggtagcagcgccagcggcctggccaaggtgaaggagctggcagagaccatcgccgcagacgacggcacagaccctcggagccgggaggtgatccgcaacgcgtgcaaggcggtcggctccatcagcagcaccgccttcgacattcgcttcaatcctgacatcttctcaccaggggttcgtttccctgagtcctgccaggatgaagttcgggaccagaagcagctgctgaaggacgcggctgccttcctgctctcctgccagatccctggcttggtgaaggactgcatggagcacgcggtcctgcccgtggacggggcaacgctggcagaggtgatgcgccagcggggcatcaacatgcgctacctgggcaaggtgctggagctggtgctgcggagcccggcccgccaccagctggaccacgtctttaaaatcggcattggagaactcatcacccgctcggccaagcacatcttcaagacgtacttacagggagtcgagctctccggcctctcagccgccatcagccacttcctgaactgcttcctgagctcctacccaaaccccgtggcccacctgcccgccgacgagctggtctccaagaagcggaataagaggaggaaaaaccggcccccgggggctgcagataacacagcctgggctgtcatgaccccccaggagctctggaagaacatctgccaggaggccaagaactactttgacttcgacctcgagtgtgagaccgtggaccaggctgtggagacctacggcctgcagaagataacgctcctgcgggagatctcgctgaaaacagggatccaggtcctgctgaaggagtacagcttcgacagtcgccacaagcccgcgttcaccgaggaggacgtgctcaacatcttccccgtggtcaagcacgtcaaccccaaggcctcggatgccttccatttcttccagagcgggcaggccaaagtgcagcagggcttcctgaaggagggctgtgagctcatcaatgaggccctgaacctgtttaacaacgtctacggagccatgcacgtggagacctgcgcctgcctgcgcctcctcgcccgcctccactacatcatgggcgactacgcagaggccctgagtaaccagcagaaggcggtgctgatgagcgagcgggtgatgggcaccgagcaccccaacaccatccaggaatacatgcacctggccctgtactgcttcgccagcagccagctgtccaccgccctgagcctgctgtaccgcgcccgctacctcatgctgctggtgttcggggaagaccaccccgagatggcgctgctggacaacaacatcgggctggtgctgcacggggtgatggagtacgacctgtcgctgcgcttcctggagaacgcgctggccgtcagcaccaagtaccacgggcccaaggccctcaaggtggccctcagccaccaccttgtcgcccgagtctacgagagcaaagctgagttccggtcggccctgcagcacgagaaggagggttacaccatctacaagacgcagctgggcgaggaccatgagaagaccaaggaaagctccgagtacctcaagtgcctgacccagcaggccgtggccctgcagcgcaccatgaacgagatctaccgcaacggctccagcgccaacatcccgcccctcaagttcacggcccccagcatggccagcgtcttggagcagctgaacgtcattaacggcatcctcttcattcctctcagccaaaaagacctggagaatctgaaagccgaggtggcgcggcggcaccagctccaggaggccagcagaaacagggatagagccgaggagcccatggctaccgagcccgcgccagcgggggccccaggagacctgggctcccagcccccggctgccaaggacccttctccgagcgtgcagggatagagagggagccagacggacagccagccagcggccccgtcaccagggagcccgactgcgggagaagggggcgagcctgcgggcggaagaggaagcaaggccctcttcctccacgtctcaccccaccccacccccgtgtcctcctgggagcctggcctgcctgccccgcagaaggtgtttttgcgctggttcaatgaatagatgatgcagaggccccattggagacacgtgaatggcgtgtgcggccatcagttcccggctggggggcaggtgttgcttcggcccccgccctccggccggcgtgtgcgagtgcgcccctggctgtgagtgttgaccgttcctctcccctgtacatagcccgagccagtcctgagtgggtgactcctgagtgggtgacgcgcagacgggatttctcaggtcatttgtatggtcgacatgatggctgctgctttggctgccaccacccccgggcccagcctgtctgaaagttcagggtttaggccgaaaaacccggtggggaggggtggggagccggagctctgtggcggggctggagggctggggtgcactttagtttggggcgggacgggagccgccgttgtgactggcgtggtctggctgctgctcccgaacggaggggtcggggttggcttgctgggccctcagagcccagtgggtggctctgactcggctccctactccctgcacccagctgggcgcagccttggggcctgcggtctgaatgtatccctcccctcagttttaacctgagctgccgaacgcacagtgggccgggggcgaggctgggggaagcggggcccaattacggatcccgggagttacaggtgccgacgtgatgtcgcttctctggtgcccagctcccttcctggtctgagactagctctgggggtggcgggggcccccacacgctgctcccgctccaccctgcccgtgctgctgctctgtgcctgctgtcagagccctggtgggggaggatgtggccaccctgagacccggaggagacgggcgtctgcctgggtttgcggagagccgcttatgggtgtggtccgtccagacaccttgtttcaagggggatgggcgtgagcgggcaagcagagcatccccaccgctgagcaagaactttttcttgtttttaaaccatcacgtcctcatttcacattggaataaagtgagtttttgaaacctgcg

SEQ ID NO: 368568 - DNA, 4933 bp, Homo sapiens
ggcggccgccccggccgacagcgcccgggaacacggctcgcaggccgggggcaaggggcggccgggcgcggccgagctgccatcagtcatgctcttaaacggggactgcccagagagcctgaagaaggaggcggcggcggccgagccacccagggaaaatgggcttgacgaggccggcccgggagatgagaccaccggccaggaagtcattgtcattcaggacacgggcttttctgtgaagatcctcgcccctgggatcgagcccttctccctgcaggtgtccccccaggagatggtgcaggagattcaccaggtgctcatggaccgggaggacacgtgtcaccgtacctgcttctcactgcacctggatggcaacgtgctggaccacttctcggagctgcgcagcccccaaaaccgtgactggaagcccttgcagtgcctgaaagtactcaccatgagcggatggaacccgcccccggggaaccggaagatgcacggggacctcatgtacctgtttgtgatcacagccgaggaccggcaagtcagcatcaccgcgtccacacggggcttttacctgaatcagtccacagcttatcacttcaaccccaagcccgccagcccccgcttcctaagccattccctagtggagctgctcaaccagatcagcccgaccttcaagaagaacttcgctgtgctgcagaagaaaagggtccagcgccacccgttcgagaggatcgccaccccattccaggtgtacagctggacagccccccaggcggagcatgccatggattgcgtgcgtgcagaggacgcctacacctcgaggctgggctatgaggagcacattcctggacagacccgagactggaatgaggagctgcagacgacgagggagctgcctcgcaagaacctgcctgagcggctgctccgagaaagggccatattcaaggtgcacagcgacttcaccgcggcagccaccaggggcgccatggccgtcattgacggcaacgtgatggccatcaaccccagcgaggagaccaagatgcagatgttcatctggaacaacatcttcttcagcctgggcttcgacgtccgagaccactacaaggacttcgggggggacgtggcggcctacgtggcgcccaccaacgacctgaatggcgtccgcacgtacaacgcggtggacgtggaggggctgtacacgctgggcacggtggtggtggattaccgcggctaccgggtcacggcccagtccatcatccccggcatcctggagcgggaccaggagcagagcgtcatctacggctccatcgacttcggcaagaccgtggtgtcacacccgcggtacctggagctgctggagcgcacgagtcggcccctcaagatcctgcggcaccaggtgctcaacgaccgtgacgaggaggtggagctctgctcctcggtcgagtgcaagggcatcattggcaacgacgggcgccactacatcctcgacctgctgcgcaccttccccccggacctcaacttcctgcccgtgcctggcgaggagctgcctgaggaatgcgcccgcgccggcttcccccgcgcccaccggcacaagctctgctgcctgcgccaggagctggtggacgccttcgtggagcacaggtacctcctctttatgaagctggccgccttgcagctgatgcagcagaacgccagccagctggagaccccctcctccctggaaaatggtggtccttcctccttggagtccaagtctgaggatcctccaggacaggaggcgggaagtgaggaggagggtagcagcgccagcggcctggccaaggtgaaggagctggcagagaccatcgccgcagacgacggcacagaccctcggagccgggaggtgatccgcaacgcgtgcaaggcggtcggctccatcagcagcaccgccttcgacattcgcttcaatcctgacatcttctcaccaggggttcgtttccctgagtcctgccaggatgaagttcgggaccagaagcagctgctgaaggacgcggctgccttcctgctctcctgccagatccctggcttggtgaaggactgcatggagcacgcggtcctgcccgtggacggggcaacgctggcagaggtgatgcgccagcggggcatcaacatgcgctacctgggcaaggtgctggagctggtgctgcggagcccggcccgccaccagctggaccacgtctttaaaatcggcattggagaactcatcacccgctcggccaagcacatcttcaagacgtacttacagggagtcgagctctccggcctctcagccgccatcagccacttcctgaactgcttcctgagctcctacccaaaccccgtggcccacctgcccgccgacgagctggtctccaagaagcggaataagaggaggaaaaaccggcccccgggggctgcagataacacagcctgggctgtcatgaccccccaggagctctggaagaacatctgccaggaggccaagaactactttgacttcgacctcgagtgtgagaccgtggaccaggctgtggagacctacggcctgcagaagataacgctcctgcgggagatctcgctgaaaacagggatccaggtcctgctgaaggagtacagcttcgacagtcgccacaagcccgcgttcaccgaggaggacgtgctcaacatcttccccgtggtcaagcacgtcaaccccaaggcctcggatgccttccatttcttccagagcgggcaggccaaagtgcagcagggcttcctgaaggagggctgtgagctcatcaatgaggccctgaacctgtttaacaacgtctacggagccatgcacgtggagacctgcgcctgcctgcgcctcctcgcccgcctccactacatcatgggcgactacgcagaggccctgagtaaccagcagaaggcggtgctgatgagcgagcgggtgatgggcaccgagcaccccaacaccatccaggaatacatgcacctggccctgtactgcttcgccagcagccagctgtccaccgccctgagcctgctgtaccgcgcccgctacctcatgctgctggtgttcggggaagaccaccccgagatggcgctgctggacaacaacatcgggctggtgctgcacggggtgatggagtacgacctgtcgctgcgcttcctggagaacgcgctggccgtcagcaccaagtaccacgggcccaaggccctcaaggtggccctcagccaccaccttgtcgcccgagtctacgagagcaaagctgagttccggtcggccctgcagcacgagaaggagggttacaccatctacaagacgcagctgggcgaggaccatgagaagaccaaggaaagctccgagtacctcaagtgcctgacccagcaggccgtggccctgcagcgcaccatgaacgagatctaccgcaacggctccagcgccaacatcccgcccctcaagttcacggcccccagcatggccagcgtcttggagcagctgaacgtcattaacggcatcctcttcattcctctcagccaaaaagacctggagaatctgaaagccgaggtggcgcggcggcaccagctccaggaggccagcagaaacagggatagagccgaggagcccatggctaccgagcccgcgccagcgggggccccaggagacctgggctcccagcccccggctgccaaggacccttctccgagcgtgcagggatagagagggagccagacggacagccagccagcggccccgtcaccagggagcccgactgcgggagaagggggcgagcctgcgggcggaagaggaagcaaggccctcttcctccacgtctcaccccaccccacccccgtgtcctcctgggagcctggcctgcctgccccgcagaaggtgtttttgcgctggttcaatgaatagatgatgcagaggccccattggagacacgtgaatggcgtgtgcggccatcagttcccggctggggggcaggtgttgcttcggcccccgccctccggccggcgtgtgcgagtgcgcccctggctgtgagtgttgaccgttcctctcccctgtacatagcccgagccagtcctgagtgggtgactcctgagtgggtgacgcgcagacgggatttctcaggtcatttgtatggtcgacatgatggctgctgctttggctgccaccacccccgggcccagcctgtctgaaagttcagggtttaggccgaaaaacccggtggggaggggtggggagccggagctctgtggcggggctggagggctggggtgcactttagtttggggcgggacgggagccgccgttgtgactggcgtggtctggctgctgctcccgaacggaggggtcggggttggcttgctgggccctcagagcccagtgggtggctctgactcggctccctactccctgcacccagctgggcgcagccttggggcctgcggtctgaatgtatccctcccctcagttttaacctgagctgccgaacgcacagtgggccgggggcgaggctgggggaagcggggcccaattacggatcccgggagttacaggtgccgacgtgatgtcgcttctctggtgcccagctcccttcctggtctgagactagctctgggggtggcgggggcccccacacgctgctcccgctccaccctgcccgtgctgctgctctgtgcctgctgtcagagccctggtgggggaggatgtggccaccctgagacccggaggagacgggcgtctgcctgggtttgcggagagccgcttatgggtgtggtccgtccagacaccttgtttcaagggggatgggcgtgagcgggcaagcagagcatccccaccgctgagcaagaactttttcttgtttttaaaccatcacgtcctcatttcacattggaataaagtgagtttttgaaacctgcg

SEQ ID NO: 368569 - DNA, 3079 bp, Homo sapiens
tcccacatggttagagggggcctgtaccaccaccgggctcttggttcttggcctgcgctcctgccagaggctgggcacattctgacatcctgactgggagctggagccttcggggtccttctccagggcctcccaggatagctgtgctcccccagaaggactcagttgggtggaggcagaggagctgggtgggggcctgagctgctgcagcccgcaggtgaaggactgcatggagcacgcggtcctgcccgtggacggggcaacgctggcagaggtgatgcgccagcggggcatcaacatgcgctacctgggcaaggtgctggagctggtgctgcggagcccggcccgccaccagctggaccacgtctttaaaatcggcattggagaactcatcacccgctcggccaagcacatcttcaagacgtacttacagggagtcgagctctccggcctctcagccgccatcagccacttcctgaactgcttcctgagctcctacccaaaccccgtggcccacctgcccgccgacgagctggtctccaagaagcggaataagaggaggaaaaaccggcccccgggggctgcagataacacagcctgggctgtcatgaccccccaggagctctggaagaacatctgccaggaggccaagaactactttgacttcgacctcgagtgtgagaccgtggaccaggctgtggagacctacggcctgcagaagataacgctcctgcgggagatctcgctgaaaacagggatccaggtcctgctgaaggagtacagcttcgacagtcgccacaagcccgcgttcaccgaggaggacgtgctcaacatcttccccgtggtcaagcacgtcaaccccaaggcctcggatgccttccatttcttccagagcgggcaggccaaagtgcagcagggcttcctgaaggagggctgtgagctcatcaatgaggccctgaacctgtttaacaacgtctacggagccatgcacgtggagacctgcgcctgcctgcgcctcctcgcccgcctccactacatcatgggcgactacgcagaggccctgagtaaccagcagaaggcggtgctgatgagcgagcgggtgatgggcaccgagcaccccaacaccatccaggaatacatgcacctggccctgtactgcttcgccagcagccagctgtccaccgccctgagcctgctgtaccgcgcccgctacctcatgctgctggtgttcggggaagaccaccccgagatggcgctgctggacaacaacatcgggctggtgctgcacggggtgatggagtacgacctgtcgctgcgcttcctggagaacgcgctggccgtcagcaccaagtaccacgggcccaaggccctcaaggtggccctcagccaccaccttgtcgcccgagtctacgagagcaaagctgagttccggtcggccctgcagcacgagaaggagggttacaccatctacaagacgcagctgggcgaggaccatgagaagaccaaggaaagctccgagtacctcaagtgcctgacccagcaggccgtggccctgcagcgcaccatgaacgagatctaccgcaacggctccagcgccaacatcccgcccctcaagttcacggcccccagcatggccagcgtcttggagcagctgaacgtcattaacggcatcctcttcattcctctcagccaaaaagacctggagaatctgaaagccgaggtggcgcggcggcaccagctccaggaggccagcagaaacagggatagagccgaggagcccatggctaccgagcccgcgccagcgggggccccaggagacctgggctcccagcccccggctgccaaggacccttctccgagcgtgcagggatagagagggagccagacggacagccagccagcggccccgtcaccagggagcccgactgcgggagaagggggcgagcctgcgggcggaagaggaagcaaggccctcttcctccacgtctcaccccaccccacccccgtgtcctcctgggagcctggcctgcctgccccgcagaaggtgtttttgcgctggttcaatgaatagatgatgcagaggccccattggagacacgtgaatggcgtgtgcggccatcagttcccggctggggggcaggtgttgcttcggcccccgccctccggccggcgtgtgcgagtgcgcccctggctgtgagtgttgaccgttcctctcccctgtacatagcccgagccagtcctgagtgggtgactcctgagtgggtgacgcgcagacgggatttctcaggtcatttgtatggtcgacatgatggctgctgctttggctgccaccacccccgggcccagcctgtctgaaagttcagggtttaggccgaaaaacccggtggggaggggtggggagccggagctctgtggcggggctggagggctggggtgcactttagtttggggcgggacgggagccgccgttgtgactggcgtggtctggctgctgctcccgaacggaggggtcggggttggcttgctgggccctcagagcccagtgggtggctctgactcggctccctactccctgcacccagctgggcgcagccttggggcctgcggtctgaatgtatccctcccctcagttttaacctgagctgccgaacgcacagtgggccgggggcgaggctgggggaagcggggcccaattacggatcccgggagttacaggtgccgacgtgatgtcgcttctctggtgcccagctcccttcctggtctgagactagctctgggggtggcgggggcccccacacgctgctcccgctccaccctgcccgtgctgctgctctgtgcctgctgtcagagccctggtgggggaggatgtggccaccctgagacccggaggagacgggcgtctgcctgggtttgcggagagccgcttatgggtgtggtccgtccagacaccttgtttcaagggggatgggcgtgagcgggcaagcagagcatccccaccgctgagcaagaactttttcttgtttttaaaccatcacgtcctcatttcacattggaataaagtgagtttttgaaacctgcg

SEQ ID NO: 368570 - DNA, 5173 bp, Homo sapiens
ggcggccgccccggccgacagcgcccgggaacacggctcgcaggccgggggcaaggggcggccgggcgcggccgagctgccatcagtcatgctcttaaacggggactgcccagagagcctgaagaaggaggcggcggcggccgagccacccagggaaaatgggcttgacgaggccggcccgggagatgagaccaccggccaggaagtcattgtcattcaggacacgggcttttctgtgaagatcctcgcccctgggatcgagcccttctccctgcaggtgtccccccaggagatggtgcaggagattcaccaggtgctcatggaccgggaggacacgtgtcaccgtacctgcttctcactgcacctggatggcaacgtgctggaccacttctcggagctgcgcagcgtcgaggggctgcaggagggctctgtgctgcgtgtggtggaagagccgtacacggtgcgtgaggcccgcatccacgtgcgccatgtccgagacctgctcaagagcctggacccatccgatgccttcaacggggttgactgcaactccttgtccttcctgagtgtcttcaccgacggcgacctgggagacagcgggaagcggaagaagggcttggagatggaccccatcgactgcacaccacccgagtacatcctgccagggagccgggagcggccactgtgtcccctgcagccccaaaaccgtgactggaagcccttgcagtgcctgaaagtactcaccatgagcggatggaacccgcccccggggaaccggaagatgcacggggacctcatgtacctgtttgtgatcacagccgaggaccggcaagtcagcatcaccgcgtccacacggggcttttacctgaatcagtccacagcttatcacttcaaccccaagcccgccagcccccgcttcctaagccattccctagtggagctgctcaaccagatcagcccgaccttcaagaagaacttcgctgtgctgcagaagaaaagggtccagcgccacccgttcgagaggatcgccaccccattccaggtgtacagctggacagccccccaggcggagcatgccatggattgcgtgcgtgcagaggacgcctacacctcgaggctgggctatgaggagcacattcctggacagacccgagactggaatgaggagctgcagacgacgagggagctgcctcgcaagaacctgcctgagcggctgctccgagaaagggccatattcaaggtgcacagcgacttcaccgcggcagccaccaggggcgccatggccgtcattgacggcaacgtgatggccatcaaccccagcgaggagaccaagatgcagatgttcatctggaacaacatcttcttcagcctgggcttcgacgtccgagaccactacaaggacttcgggggggacgtggcggcctacgtggcgcccaccaacgacctgaatggcgtccgcacgtacaacgcggtggacgtggaggggctgtacacgctgggcacggtggtggtggattaccgcggctaccgggtcacggcccagtccatcatccccggcatcctggagcgggaccaggagcagagcgtcatctacggctccatcgacttcggcaagaccgtggtgtcacacccgcggtacctggagctgctggagcgcacgagtcggcccctcaagatcctgcggcaccaggtgctcaacgaccgtgacgaggaggtggagctctgctcctcggtcgagtgcaagggcatcattggcaacgacgggcgccactacatcctcgacctgctgcgcaccttccccccggacctcaacttcctgcccgtgcctggcgaggagctgcctgaggaatgcgcccgcgccggcttcccccgcgcccaccggcacaagctctgctgcctgcgccaggagctggtggacgccttcgtggagcacaggtacctcctctttatgaagctggccgccttgcagctgatgcagcagaacgccagccagctggagaccccctcctccctggaaaatggtggtccttcctccttggagtccaagtctgaggatcctccaggacaggaggcgggaagtgaggaggagggtagcagcgccagcggcctggccaaggtgaaggagctggcagagaccatcgccgcagacgacggcacagaccctcggagccgggaggtgatccgcaacgcgtgcaaggcggtcggctccatcagcagcaccgccttcgacattcgcttcaatcctgacatcttctcaccaggggttcgtttccctgagtcctgccaggatgaagttcgggaccagaagcagctgctgaaggacgcggctgccttcctgctctcctgccagatccctggcttggtgaaggactgcatggagcacgcggtcctgcccgtggacggggcaacgctggcagaggtgatgcgccagcggggcatcaacatgcgctacctgggcaaggtgctggagctggtgctgcggagcccggcccgccaccagctggaccacgtctttaaaatcggcattggagaactcatcacccgctcggccaagcacatcttcaagacgtacttacagggagtcgagctctccggcctctcagccgccatcagccacttcctgaactgcttcctgagctcctacccaaaccccgtggcccacctgcccgccgacgagctggtctccaagaagcggaataagaggaggaaaaaccggcccccgggggctgcagataacacagcctgggctgtcatgaccccccaggagctctggaagaacatctgccaggaggccaagaactactttgacttcgacctcgagtgtgagaccgtggaccaggctgtggagacctacggcctgcagaagataacgctcctgcgggagatctcgctgaaaacagggatccaggtcctgctgaaggagtacagcttcgacagtcgccacaagcccgcgttcaccgaggaggacgtgctcaacatcttccccgtggtcaagcacgtcaaccccaaggcctcggatgccttccatttcttccagagcgggcaggccaaagtgcagcagggcttcctgaaggagggctgtgagctcatcaatgaggccctgaacctgtttaacaacgtctacggagccatgcacgtggagacctgcgcctgcctgcgcctcctcgcccgcctccactacatcatgggcgactacgcagaggccctgagtaaccagcagaaggcggtgctgatgagcgagcgggtgatgggcaccgagcaccccaacaccatccaggaatacatgcacctggccctgtactgcttcgccagcagccagctgtccaccgccctgagcctgctgtaccgcgcccgctacctcatgctgctggtgttcggggaagaccaccccgagatggcgctgctggacaacaacatcgggctggtgctgcacggggtgatggagtacgacctgtcgctgcgcttcctggagaacgcgctggccgtcagcaccaagtaccacgggcccaaggccctcaaggtggccctcagccaccaccttgtcgcccgagtctacgagagcaaagctgagttccggtcggccctgcagcacgagaaggagggttacaccatctacaagacgcagctgggcgaggaccatgagaagaccaaggaaagctccgagtacctcaagtgcctgacccagcaggccgtggccctgcagcgcaccatgaacgagatctaccgcaacggctccagcgccaacatcccgcccctcaagttcacggcccccagcatggccagcgtcttggagcagctgaacgtcattaacggcatcctcttcattcctctcagccaaaaagacctggagaatctgaaagccgaggtggcgcggcggcaccagctccaggaggccagcagaaacagggatagagccgaggagcccatggctaccgagcccgcgccagcgggggccccaggagacctgggctcccagcccccggctgccaaggacccttctccgagcgtgcagggatagagagggagccagacggacagccagccagcggccccgtcaccagggagcccgactgcgggagaagggggcgagcctgcgggcggaagaggaagcaaggccctcttcctccacgtctcaccccaccccacccccgtgtcctcctgggagcctggcctgcctgccccgcagaaggtgtttttgcgctggttcaatgaatagatgatgcagaggccccattggagacacgtgaatggcgtgtgcggccggcgtgtgcgagtgcgcccctggctgtgagtgttgaccgttcctctcccctgtacatagcccgagccagtcctgagtgggtgactcctgagtgggtgacgcgcagacgggatttctcaggtcatttgtatggtcgacatgatggctgctgctttggctgccaccacccccgggcccagcctgtctgaaagttcagggtttaggccgaaaaacccggtggggaggggtggggagccggagctctgtggcggggctggagggctggggtgcactttagtttggggcgggacgggagccgccgttgtgactggcgtggtctggctgctgctcccgaacggaggggtcggggttggcttgctgggccctcagagcccagtgggtggctctgactcggctccctactccctgcacccagctgggcgcagccttggggcctgcggtctgaatgtatccctcccctcagttttaacctgagctgccgaacgcacagtgggccgggggcgaggctgggggaagcggggcccaattacggatcccgggagttacaggtgccgacgtgatgtcgcttctctggtgcccagctcccttcctggtctgagactagctctgggggtggcgggggcccccacacgctgctcccgctccaccctgcccgtgctgctgctctgtgcctgctgtcagagccctggtgggggaggatgtggccaccctgagacccggaggagacgggcgtctgcctgggtttgcggagagccgcttatgggtgtggtccgtccagacaccttgtttcaagggggatgggcgtgagcgggcaagcagagcatccccaccgctgagcaagaactttttcttgtttttaaaccatcacgtcctcatttcacattggaataaagtgagtttttgaaacctgcg

SEQ ID NO: 368571 - DNA, 5354 bp, Homo sapiens
ggcggccgccccggccgacagcgcccgggaacacggctcgcaggccgggggcaaggggcggccgggcgcggccgagctgccatcagtcatgctcttaaacggggactgcccagagagcctgaagaaggaggcggcggcggccgagccacccagggaaaatgggcttgacgaggccggcccgggagatgagaccaccggccaggaagtcattgtcattcaggacacgggcttttctgtgaagatcctcgcccctgggatcgagcccttctccctgcaggtgtccccccaggagatggtgcaggagattcaccaggtgctcatggaccgggaggacacgtgtcaccgtacctgcttctcactgcacctggatggcaacgtgctggaccacttctcggagctgcgcagcgtcgaggggctgcaggagggctctgtgctgcgtgtggtggaagagccgtacacggtgcgtgaggcccgcatccacgtgcgccatgtccgagacctgctcaagagcctggacccatccgatgccttcaacggggttgactgcaactccttgtccttcctgagtgtcttcaccgacggcgacctgggagacagcgggaagcggaagaagggcttggagatggaccccatcgactgcacaccacccgagtacatcctgccagggagccgggagcggccactgtgtcccctgcagccccaaaaccgtgactggaagcccttgcagtgcctgaaagtactcaccatgagcggatggaacccgcccccggggaaccggaagatgcacggggacctcatgtacctgtttgtgatcacagccgaggaccggcaagtcagcatcaccgcgtccacacggggcttttacctgaatcagtccacagcttatcacttcaaccccaagcccgccagcccccgcttcctaagccattccctagtggagctgctcaaccagatcagcccgaccttcaagaagaacttcgctgtgctgcagaagaaaagggtccagcgccacccgttcgagaggatcgccaccccattccaggtgtacagctggacagccccccaggcggagcatgccatggattgcgtgcgtgcagaggacgcctacacctcgaggctgggctatgaggagcacattcctggacagacccgagactggaatgaggagctgcagacgacgagggagctgcctcgcaagaacctgcctgagcggctgctccgagaaagggccatattcaaggtgcacagcgacttcaccgcggcagccaccaggggcgccatggccgtcattgacggcaacgtgatggccatcaaccccagcgaggagaccaagatgcagatgttcatctggaacaacatcttcttcagcctgggcttcgacgtccgagaccactacaaggacttcgggggggacgtggcggcctacgtggcgcccaccaacgacctgaatggcgtccgcacgtacaacgcggtggacgtggaggggctgtacacgctgggcacggtggtggtggattaccgcggctaccgggtcacggcccagtccatcatccccggcatcctggagcgggaccaggagcagagcgtcatctacggctccatcgacttcggcaagaccgtggtgtcacacccgcggtacctggagctgctggagcgcacgagtcggcccctcaagatcctgcggcaccaggtgctcaacgaccgtgacgaggaggtggagctctgctcctcggtcgagtgcaagggcatcattggcaacgacgggcgccactacatcctcgacctgctgcgcaccttccccccggacctcaacttcctgcccgtgcctggcgaggagctgcctgaggaatgcgcccgcgccggcttcccccgcgcccaccggcacaagctctgctgcctgcgccaggagctggtggacgccttcgtggagcacaggtacctcctctttatgaagctggccgccttgcagctgatgcagcagaacgccagccagctggagaccccctcctccctggaaaatggtggtccttcctccttggagtccaagtctgaggatcctccaggacaggaggcgggaagtgaggaggagggtagcagcgccagcggcctggccaaggtgaaggagctggcagagaccatcgccgcagacgacggcacagaccctcggagccgggaggtgatccgcaacgcgtgcaaggcggtcggctccatcagcagcaccgccttcgacattcgcttcaatcctgacatcttctcaccaggggttcgtttccctgagtcctgccaggatgaagttcgggaccagaagcagctgctgaaggacgcggctgccttcctgctctcctgccagatccctggcttggtgaaggactgcatggagcacgcggtcctgcccgtggacggggcaacgctggcagaggtgatgcgccagcggggcatcaacatgcgctacctgggcaaggtgctggagctggtgctgcggagcccggcccgccaccagctggaccacgtctttaaaatcggcattggagaactcatcacccgctcggccaagcacatcttcaagacgtacttacagggagtcgagctctccggcctctcagccgccatcagccacttcctgaactgcttcctgagctcctacccaaaccccgtggcccacctgcccgccgacgagctggtctccaagaagcggaataagaggaggaaaaaccggcccccgggggctgcagataacacagcctgggctgtcatgaccccccaggagctctggaagaacatctgccaggaggccaagaactactttgacttcgacctcgagtgtgagaccgtggaccaggctgtggagacctacggcctgcagaagataacgctcctgcgggagatctcgctgaaaacagggatccaggtcctgctgaaggagtacagcttcgacagtcgccacaagcccgcgttcaccgaggaggacgtgctcaacatcttccccgtggtcaagcacgtcaaccccaaggcctcggatgccttccatttcttccagagcgggcaggccaaagtgcagcagggcttcctgaaggagggctgtgagctcatcaatgaggccctgaacctgtttaacaacgtctacggagccatgcacgtggagacctgcgcctgcctgcgcctcctcgcccgcctccactacatcatgggcgactacgcagaggccctgagtaaccagcagaaggcggtgctgatgagcgagcgggtgatgggcaccgagcaccccaacaccatccaggaatacatgcacctggccctgtactgcttcgccagcagccagctgtccaccgccctgagcctgctgtaccgcgcccgctacctcatgctgctggtgttcggggaagaccaccccgagatggcgctgctggacaacaacatcgggctggtgctgcacggggtgatggagtacgacctgtcgctgcgcttcctggagaacgcgctggccgtcagcaccaagtaccacgggcccaaggccctcaaggtggccctcagccaccaccttgtcgcccgagtctacgagagcaaagctgagttccggtcggccctgcagcacgagaaggagggttacaccatctacaagacgcagctgggcgaggaccatgagaagaccaaggaaagctccgagtacctcaagtgcctgacccagcaggccgtggccctgcagcgcaccatgaacgagatctaccgcaacggctccagcgccaacatcccgcccctcaagttcacggcccccagcatggccagcgtcttggagcagctgaacgtcattaacggcatcctcttcattcctctcagccaaaaagacctggagaatctgaaagccgaggtggcgcggcggcaccagctccaggaggccagcagaaacagggatagagccgaggagcccatggctaccgagcccgcgccagcgggggccccaggagacctgggctcccagcccccggctgccaaggacccttctccgagcgtgcagggatagagagggagccagacggacagccagccagcggccccgtcaccagggagcccgactgcgggagaagggggcgagcctgcgggcggaagaggaagcaaggccctcttcctccacgtctcaccccaccccacccccgtgtcctcctgggagcctggcctgcctgccccgcagaaggtgtttttgcgctggttcaatgaatagatgatgcagaggccccattggagacacgtgaatggcgtgtgcggccatcagttcccggctggggggcaggtgttgcttcggcccccgccctccggccggcgtgtgcgagtgcgcccctggctgtgagtgttgaccgttcctctcccctgtacatagcccgagccagtcctgagtgggtgactcctgagtgggtgacgcgcagacgggatttctcaggtcatttgtatggtcgacatgatggctgctgctttggctgccaccacccccgggcccagcctgtctgaaagttcagggtttaggccgaaaaacccggtggggaggggtggggagccggagctctgtggcggggctggagggctggggtgcactttagtttggggcgggacgggagccgccgttgtgactggcgtggtctggctgctgctcccgaacggaggggtcggggttggcttgctgggccctcagagcccagtgggtggctctgactcggctccctactccctgcacccagctgggcgcagccttggggcctgcggtctgaatgtatccctcccctcagttttaacctgagctgccgaacgcacagtgggccgggggcgaggctgggggaagcggggcccaattacggatcccgggagttacaggtgccgacgtgatgtcgcttctctggtgcccagctcccttcctggtctgagactagctctgggggtggcgggggcccccacacgctgctcccgctccaccctgcccgtgctgctgctctgtgcctgctgtcagagccctggtgggggaggatgtggccaccctgagacccggaggagacgggcgtctgcctgggtttgcggagagccgcttatgggtgtggtccgtccagacaccttgtttcaagggggatgggcgtgagcgggcaagcagagcatccccaccgctgagcaagaactttttcttgtttttaaaccatcacgtcctcatttcacattggaataaagtgagtttttgaaacctgcgaaaaaaaaaaaaagggggcggcaaaaatccccagagggccaagtaacgcgaacccggttttggacaaaggcccaagagacggataaaagaagaaggcgccatttaaaccgtgcgggaatgtctggactgg

SEQ ID NO: 368572 - DNA, 4257 bp, Homo sapiens
ggcggccgccccggccgacagcgcccgggaacacggctcgcaggccgggggcaaggggcggccgggcgcggccgagctgccatcagtcatgctcttaaacggggactgcccagagagcctgaagaaggaggcggcggcggccgagccacccagggaaaatgggcttgacgaggccggcccgggagatgagaccaccggccaggaagtcattgtcattcaggacacgggcttttctgtgaagatcctcgcccctgggatcgagcccttctccctgcaggtgtccccccaggagatggtgcaggagattcaccaggtgctcatggaccgggaggacacgtgtcaccgtacctgcttctcactgcacctggatggcaacgtgctggaccacttctcggagctgcgcagcgtcgaggggctgcaggagggctctgtgctgcgtgtggtggaagagccgtacacggtgcgtgaggcccgcatccacgtgcgccatgtccgagacctgctcaagagcctggacccatccgatgccttcaacggggttgactgcaactccttgtccttcctgagtgtcttcaccgacggcgacctgggagacagcgggaagcggaagaagggcttggagatggaccccatcgactgcacaccacccgagtacatcctgccagggagccgggagcggccactgtgtcccctgcagccccaaaaccgtgactggaagcccttgcagtgcctgaaagtactcaccatgagcggatggaacccgcccccggggaaccggaagatgcacggggacctcatgtacctgtttgtgatcacagccgaggaccggcaagtcagcatcaccgcgtccacacggggcttttacctgaatcagtccacagcttatcacttcaaccccaagcccgccagcccccgcttcctaagccattccctagtggagctgctcaaccagatcagcccgaccttcaagaagaacttcgctgtgctgcagaagaaaagggtccagcgccacccgttcgagaggatcgccaccccattccaggtgtacagctggacagccccccaggcggagcatgccatggattgcgtgcgtgcagaggacgcctacacctcgaggctgggctatgaggagcacattcctggacagacccgagactggaatgaggagctgcagacgacgagggagctgcctcgcaagaacctgcctgagcggctgctccgagaaagggccatattcaaggtgcacagcgacttcaccgcggcagccaccaggggcgccatggccgtcattgacggcaacgtgatggccatcaaccccagcgaggagaccaagatgcagatgttcatctggaacaacatcttcttcagcctgggcttcgacgtccgagaccactacaaggacttcgggggggacgtggcggcctacgtggcgcccaccaacgacctgaatggcgtccgcacgtacaacgcggtggacgtggaggggctgtacacgctgggcacggtggtggtggattaccgcggctaccgggtcacggcccagtccatcatccccggcatcctggagcgggaccaggagcagagcgtcatctacggctccatcgacttcggcaagaccgtggtgtcacacccgcggtacctggagctgctggagcgcacgagtcggcccctcaagatcctgcggcaccaggtgctcaacgaccgtgacgaggaggtggagctctgctcctcggtcgagtgcaagggcatcattggcaacgacgggcgccactacatcctcgacctgctgcgcaccttccccccggacctcaacttcctgcccgtgcctggcgaggagctgcctgaggaatgcgcccgcgccggcttcccccgcgcccaccggcacaagctctgctgcctgcgccaggagctggtggacgccttcgtggagcacaggtacctcctctttatgaagctggccgccttgcagctgatgcagcagaacgccagccagctggagaccccctcctccctggaaaatggtggtccttcctccttggagtccaagtctgaggatcctccaggacaggaggcgggaagtgaggaggagggtagcagcgccagcggcctggccaaggtgaaggagctggcagagaccatcgccgcagacgacggcacagaccctcggagccgggaggtgatccgcaacgcgtgcaaggcggtcggctccatcagcagcaccgccttcgacattcgcttcaatcctgacatcttctcaccaggggttcgtttccctgagtcctgccaggatgaagttcgggaccagaagcagctgctgaaggacgcggctgccttcctgctctcctgccagatccctggcttggtgaaggactgcatggagcacgcggtcctgcccgtggacggggcaacgctggcagaggtgatgcgccagcggggcatcaacatgcgctacctgggcaaggtgctggagctggtgctgcggagcccggcccgccaccagctggaccacgtctttaaaatcggcattggagaactcatcacccgctcggccaagcacatcttcaagacgtacttacagggagtcgagctctccggcctctcagccgccatcagccacttcctgaactgcttcctgagctcctacccaaaccccgtggcccacctgcccgccgacgagctggtctccaagaagcggaataagaggaggaaaaaccggcccccgggggctgcagataacacagcctgggctgtcatgaccccccaggagctctggaagaacatctgccaggaggccaagaactactttgacttcgacctcgagtgtgagaccgtggaccaggctgtggagacctacggcctgcagaagataacgctcctgcgggagatctcgctgaaaacagggatccaggtcctgctgaaggagtacagcttcgacagtcgccacaagcccgcgttcaccgaggaggacgtgctcaacatcttccccgtggtcaagcacgtcaaccccaaggcctcggatgccttccatttcttccagagcgggcaggccaaagtgcagcagggcttcctgaaggagggctgtgagctcatcaatgaggccctgaacctgtttaacaacgtctacggagccatgcacgtggagacctgcgcctgcctgcgcctcctcgcccgcctccactacatcatgggcgactacgcagaggccctgagtaaccagcagaaggcggtgctgatgagcgagcgggtgatgggcaccgagcaccccaacaccatccaggaatacatgcacctggccctgtactgcttcgccagcagccagctgtccaccgccctgagcctgctgtaccgcgcccgctacctcatgctgctggtgttcggggaagaccaccccgagatggcgctgctggacaacaacatcgggctggtgctgcacggggtgatggagtacgacctgtcgctgcgcttcctggagaacgcgctggccgtcagcaccaagtaccacgggcccaaggccctcaaggtggccctcagccaccaccttgtcgcccgagtctacgagagcaaagctgagttccggtcggccctgcagcacgagaaggagggttacaccatctacaagacgcagctgggcgaggaccatgagaagaccaaggaaagctccgagtacctcaagtgcctgacccagcaggccgtggccctgcagcgcaccatgaacgagatctaccgcaacggctccagcgccaacatcccgcccctcaagttcacggcccccagcatggccagcgtcttggagcagctgaacgtcattaacggcatcctcttcattcctctcagccaaaaagacctggagaatctgaaagccgaggtggcgcggcggcaccagctccaggaggccagcagaaacagggatagagccgaggagcccatggctaccgagcccgcgccagcgggggccccaggagacctgggctcccagcccccggctgccaaggacccttctccgagcgtgcagggatagagagggagccagacggacagccagccagcggccccgtcaccagggagcccgactgcgggagaagggggcgagcctgcgggcggaagaggaagcaaggccctcttcctccacgtctcaccccaccccacccccgtgtcctcctgggagcctggcctgcctgccccgcagaaggtgtttttgcgctggttcaatgaatagatgatgcagaggccccattggagacacgtgaatggcgtgtg

SEQ ID NO: 368573 - DNA, 2654 bp, Homo sapiens
ggcggccgccccggccgacagcgcccgggaacacggctcgcaggccgggggcaaggggcggccgggcgcggccgagctgccatcagtcatgctcttaaacggggactgcccagagagcctgaagaaggaggcggcggcggccgagccacccagggaaaatgggcttgacgaggccggcccgggagatgagaccaccggccaggaagtcattgtcattcaggacacgggcttttctgtgaagatcctcgcccctgggatcgagcccttctccctgcaggtgtccccccaggagatggtgcaggagattcaccaggtgctcatggaccgggaggacacgtgtcaccgtacctgcttctcactgcacctggatggcaacgtgctggaccacttctcggagctgcgcagcgtcgaggggctgcaggagggctctgtgctgcgtgtggtggaagagccgtacacggtgcgtgaggcccgcatccacgtgcgccatgtccgagacctgctcaagagcctggacccatccgatgccttcaacggggttgactgcaactccttgtccttcctgagtgtcttcaccgacggcgacctgggagacagcgggaagcggaagaagggcttggagatggaccccatcgactgcacaccacccgagtacatcctgccagggagccgggagcggccactgtgtcccctgcagccccaaaaccgtgactggaagcccttgcagtgcctgaaagtactcaccatgagcggatggaacccgcccccggggaaccggaagatgcacggggacctcatgtacctgtttgtgatcacagccgaggaccggcaagtcagcatcaccgcgtccacacggggcttttacctgaatcagtccacagcttatcacttcaaccccaagcccgccagcccccgcttcctaagccattccctagtggagctgctcaaccagatcagcccgaccttcaagaagaacttcgctgtgctgcagaagaaaagggtccagcgccacccgttcgagaggatcgccaccccattccaggtgtacagctggacagccccccaggcggagcatgccatggattgcgtgcgtgcagaggacgcctacacctcgaggctgggctatgaggagcacattcctggacagacccgagactggaatgaggagctgcagacgacgagggagctgcctcgcaagaacctgcctgagcggctgctccgagaaagggccatattcaaggtgcacagcgacttcaccgcggcagccaccaggggcgccatggccgtcattgacggcaacgtgatggccatcaaccccagcgaggagaccaagatgcagatgttcatctggaacaacatcttcttcagcctgggcttcgacgtccgagaccactacaaggacttcgggggggacgtggcggcctacgtggcgcccaccaacgacctgaatggcgtccgcacgtacaacgcggtggacgtggaggggctgtacacgctgggcacggtggtggtggattaccgcggctaccgggtcacggcccagtccatcatccccggcatcctggagcgggaccaggagcagagcgtcatctacggctccatcgacttcggcaagaccgtggtgtcacacccgcggtacctggagctgctggagcgcacgagtcggcccctcaagatcctgcggcaccaggtgctcaacgaccgtgacgaggaggtggagctctgctcctcggtcgagtgcaagggcatcattggcaacgacgggcgccactacatcctcgacctgctgcgcaccttccccccggacctcaacttcctgcccgtgcctggcgaggagctgcctgaggaatgcgcccgcgccggcttcccccgcgcccaccggcacaagctctgctgcctgcgccaggagctggtggacgccttcgtggagcacaggtacctcctctttatgaagctggccgccttgcagctgatgcagcagaacgccagccagctggagaccccctcctccctggaaaatggtggtccttcctccttggagtccaagtctgaggatcctccaggacaggaggcgggaagtgaggaggagggtagcagcgccagcggcctggccaaggtgaaggagctggcagagaccatcgccgcagacgacggcacagaccctcggagccgggaggtgatccgcaacgcgtgcaaggcggtcggctccatcagcagcaccgccttcgacattcgcttcaatcctgacatcttctcaccaggggttcgtttccctgagtcctgccaggatgaagttcgggaccagaagcagctgctgaaggacgcggctgccttcctgctctcctgccagatccctggcttggtgaaggactgcatggagcacgcggtccctgcccgtgctgctgctctgtgcctgctgtcagagccctggtgggggaggatgtggccaccctgagacccggaggagacgggcgtctgcctgggtttgcggagagccgcttatgggtgtggtccgtccagacaccttgtttcaagggggatgggcgtgagcgggcaagcagagcatccccaccgctgagcaagaactttttcttgtttttaaaccatcacgtcctcatttcacattggaataaagtgagtttttgaaacctgcg

SEQ ID NO: 368574 - DNA, 2759 bp, Homo sapiens
ggcggccgccccggccgacagcgcccgggaacacggctcgcaggccgggggcaaggggcggccgggcgcggccgagctgccatcagtcatgctcttaaacggggactgcccagagagcctgaagaaggaggcggcggcggccgagccacccagggaaaatgggcttgacgaggccggcccgggagatgagaccaccggccaggaagtcattgtcattcaggacacgggcttttctgtgaagatcctcgcccctgggatcgagcccttctccctgcaggtgtccccccaggagatggtgcaggagattcaccaggtgctcatggaccgggaggacacgtgtcaccgtacctgcttctcactgcacctggatggcaacgtgctggaccacttctcggagctgcgcagcgtcgaggggctgcaggagggctctgtgctgcgtgtggtggaagagccgtacacggtgcgtgaggcccgcatccacgtgcgccatgtccgagacctgctcaagagcctggacccatccgatgccttcaacggggttgactgcaactccttgtccttcctgagtgtcttcaccgacggcgacctgggagacagcgggaagcggaagaagggcttggagatggaccccatcgactgcacaccacccgagtacatcctgccagggagccgggagcggccactgtgtcccctgcagccccaaaaccgtgactggaagcccttgcagtgcctgaaagtactcaccatgagcggatggaacccgcccccggggaaccggaagatgcacggggacctcatgtacctgtttgtgatcacagccgaggaccggcaagtcagcatcaccgcgtccacacggggcttttacctgaatcagtccacagcttatcacttcaaccccaagcccgccagcccccgcttcctaagccattccctagtggagctgctcaaccagatcagcccgaccttcaagaagaacttcgctgtgctgcagaagaaaagggtccagcgccacccgttcgagaggatcgccaccccattccaggtgtacagctggacagccccccaggcggagcatgccatggattgcgtgcgtgcagaggacgcctacacctcgaggctgggctatgaggagcacattcctggacagacccgagactggaatgaggagctgcagacgacgagggagctgcctcgcaagaacctgcctgagcggctgctccgagaaagggccatattcaaggtgcacagcgacttcaccgcggcagccaccaggggcgccatggccgtcattgacggcaacgtgatggccatcaaccccagcgaggagaccaagatgcagatgttcatctggaacaacatcttcttcagcctgggcttcgacgtccgagaccactacaaggacttcgggggggacgtggcggcctacgtggcgcccaccaacgacctgaatggcgtccgcacgtacaacgcggtggacgtggaggggctgtacacgctgggcacggtggtggtggattaccgcggctaccgggtcacggcccagtccatcatccccggcatcctggagcgggaccaggagcagagcgtcatctacggctccatcgacttcggcaagaccgtggtgtcacacccgcggtacctggagctgctggagcgcacgagtcggcccctcaagatcctgcggcaccaggtgctcaacgaccgtgacgaggaggtggagctctgctcctcggtcgagtgcaagggcatcattggcaacgacgggcgccactacatcctcgacctgctgcgcaccttccccccggacctcaacttcctgcccgtgcctggcgaggagctgcctgaggaatgcgcccgcgccggcttcccccgcgcccaccggcacaagctctgctgcctgcgccaggagctggtggacgccttcgtggagcacaggtacctcctctttatgaagctggccgccttgcagctgatgcagcagaacgccagccagctggagaccccctcctccctggaaaatggtggtccttcctccttggagtccaagtctgaggatcctccaggacaggaggcgggaagtgaggaggagggtagcagcgccagcggcctggccaaggtgaaggagctggcagagaccatcgccgcagacgacggcacagaccctcggagccgggaggtgatccgcaacgcgtgcaaggcggtcggctccatcagcagcaccgccttcgacattcgcttcaatcctgacatcttctcaccaggggttcgtttccctgagtcctgccaggatgaagttcgggaccagaagcagctgctgaaggacgcggctgccttcctgctctcctgccagatccctggcttggtgaaggactgcatggagcacgcggtcctgcccgtggacggggcaacgctggcagaggtgatgcgccagcggggcatcaacatgcgctacctgggcaaggtgctggagctggtgctgcggagcccggcccgccaccagctggaccacgtctttaaaatcggcattggagaactcatcacccgctcggccaagcacatcttcaagacgtacttacaggagtcgagctctccgggctctcagccgcatcagcattctgaaatggttcctgggtcctaccaaaccgtggccaacggcgcgaagagtgtctcaagagcggataggggggaaacggccggggtgggataaaagctggtgttgacccaggttggaacttgggggcagatattggtcctgtggc

SEQ ID NO: 368575 - DNA, 429 bp, Homo sapiens
cgcaagaacctgcctgagcggctgctccgagaaagggccatattcaaggtgcctgcagcctctgctgaccggcagtctgaggcccgctgtccacctgctgacgggttttctcatggagaggaggaaagcaagggaggcaggggcagccctaaccctgtcaggttccccgaaggccagtcagcgtctcccgcagggtctgctagccttccgcctcccagcagaccatcccagtacctttctctggcctctctgaggctttgagtccctggaaggagcgggccctacttcccatagggactgagtgtccagggccgtgcagcttcccgccctctgtgactgctgcggggcttttgcctgggcgagcactggccggccatggcccttctagggcgggtgctcatttgcataacacttttagtttgctggggt

SEQ ID NO: 368576 - DNA, 5224 bp, Homo sapiens
ggcggccgccccggccgacagcgcccgggaacacggctcgcaggccgggggcaaggggcggccgggcgcggccgagctgccatcagtcatgctcttaaacggggactgcccagagagcctgaagaaggaggcggcggcggccgagccacccagggaaaatgggcttgacgaggccggcccgggagatgagaccaccggccaggaagtcattgtcattcaggacacgggcttttctgtgaagatcctcgcccctgggatcgagcccttctccctgcaggtgtccccccaggagatggtgcaggagattcaccaggtgctcatggaccgggaggacacgtgtcaccgtacctgcttctcactgcacctggatggcaacgtgctggaccacttctcggagctgcgcagcgtcgaggggctgcaggagggctctgtgctgcgtgtggtggaagagccgtacacggtgcgtgaggcccgcatccacgtgcgccatgtccgagacctgctcaagagcctggacccatccgatgccttcaacggggttgactgcaactccttgtccttcctgagtgtcttcaccgacggcgacctgggagacagcgggaagcggaagaagggcttggagatggaccccatcgactgcacaccacccgagtacatcctgccagggagccgggagcggccactgtgtcccctgcagccccaaaaccgtgactggaagcccttgcagtgcctgaaagtactcaccatgagcggatggaacccgcccccggggaaccggaagatgcacggggacctcatgtacctgtttgtgatcacagccgaggaccggcaagtcagcatcaccgcgtccacacggggcttttacctgaatcagtccacagcttatcacttcaaccccaagcccgccagcccccgcttcctaagccattccctagtggagctgctcaaccagatcagcccgaccttcaagaagaacttcgctgtgctgcagaagaaaagggtccagcgccacccgttcgagaggatcgccaccccattccaggtgtacagctggacagccccccaggcggagcatgccatggattgcgtgcgtgcagaggacgcctacacctcgaggctgggctatgaggagcacattcctggacagacccgagactggaatgaggagctgcagacgacgagggagctgcctcgcaagaacctgcctgagcggctgctccgagaaagggccatattcaaggtgcacagcgacttcaccgcggcagccaccaggggcgccatggccgtcattgacggcaacgtgatggccatcaaccccagcgaggagaccaagatgcagatgttcatctggaacaacatcttcttcagcctgggcttcgacgtccgagaccactacaaggacttcgggggggacgtggcggcctacgtggcgcccaccaacgacctgaatggcgtccgcacgtacaacgcggtggacgtggaggggctgtacacgctgggcacggtggtggtggattaccgcggctaccgggtcacggcccagtccatcatccccggcatcctggagcgggaccaggagcagagcgtcatctacggctccatcgacttcggcaagaccgtggtgtcacacccgcggtacctggagctgctggagcgcacgagtcggcccctcaagatcctgcggcaccaggtgctcaacgaccgtgacgaggaggtggagctctgctcctcggtcgagtgcaagggcatcattggcaacgacgggcgccactacatcctcgacctgctgcgcaccttccccccggacctcaacttcctgcccgtgcctggcgaggagctgcctgaggaatgcgcccgcgccggcttcccccgcgcccaccggcacaagctctgctgcctgcgccaggagctggtggacgccttcgtggagcacaggtacctcctctttatgaagctggccgccttgcagctgatgcagcagaacgccagccagctggagaccccctcctccctggaaaatggtggtccttcctccttggagtccaagtctgaggatcctccaggacaggaggcgggaagtgaggaggagggtagcagcgccagcggcctggccaaggtgaaggagctggcagagaccatcgccgcagacgacggcacagaccctcggagccgggaggtgatccgcaacgcgtgcaaggcggtcggctccatcagcagcaccgccttcgacattcgcttcaatcctgacatcttctcaccaggggttcgtttccctgagtcctgccaggatgaagttcgggaccagaagcagctgctgaaggacgcggctgccttcctgctctcctgccagatccctggcttggtgaaggactgcatggagcacgcggtcctgcccgtggacggggcaacgctggcagaggtgatgcgccagcggggcatcaacatgcgctacctgggcaaggtgctggagctggtgctgcggagcccggcccgccaccagctggaccacgtctttaaaatcggcattggagaactcatcacccgctcggccaagcacatcttcaagacgtacttacagggagtcgagctctccggcctctcagccgccatcagccacttcctgaactgcttcctgagctcctacccaaaccccgtggcccacctgcccgccgacgagctggtctccaagaagcggaataagaggaggaaaaaccggcccccgggggctgcagataacacagcctgggctgtcatgaccccccaggagctctggaagaacatctgccaggaggccaagaactactttgacttcgacctcgagtgtgagaccgtggaccaggctgtggagacctacggcctgcagaagataacgctcctgcgggagatctcgctgaaaacagggatccaggtcctgctgaaggagtacagcttcgacagtcgccacaagcccgcgttcaccgaggaggacgtgctcaacatcttccccgtggtcaagcacgtcaaccccaaggcctcggatgccttccatttcttccagagcgggcaggccaaagtgcagcagggcttcctgaaggagggctgtgagctcatcaatgaggccctgaacctgtttaacaacgtctacggagccatgcacgtggagacctgcgcctgcctgcgcctcctcgcccgcctccactacatcatgggcgactacgcagaggccctgagtaaccagcagaaggcggtgctgatgagcgagcgggtgatgggcaccgagcaccccaacaccatccaggaatacatgcacctggccctgtactgcttcgccagcagccagctgtccaccgccctgagcctgctgtaccgcgcccgctacctcatgctgctggtgttcggggaagaccaccccgagatggcgctgctggacaacaacatcgggctggtgctgcacggggtgatggagtacgacctgtcgctgcgcttcctggagaacgcgctggccgtcagcaccaagtaccacgggcccaaggccctcaaggtggccctcagccaccaccttgtcgcccgagtctacgagagcaaagctgagttccggtcggccctgcagcacgagaaggagggttacaccatctacaagacgcagctgggcgaggaccatgagaagaccaaggaaagctccgagtacctcaagtgcctgacccagcaggccgtggccctgcagcgcaccatgaacgagatctaccgcaacggctccagcgccaacatcccgcccctcaagttcacggcccccagcatggccagcgtcttggagcagctgaacgtcattaacggcatcctcttcattcctctcagccaaaaagacctggagaatctgaaagccgaggtggcgcggcggcaccagctccaggaggccagcagaaacagggatagagccgaggagcccatggctaccgagcccgcgccagcgggggccccaggagacctgggctcccagcccccggctgccaaggacccttctccgagcgtgcagggatagagagggagccagacggacagccagccagcggccccgtcaccagggagcccgactgcgggagaagggggcgagcctgcgggcggaagaggaagcaaggccctcttcctccacgtctcaccccaccccacccccgtgtcctcctgggagcctggcctgcctgccccgcagaaggtgtttttgcgctggttcaatgaatagatgatgcagaggccccattggagacacgtgaatggcgtgtgcggccatcagttcccggctggggggcaggtgttgcttcggcccccgccctccggccggcgtgtgcgagtgcgcccctggctgtgagtgttgaccgttcctctcccctgtacatagcccgagccagtcctgagtgggtgactcctgagtgggtgacgcgcagacgggatttctcaggtcatttgtatggtcgacatgatggctgctgctttggctgccaccacccccgggcccagcctgtctgaaagttcagggtttaggccgaaaaacccggtggggaggggtggggagccggagctctgtggcggggctggagggctggggtgcactttagtttggggcgggacgggagccgccgttgtgactggcgtggtctggctgctgctcccgaacggaggggtcggggttggcttgctgggccctcagagcccagtgggtggctctgactcggctccctactccctgcacccagctgggcgcagccttggggcctgcggtctgaatgtatccctcccctcagttttaacctgagctgccgaacgcacagtgggccgggggcgaggctgggggaagcggggcccaattacggatcccgggagttacaggtgccgacgtgatgtcgcttctctggtgcccagctcccttcctggtctgagactagctctgggggtggcgggggcccccacacgctgctcccgctccaccctgcccgtgctgctgctctgtgcctgctgtcagagccctggtgggggaggatgtggccaccctgagacccggaggagacgggcgtctgcctgggtttgcggagagccgcttatgggtgtggtccgtccagacaccttgtttcaagggggatgggcgtgagcgggcaagcagagcatccccaccgctgagcaagaactttttcttgtttttaaaccatcacgtcctcatttcacattggaataaagtgagtttttgaaacctgcg

SEQ ID NO: 368577 - DNA, 4579 bp, Homo sapiens
gctcttctgcctttgacgccagggagcggccatcttgtgttcccttgcagccccaacaccgtgactggatatgcccttgcagtgcctgaaagtactcaccatgagcggatggaacccgcccccggggaaccggaagatgcacggggacctcatgtacctgtttgtgatcacagccgaggaccggcaagtcagcatcaccgcgtccacacggggcttttacctgaatcagtccacagcttatcacttcaaccccaagcccgccagcccccgcttcctaagccattccctagtggagctgctcaaccagatcagcccgaccttcaagaagaacttcgctgtgctgcagaagaaaagggtccagcgccacccgttcgagaggatcgccaccccattccaggtgtacagctggacagccccccaggcggagcatgccatggattgcgtgcgtgcagaggacgcctacacctcgaggctgggctatgaggagcacattcctggacagacccgagactggaatgaggagctgcagacgacgagggagctgcctcgcaagaacctgcctgagcggctgctccgagaaagggccatattcaaggtgcacagcgacttcaccgcggcagccaccaggggcgccatggccgtcattgacggcaacgtgatggccatcaaccccagcgaggagaccaagatgcagatgttcatctggaacaacatcttcttcagcctgggcttcgacgtccgagaccactacaaggacttcgggggggacgtggcggcctacgtggcgcccaccaacgacctgaatggcgtccgcacgtacaacgcggtggacgtggaggggctgtacacgctgggcacggtggtggtggattaccgcggctaccgggtcacggcccagtccatcatccccggcatcctggagcgggaccaggagcagagcgtcatctacggctccatcgacttcggcaagaccgtggtgtcacacccgcggtacctggagctgctggagcgcacgagtcggcccctcaagatcctgcggcaccaggtgctcaacgaccgtgacgaggaggtggagctctgctcctcggtcgagtgcaagggcatcattggcaacgacgggcgccactacatcctcgacctgctgcgcaccttccccccggacctcaacttcctgcccgtgcctggcgaggagctgcctgaggaatgcgcccgcgccggcttcccccgcgcccaccggcacaagctctgctgcctgcgccaggagctggtggacgccttcgtggagcacaggtacctcctctttatgaagctggccgccttgcagctgatgcagcagaacgccagccagctggagaccccctcctccctggaaaatggtggtccttcctccttggagtccaagtctgaggatcctccaggacaggaggcgggaagtgaggaggagggtagcagcgccagcggcctggccaaggtgaaggagctggcagagaccatcgccgcagacgacggcacagaccctcggagccgggaggtgatccgcaacgcgtgcaaggcggtcggctccatcagcagcaccgccttcgacattcgcttcaatcctgacatcttctcaccaggggttcgtttccctgagtcctgccaggatgaagttcgggaccagaagcagctgctgaaggacgcggctgccttcctgctctcctgccagatccctggcttggtgaaggactgcatggagcacgcggtcctgcccgtggacggggcaacgctggcagaggtgatgcgccagcggggcatcaacatgcgctacctgggcaaggtgctggagctggtgctgcggagcccggcccgccaccagctggaccacgtctttaaaatcggcattggagaactcatcacccgctcggccaagcacatcttcaagacgtacttacagggagtcgagctctccggcctctcagccgccatcagccacttcctgaactgcttcctgagctcctacccaaaccccgtggcccacctgcccgccgacgagctggtctccaagaagcggaataagaggaggaaaaaccggcccccgggggctgcagataacacagcctgggctgtcatgaccccccaggagctctggaagaacatctgccaggaggccaagaactactttgacttcgacctcgagtgtgagaccgtggaccaggctgtggagacctacggcctgcagaagataacgctcctgcgggagatctcgctgaaaacagggatccaggtcctgctgaaggagtacagcttcgacagtcgccacaagcccgcgttcaccgaggaggacgtgctcaacatcttccccgtggtcaagcacgtcaaccccaaggcctcggatgccttccatttcttccagagcgggcaggccaaagtgcagcagggcttcctgaaggagggctgtgagctcatcaatgaggccctgaacctgtttaacaacgtctacggagccatgcacgtggagacctgcgcctgcctgcgcctcctcgcccgcctccactacatcatgggcgactacgcagaggccctgagtaaccagcagaaggcggtgctgatgagcgagcgggtgatgggcaccgagcaccccaacaccatccaggaatacatgcacctggccctgtactgcttcgccagcagccagctgtccaccgccctgagcctgctgtaccgcgcccgctacctcatgctgctggtgttcggggaagaccaccccgagatggcgctgctggacaacaacatcgggctggtgctgcacggggtgatggagtacgacctgtcgctgcgcttcctggagaacgcgctggccgtcagcaccaagtaccacgggcccaaggccctcaaggtggccctcagccaccaccttgtcgcccgagtctacgagagcaaagctgagttccggtcggccctgcagcacgagaaggagggttacaccatctacaagacgcagctgggcgaggaccatgagaagaccaaggaaagctccgagtacctcaagtgcctgacccagcaggccgtggccctgcagcgcaccatgaacgagatctaccgcaacggctccagcgccaacatcccgcccctcaagttcacggcccccagcatggccagcgtcttggagcagctgaacgtcattaacggcatcctcttcattcctctcagccaaaaagacctggagaatctgaaagccgaggtggcgcggcggcaccagctccaggaggccagcagaaacagggatagagccgaggagcccatggctaccgagcccgcgccagcgggggccccaggagacctgggctcccagcccccggctgccaaggacccttctccgagcgtgcagggatagagagggagccagacggacagccagccagcggccccgtcaccagggagcccgactgcgggagaagggggcgagcctgcgggcggaagaggaagcaaggccctcttcctccacgtctcaccccaccccacccccgtgtcctcctgggagcctggcctgcctgccccgcagaaggtgtttttgcgctggttcaatgaatagatgatgcagaggccccattggagacacgtgaatggcgtgtgcggccatcagttcccggctggggggcaggtgttgcttcggcccccgccctccggccggcgtgtgcgagtgcgcccctggctgtgagtgttgaccgttcctctcccctgtacatagcccgagccagtcctgagtgggtgactcctgagtgggtgacgcgcagacgggatttctcaggtcatttgtatggtcgacatgatggctgctgctttggctgccaccacccccgggcccagcctgtctgaaagttcagggtttaggccgaaaaacccggtggggaggggtggggagccggagctctgtggcggggctggagggctggggtgcactttagtttggggcgggacgggagccgccgttgtgactggcgtggtctggctgctgctcccgaacggaggggtcggggttggcttgctgggccctcagagcccagtgggtggctctgactcggctccctactccctgcacccagctgggcgcagccttggggcctgcggtctgaatgtatccctcccctcagttttaacctgagctgccgaacgcacagtgggccgggggcgaggctgggggaagcggggcccaattacggatcccgggagttacaggtgccgacgtgatgtcgcttctctggtgcccagctcccttcctggtctgagactagctctgggggtggcgggggcccccacacgctgctcccgctccaccctgcccgtgctgctgctctgtgcctgctgtcagagccctggtgggggaggatgtggccaccctgagacccggaggagacgggcgtctgcctgggtttgcggagagccgcttatgggtgtggtccgtccagacaccttgtttcaagggggatgggcgtgagcgggcaagcagagcatccccaccgctgagcaagaactttttcttgtttttaaaccatcacgtcctcatttcacattggaataaagtgagtttttgaaacctgcg

SEQ ID NO: 368578 - DNA, 3204 bp, Homo sapiens
ctctcctccggcggggtcgaagaaggtggtgttgaggttgcggtctgttagtagtatagtgaggaggagggtagcagcgccagcggcctggccaaggtgaaggagctggcagagaccatcgccgcagacgacggcacagaccctcggagccgggaggtgatccgcaacgcgtgcaaggcggtcggctccatcagcagcaccgccttcgacattcgcttcaatcctgacatcttctcaccaggggttcgtttccctgagtcctgccaggatgaagttcgggaccagaagcagctgctgaaggacgcggctgccttcctgctctcctgccagatccctggcttggtgaaggactgcatggagcacgcggtcctgcccgtggacggggcaacgctggcagaggtgatgcgccagcggggcatcaacatgcgctacctgggcaaggtgctggagctggtgctgcggagcccggcccgccaccagctggaccacgtctttaaaatcggcattggagaactcatcacccgctcggccaagcacatcttcaagacgtacttacagggagtcgagctctccggcctctcagccgccatcagccacttcctgaactgcttcctgagctcctacccaaaccccgtggcccacctgcccgccgacgagctggtctccaagaagcggaataagaggaggaaaaaccggcccccgggggctgcagataacacagcctgggctgtcatgaccccccaggagctctggaagaacatctgccaggaggccaagaactactttgacttcgacctcgagtgtgagaccgtggaccaggctgtggagacctacggcctgcagaagataacgctcctgcgggagatctcgctgaaaacagggatccaggtcctgctgaaggagtacagcttcgacagtcgccacaagcccgcgttcaccgaggaggacgtgctcaacatcttccccgtggtcaagcacgtcaaccccaaggcctcggatgccttccatttcttccagagcgggcaggccaaagtgcagcagggcttcctgaaggagggctgtgagctcatcaatgaggccctgaacctgtttaacaacgtctacggagccatgcacgtggagacctgcgcctgcctgcgcctcctcgcccgcctccactacatcatgggcgactacgcagaggccctgagtaaccagcagaaggcggtgctgatgagcgagcgggtgatgggcaccgagcaccccaacaccatccaggaatacatgcacctggccctgtactgcttcgccagcagccagctgtccaccgccctgagcctgctgtaccgcgcccgctacctcatgctgctggtgttcggggaagaccaccccgagatggcgctgctggacaacaacatcgggctggtgctgcacggggtgatggagtacgacctgtcgctgcgcttcctggagaacgcgctggccgtcagcaccaagtaccacgggcccaaggccctcaaggtggccctcagccaccaccttgtcgcccgagtctacgagagcaaagctgagttccggtcggccctgcagcacgagaaggagggttacaccatctacaagacgcagctgggcgaggaccatgagaagaccaaggaaagctccgagtacctcaagtgcctgacccagcaggccgtggccctgcagcgcaccatgaacgagatctaccgcaacggctccagcgccaacatcccgcccctcaagttcacggcccccagcatggccagcgtcttggagcagctgaacgtcattaacggcatcctcttcattcctctcagccaaaaagacctggagaatctgaaagccgaggtggcgcggcggcaccagctccaggaggccagcagaaacagggatagagccgaggagcccatggctaccgagcccgcgccagcgggggccccaggagacctgggctcccagcccccggctgccaaggacccttctccgagcgtgcagggatagagagggagccagacggacagccagccagcggccccgtcaccagggagcccgactgcgggagaagggggcgagcctgcgggcggaagaggaagcaaggccctcttcctccacgtctcaccccaccccacccccgtgtcctcctgggagcctggcctgcctgccccgcagaaggtgtttttgcgctggttcaatgaatagatgatgcagaggccccattggagacacgtgaatggcgtgtgcggccatcagttcccggctggggggcaggtgttgcttcggcccccgccctccggccggcgtgtgcgagtgcgcccctggctgtgagtgttgaccgttcctctcccctgtacatagcccgagccagtcctgagtgggtgactcctgagtgggtgacgcgcagacgggatttctcaggtcatttgtatggtcgacatgatggctgctgctttggctgccaccacccccgggcccagcctgtctgaaagttcagggtttaggccgaaaaacccggtggggaggggtggggagccggagctctgtggcggggctggagggctggggtgcactttagtttggggcgggacgggagccgccgttgtgactggcgtggtctggctgctgctcccgaacggaggggtcggggttggcttgctgggccctcagagcccagtgggtggctctgactcggctccctactccctgcacccagctgggcgcagccttggggcctgcggtctgaatgtatccctcccctcagttttaacctgagctgccgaacgcacagtgggccgggggcgaggctgggggaagcggggcccaattacggatcccgggagttacaggtgccgacgtgatgtcgcttctctggtgcccagctcccttcctggtctgagactagctctgggggtggcgggggcccccacacgctgctcccgctccaccctgcccgtgctgctgctctgtgcctgctgtcagagccctggtgggggaggatgtggccaccctgagacccggaggagacgggcgtctgcctgggtttgcggagagccgcttatgggtgtggtccgtccagacaccttgtttcaagggggatgggcgtgagcgggcaagcagagcatccccaccgctgagcaagaactttttcttgtttttaaaccatcacgtcctcatttcacattggaataaagtgagtttttgaaacctgcg

SEQ ID NO: 368579 - DNA, 5014 bp, Homo sapiens
ggcggccgccccggccgacagcgcccgggaacacggctcgcaggccgggggcaaggggcggccgggcgcggccgagctgccatcagtcatgctcttaaacggggactgcccagagagcctgaagaaggaggcggcggcggccgagccacccagggaaaatgggcttgacgaggccggcccgggagatgagaccaccggccaggaagtcattgtcattcaggacacgggcttttctgtgaagatcctcgcccctgggatcgagcccttctccctgcaggtgtccccccaggagatggtgcaggagattcaccaggtgctcatggaccgggaggacacgtgtcaccgtacctgcttctcactgcacctggatggcaacgtgctggaccacttctcggagctgcgcagcgtcgaggggctgcaggagggctctgtgctgcgtgtggtggaagagccgtacacggtgcgtgaggcccgcatccacgtgcgccatgtccgagacctgctcaagagcctggacccatccgatgccttcaacggggttgactgcaactccttgtccttcctgagtgtcttcaccgacggcgacctgggagacagcgggaagcggaagaagggcttggagatggaccccatcgactgcacaccacccgagtacatcctgccagggagccgggagcggccactgtgtcccctgcagccccaaaaccgtgactggaagcccttgcagtgcctgaaagtactcaccatgagcggatggaacccgcccccggggaaccggaagatgcacggggacctcatgtacctgtttgtgatcacagccgaggaccggcaagtcagcatcaccgcgtccacacggggcttttacctgaatcagtccacagcttatcacttcaaccccaagcccgccagcccccgcttcctaagccattccctagtggagctgctcaaccagatcagcccgaccttcaagaagaacttcgctgtgctgcagaagaaaagggtccagcgccacccgttcgagaggatcgccaccccattccaggtgtacagctggacagccccccaggcggagcatgccatggattgcgtgcgtgcagaggacgcctacacctcgaggctgggctatgaggagcacattcctggacagacccgagactggaatgaggagctgcagacgacgagggagctgcctcgcaagaacctgcctgagcggctgctccgagaaagggccatattcaaggtgcacagcgacttcaccgcggcagccaccaggggcgccatggccgtcattgacggcaacgtgatggccatcaaccccagcgaggagaccaagatgcagatgttcatctggaacaacatcttcttcagcctgggcttcgacgtccgagaccactacaaggacttcgggggggacgtggcggcctacgtggcgcccaccaacgacctgaatggcgtccgcacgtacaacgcggtggacgtggaggggctgtacacgctgggcacggtggtggtggattaccgcggctaccgggtcacggcccagtccatcatccccggcatcctggagcgggaccaggagcagagcgtcatctacggctccatcgacttcggcaagaccgtggtgtcacacccgcggtacctggagctgctggagcgcacgagtcggcccctcaagatcctgcggcaccaggtgctcaacgaccgtgacgaggaggtggagctctgctcctcggtcgagtgcaagggcatcattggcaacgacgggcgccactacatcctcgacctgctgcgcaccttccccccggacctcaacttcctgcccgtgcctggcgaggagctgcctgaggaatgcgcccgcgccggcttcccccgcgcccaccggcacaagctctgctgcctgcgccaggagctggtggacgccttcgtggagcacaggtacctcctctttatgaagctggccgccttgcagctgatgcagcagaacgccagccagctggagaccccctcctccctggaaaatggtggtccttcctccttggagtccaagtctgaggatcctccaggacaggaggcgggaagtgaggaggagggtagcagcgccagcggcctggccaaggtgaaggagctggcagagaccatcgccgcagacgacggcacagaccctcggagccgggaggtgatccgcaacgcgtgcaaggcggtcggctccatcagcagcaccgccttcgacattcgcttcaatcctgacatcttctcaccaggggttcgtttccctgagtcctgccaggatgaagttcgggaccagaagcagctgctgaaggacgcggctgccttcctgctctcctgccagatccctggcttggtgaaggactgcatggagcacgcggtcctgcccgtggacggggcaacgctggcagaggtgatgcgccagcggggcatcaacatgcgctacctgggcaaggtgctggagctggtgctgcggagcccggcccgccaccagctggaccacgtctttaaaatcggcattggagaactcatcacccgctcggccaagcacatcttcaagacgtacttacagggagtcgagctctccggcctctcagccgccatcagccacttcctgaactgcttcctgagctcctacccaaaccccgtggcccacctgcccgccgacgagctggtctccaagaagcggaataagaggaggaaaaaccggcccccgggggctgcagataacacagcctgggctgtcatgaccccccaggagctctggaagaacatctgccaggaggccaagaactactttgacttcgacctcgagtgtgagaccgtggaccaggctgtggagacctacggcctgcagaagataacgctcctgcgggagatctcgctgaaaacagggatccaggtcctgctgaaggagtacagcttcgacagtcgccacaagcccgcgttcaccgaggaggacgtgctcaacatcttccccgtggtcaagcacgtcaaccccaaggcctcggatgccttccatttcttccagagcgggcaggccaaagtgcagcagggcttcctgaaggagggctgtgagctcatcaatgaggccctgaacctgtttaacaacgtctacggagccatgcacgtggagacctgcgcctgcctgcgcctcctcgcccgcctccactacatcatgggcgactacgcagaggccctgagtaaccagcagaaggcggtgctgatgagcgagcgggtgatgggcaccgagcaccccaacaccatccaggaatacatgcacctggccctgtactgcttcgccagcagccagctgtccaccgccctgagcctgctgtaccgcgcccgctacctcatgctgctggtgttcggggaagaccaccccgagatggcgctgctggacaacaacatcgggctggtgctgcacggggtgatggagtacgacctgtcgctgcgcttcctggagaacgcgctggccgtcagcaccaagtaccacgggcccaaggccctcaaggtggccctcagccaccaccttgtcgcccgagtctacgagagcaaagctgagttccggtcggccctgcagcacgagaaggagggttacaccatctacaagacgcagctgggcgaggaccatgagaagaccaaggaaagctccgagtacctcaagtgcctgacccagcaggccgtggccctgcagcgcaccatgaacgagatctaccgcaacggctccagcgccaacatcccgcccctcaagtcccagcccccggctgccaaggacccttctccgagcgtgcagggatagagagggagccagacggacagccagccagcggccccgtcaccagggagcccgactgcgggagaagggggcgagcctgcgggcggaagaggaagcaaggccctcttcctccacgtctcaccccaccccacccccgtgtcctcctgggagcctggcctgcctgccccgcagaaggtgtttttgcgctggttcaatgaatagatgatgcagaggccccattggagacacgtgaatggcgtgtgcggccatcagttcccggctggggggcaggtgttgcttcggcccccgccctccggccggcgtgtgcgagtgcgcccctggctgtgagtgttgaccgttcctctcccctgtacatagcccgagccagtcctgagtgggtgactcctgagtgggtgacgcgcagacgggatttctcaggtcatttgtatggtcgacatgatggctgctgctttggctgccaccacccccgggcccagcctgtctgaaagttcagggtttaggccgaaaaacccggtggggaggggtggggagccggagctctgtggcggggctggagggctggggtgcactttagtttggggcgggacgggagccgccgttgtgactggcgtggtctggctgctgctcccgaacggaggggtcggggttggcttgctgggccctcagagcccagtgggtggctctgactcggctccctactccctgcacccagctgggcgcagccttggggcctgcggtctgaatgtatccctcccctcagttttaacctgagctgccgaacgcacagtgggccgggggcgaggctgggggaagcggggcccaattacggatcccgggagttacaggtgccgacgtgatgtcgcttctctggtgcccagctcccttcctggtctgagactagctctgggggtggcgggggcccccacacgctgctcccgctccaccctgcccgtgctgctgctctgtgcctgctgtcagagccctggtgggggaggatgtggccaccctgagacccggaggagacgggcgtctgcctgggtttgcggagagccgcttatgggtgtggtccgtccagacaccttgtttcaagggggatgggcgtgagcgggcaagcagagcatccccaccgctgagcaagaactttttcttgtttttaaaccatcacgtcctcatttcacattggaataaagtgagtttttgaaacctgcg

SEQ ID NO: 368580 - DNA, 3240 bp, Homo sapiens
ggcggccgccccggccgacagcgcccgggaacacggctcgcaggccgggggcaaggggcggccgggcgcggccgagctgccatcagtcatgctcttaaacggggactgcccagagagcctgaagaaggaggcggcggcggccgagccacccagggaaaatgggcttgacgaggccggcccgggagatgagaccaccggccaggaagtcattgtcattcaggacacgggcttttctgtgaagatcctcgcccctgggatcgagcccttctccctgcaggtgtccccccaggagatggtgcaggagattcaccaggtgctcatggaccgggaggacacgtgtcaccgtacctgcttctcactgcacctggatggcaacgtgctggaccacttctcggagctgcgcagcgtcgaggggctgcaggagggctctgtgctgcgtgtggtggaagagccgtacacggtgcgtgaggcccgcatccacgtgcgccatgtccgagacctgctcaagagcctggacccatccgatgccttcaacggggttgactgcaactccttgtccttcctgagtgtcttcaccgacggcgacctgggagacagcgggaagcggaagaagggcttggagatggaccccatcgactgcacaccacccgagtacatcctgccagggagccgggagcggccactgtgtcccctgcagccccaaaaccgtgactggaagcccttgcagtgcctgaaagtactcaccatgagcggatggaacccgcccccggggaaccggaagatgcacggggacctcatgtacctgtttgtgatcacagccgaggaccggcaagtcagcatcaccgcgtccacacggggcttttacctgaatcagtccacagcttatcacttcaaccccaagcccgccagcccccgcttcctaagccattccctagtggagctgctcaaccagatcagcccgaccttcaagaagaacttcgctgtgctgcagaagaaaagggtccagcgccacccgttcgagaggatcgccaccccattccaggtgtacagctggacagccccccaggcggagcatgccatggattgcgtgcgtgcagaggacgcctacacctcgaggctgggctatgaggagcacattcctggacagacccgagactggaatgaggagctgcagacgacgagggagctgcctcgcaagaacctgcctgagcggctgctccgagaaagggccatattcaaggtgcacagcgacttcaccgcggcagccaccaggggcgccatggccgtcattgacggcaacgtgatggccatcaaccccagcgaggagaccaagatgcagatgttcatctggaacaacatcttcttcagcctgggcttcgacgtccgagaccactacaaggacttcgggggggacgtggcggcctacgtggcgcccaccaacgacctgaatggcgtccgcacgtacaacgcggtggacgtggaggggctgtacacgctgggcacggtggtggtggattaccgcggctaccgggtcacggcccagtccatcatccccggcatcctggagcgggaccaggagcagagcgtcatctacggctccatcgacttcggcaagaccgtggtgtcacacccgcggtacctggagctgctggagcgcacgagtcggcccctcaagatcctgcggcaccaggtgctcaacgaccgtgacgaggaggtggagctctgctcctcggtcgagtgcaagggcatcattggcaacgacgggcgccactacatcctcgacctgctgcgcaccttccccccggacctcaacttcctgcccgtgcctggcgaggagctgcctgaggaatgcgcccgcgccggcttcccccgcgcccaccggcacaagctctgctgcctgcgccaggagctggtggacgccttcgtggagcacaggtacctcctctttatgaagctggccgccttgcagctgatgcagcagaacgccagccagctggagaccccctcctccctggaaaatggtggtccttcctccttggagtccaagtctgaggatcctccaggacaggaggcgggaagtgaggaggagggtagcagcgccagcggcctggccaaggtgaaggagctggcagagaccatcgccgcagacgacggcacagaccctcggagccgggaggtgatccgcaacgcgtgcaaggcggtcggctccatcagcagcaccgccttcgacattcgcttcaatcctgacatcttctcaccaggggttcgtttccctgagtcctgccaggatgaagttcgggaccagaagcagctgctgaaggacgcggctgccttcctgctctcctgccagatccctggcttggtgaaggactgcatggagcacgcggtcctgcccgtggacggggcaacgctggcagaggtgatgcgccagcggggcatcaacatgcgctacctgggcaaggtgctggagctggtgctgcggagcccggcccgccaccagctggaccacgtctttaaaatcggcattggagaactcatcacccgctcggccaagcacatcttcaagacgtacttacagggagtcgagctctccggcctctcagccgccatcagccacttcctgaactgcttcctgagctcctacccaaaccccgtggcccacctgcccgccgacgagctggtctccaagaagcggaataagaggaggaaaaaccggcccccgggggctgcagataacacagcctgggctgtcatgaccccccaggagctctggaagaacatctgccaggaggccaagaactactttgacttcgacctcgagtgtgagaccgtggaccaggctgtggagacctacggcctgcagaagataacgctcctgcgggagatctcgctgaaaacagggatccaggtcctgctgaaggagtacagcttcgacagtcgccacaagcccgcgttcaccgaggaggacgtgctcaacatcttccccgtggtcgagaggtgggaccacgggaacaagatctcctttctggttatatcttccttggggcagagggagtttcagacaagacttctggcaagactgggacccaccttatctggcttcactcaggagcctggctcaatggaccaaggactgccctcccggaggaagctactagggtcatcagagtgttggatgatgtcaggctatagcccacacatgctgagcagcagcatcatctgtgcgggatcctctagaca

SEQ ID NO: 368581 - DNA, 1117 bp, Homo sapiens
ggctgacttcgctgcccgtcacgggaatgcgggagagggcggcgccggggcgctcgcgtctgcgtggagaccggctggccgcgcgcgggaagccgcggaactgcgccggaaagtcccccggctctggggccccggtgacccagagtaagcctccaagaaggaggaggaggagagaaaggcggctcttcccgtgcccctaccagaggcttcggtgggcccaccttgtgacctccgcggccggcccctcagtggaactgcgtcccacgcggggggcgtcccgaccgtgggggccgcggcccgcgctgaccctggacgtcgccgcgcagcccctggttccccaaggcagaggaaataccctggtggagccctccttccatagaaccagagatggcatctgtggatttcaagacctatgtggatcaggcctgcagagctgctgaggagtttgtcaatgtctactacaccaccatggataagcggcggcgtttgctgtcccgcctgtacatgggcacagccaccctggtctggaatggcaatgctgtttcaggacaagaatccttgagtgagttttttgaaatgttgccttccagcgagttccaaatcagcgtggtagactgccagcctgttcatgatgaagccacaccaagccagaccacggtccttgttgtcatctgtggatcagtgaagtttgaggggaacaaacaacgggacttcaaccagaacttcatcctgaccgcccaggcctcacccagcaacacagtgtggaagatcgcaagtgactgcttccgcttccaggactgggccagctagtgggggtggcagaggtctctttgcttcattcagccctagctctgtagagaaatgcaaacctcgactctcaaggatgtgaggaacacaagttcatttctgttgttgcggagacactgcagactccactgtgccgaggttgaactcttttttgttgctcaagttctaggagtccctttcctgaatatatacttgtttgtcatagtttccttttcaaagtagtaaacttttctatttttctacttgcccagtagagactctgattctggaaattctgacaaataatttaataatacacatgttgcttctt

SEQ ID NO: 368582 - DNA, 1564 bp, Homo sapiens
ggctgacttcgctgcccgtcacgggaatgcgggagagggcggcgccggggcgctcgcgtctgcgtggagaccggctggccgcgcgcgggaagccgcggaactgcgccggaaagtcccccggctctggggccccggtgacccagagtaagcctccaagaaggaggaggaggagagaaaggcggctcttcccgtgcccctaccagaggcttcggtgggcccaccttgtgacctccgcggccggcccctcagtggaactgcgtcccacgcggggggcgtcccgaccgtgggggccgcggcccgcgctgaccctggacgtcgccgcgcaggtacgttgccgtcccccggcggtctgacccccgagacagcccctagtgcataccccacgccctcctccattgtcgagaatgagacacggctgtgcctttgtccacgtggtagagttgccgccgcggtgaggctctcgcctgtgcaaaaagcgtggcagcgaattctcatcaacgaggggaggcgcgtcccctcacagcgcagctctcgggtctgaggagggccgggcagggcgtgcgtctgtctaggtttgaattaaaggcgactcacaggaaataaggccatgccactgtggtagcttttcccgtccatctccggacactcgacggtgtgggtcgtgcgaggaggcggcagtcttcacagcctcttactctagtcctcacggtcaggttctttttctgatttgacacagacagcgggactgacgacctcataggtagctgaaaacccccctggttccccaaggcagaggaaataccctggtggagccctccttccatagaaccagagatggcatctgtggatttcaagacctatgtggatcaggcctgcagagctgctgaggagtttgtcaatgtctactacaccaccatggataagcggcggcgtttgctgtcccgcctgtacatgggcacagccaccctggtctggaatggcaatgctgtttcaggacaagaatccttgagtgagttttttgaaatgttgccttccagcgagttccaaatcagcgtggtagactgccagcctgttcatgatgaagccacaccaagccagaccacggtccttgttgtcatctgtggatcagtgaagtttgaggggaacaaacaacgggacttcaaccagaacttcatcctgaccgcccaggcctcacccagcaacacagtgtggaagatcgcaagtgactgcttccgcttccaggactgggccagctagtgggggtggcagaggtctctttgcttcattcagccctagctctgtagagaaatgcaaacctcgactctcaaggatgtgaggaacacaagttcatttctgttgttgcggagacactgcagactccactgtgccgaggttgaactcttttttgttgctcaagttctaggagtccctttcctgaatatatacttgtttgtcatagtttccttttcaaagtagtaaacttttctatttttctacttgcccagtagagactctgattctggaaattctgacaaataatttaataatacacatgttgcttctt

SEQ ID NO: 368583 - DNA, 681 bp, Homo sapiens
  misc_feature (41)..(41): n is a, c, g, or t
  misc_feature (43)..(43): n is a, c, g, or t
gggcggtcaggatgaagttctggttgaagtcccgttgtttntncccctcaaactgcactgatccacagatgacaacaaggaccctggtctggaatggcaatgctgtttcaggacaagaatccttgagtgagttttttgaaatgttgccttccagcgagttccaaatcagcgtggtagactgccagcctgttcatgatgaagccacaccaagccagaccacggtccttgttgtcatctgtggatcagtgaagtttgaggggaacaaacaacgggacttcaaccagaacttcatcctgaccgcccaggcctcacccagcaacacagtgtggaagatcgcaagtgactgcttccgcttccaggactgggccagctagtgggggtggcagaggtctctttgcttcattcagccctagctctgtagagaaatgcaaacctcgactctcaaggatgtgaggaacacaagttcatttctgttgttgcggagacactgcagactccactgtgccgaggttgaactcttttttgttgctcaagttctaggagtccctttcctgaatatatacttgtttgtcatagtttccttttcaaagtagtaaacttttctatttttctacttgcccagtagagactctgattctggaaattctgacaaataatttaataatacacatgttgcttctt

SEQ ID NO: 368584 - DNA, 549 bp, Homo sapiens
  misc_feature (24)..(24): n is a, c, g, or t
gcccaaagaaattcggccacgagnagcgagtccccaattcaggctgccagtctaccacgctgatttggaactcgctggaaggcaacattccaaatcagcgtggtagactgccagcctgttcatgatgaagccacaccaagccagaccacggtccttgttgtcatctgtggatcagtgaagtttgaggggaacaaacaacgggacttcaaccagaacttcatcctgaccgcccaggcctcacccagcaacacagtgtggaagatcgcaagtgactgcttccgcttccaggactgggccagctagtgggggtggcagaggtctctttgcttcattcagccctagctctgtagagaaatgcaaacctcgactctcaaggatgtgaggaacacaagttcatttctgttgttgcggagacactgcagactccactgtgccgaggttgaactcttttttgttgctcaagttctaggagtccctttcctgaatatatacttgtttgtcatagtttccttttcaaagtagtaaacttttctatttttctacttgccc

SEQ ID NO: 368585 - DNA, 1056 bp, Homo sapiens
ggctgacttcgctgcccgtcacgggaatgcgggagagggcggcgccggggcgctcgcgtctgcgtggagaccggctggccgcgcgcgggaagccgcggaactgcgccggaaagtcccccggctctggggccccggtgacccagagtaagcctccaagaaggaggaggaggagagaaaggcggctcttcccgtgcccctaccagaggcttcggtgggcccaccttgtgacctccgcggccggcccctcagtggaactgcgtcccacgcggggggcgtcccgaccgtgggggccgcggcccgcgctgaccctggacgtcgccgcgcagcccctggttccccaaggcagaggaaataccctggtggagccctccttccatagaaccagagatggcatctgtggatttcaagacctatgtggatcaggcctgcagagctgctgaggagtttgtcaatgtctactacaccaccatggataagcggcggcgtttgctgtcccgcctgtacatgggcacagccaccctggtctggaatggcaatgctgtttcaggacaagaatccttgagtgagttttttgaaatgttgccttccagcgagttccaaatcagcgtggtagactgccagcctgttcatgatgaagccacaccaagccagaccacggtccttgttgtcatctgtggatcagtgaagtttgaggggaacaaacaacgggacttcaaccagaacttcatcctgaccgcccaggcctcacccagcaacacagtgtggaagatcgcaagtgactgcttccgcttccaggactgggccagctagtgggggtggcagaggtctctttgcttcattcagccctagctctgtagagaaatgcaaacctcgactctcaaggatgtgaggaacacaagttcatttctgttgttgcggagacactgcagactccactgtgccgaggttgaactcttttttgttgctcaagttctaggagtccctttcctgaatatatacttgtttgtcatagtttccttttcaaagtagtaaacttttctatttttctacttgccc

SEQ ID NO: 368586 - DNA, 610 bp, Homo sapiens
  misc_feature (24)..(24): n is a, c, g, or t
gcccaaagaaattcggccacgagnagcgagtccccaattcaggctgccagtctaccacgctgatttggaactcgctggaaggcaacattccaaatcagcgtggtagactgccagcctgttcatgatgaagccacaccaagccagaccacggtccttgttgtcatctgtggatcagtgaagtttgaggggaacaaacaacgggacttcaaccagaacttcatcctgaccgcccaggcctcacccagcaacacagtgtggaagatcgcaagtgactgcttccgcttccaggactgggccagctagtgggggtggcagaggtctctttgcttcattcagccctagctctgtagagaaatgcaaacctcgactctcaaggatgtgaggaacacaagttcatttctgttgttgcggagacactgcagactccactgtgccgaggttgaactcttttttgttgctcaagttctaggagtccctttcctgaatatatacttgtttgtcatagtttccttttcaaagtagtaaacttttctatttttctacttgcccagtagagactctgattctggaaattctgacaaataatttaataatacacatgttgcttctt

SEQ ID NO: 368587 - DNA, 516 bp, Homo sapiens
  misc_feature (24)..(24): n is a, c, g, or t
aggatccccggttcactttctacncgcgaccaagcagttggggaaagtaattttgtttgccgaagtgacccccacaacgatgcgtctcctggatgggtaaggtgtgagcaggtctgcatctgctcagaggagtcctgttccattgatcatcctctcttaccaatagacggggaggggatagagttgtagaggaatacgtttgaccagacctattagcaaggtggaagtactcttgtcctagaagagttaaatcgtgggaaaggaaattgaagttctttgatcacaggtttgttttttatgggaatggaaggtggttgtgctttgtgtcttgcttctttgaatcaggccctcagaatgttctttgataaacgaatattatgaaaaaagatgtttaaccggtggcattattgctcaggttatcattcttcttttgtgcagttacaatcagtgttagacatttaatacaggatgtttttcaggggcatttgaataggaagtttgaatgacacctaagct

SEQ ID NO: 368588 - DNA, 7831 bp, Homo sapiens
  misc_feature (20)..(20): n is a, c, g, or t
aattcggcacgaggatgatntggaagaggagaaacaagagtcagaaaaattagcagcatccgtgatctgactctgggtaccagtgggttgttgagatttctgttccccactcactgcagagctgctgcctgccaatgccccctgttgggcagggccacctgtgctagtttaacctggggtctttcactcccggactgcttcttggatgtgagttttaagttgagcaaagcgggctcgccctgccggcggcgcggccatgctcatcacgctgtgctacctgtacctgtgggcgcgctggggtcgccggccggctgagctcgtgcgcgccacggtgcggcggctgcgtgcctcgcgctgttccttcaccttctgcggcgcggccgcggagcccccgggcgcccgcgtgtgcctgagccgtggcggccgcgtcttctgcgtcagcgacagccagtccattgaagacttgaacaagtgggccctatttcttgtgtctccttttatacttgaagcagaacacatagcatttgtgacggagagcatttgggtacaaagtgagaatttacagagatcatcctcttcagaaacaacggagtgtcgttctgtcgtccaggctggagtgcagtggtgtggtctcggctcaccacaacctctgcctactgggttccagtgattctcctgcctcagcatcccgagtagctgggactacaggtgcacgctaccatgcccggctaatttttgtatttttagtagaggcgggggtttcaccatgccatccaggctggtttcgaactcctgacctcgtgatccacctgtctcggcctcccaaagtgctgggattacaggtgtgagccaccgcgcctggccctgtattttcaaattctttacctctgcgtttccagccttgctccatccaatttgttactagagctttttaacaatttcacgttgaattaagatgatttggaagaggagaaacaagagtcagaaaaattagcagcatccgtgatctgactctgggtaccagtgggttgttgagatttctgttccccactcactgcagagctgctgcctgccaatgccccctgttgggcagggccacctgtgctagtttaacctggggtctttcactcccggactgcttcttggatgtgagttttaagttgagcagagaagatatgccttgcctgctgccatacattgtaacatcaagtcaagagctttagttacttaacagatttctgctggctgctattataggaggaaactcctttgtttagggacagccagggcttccttagctttgatctttgggagtgagccttttgcttgacttcccttctcttttccatgcctttgtttccatctcgaagtgcaaatttaaagtgtcctgtttgcctttatccactggaaggcaaacaccctggacgacgtatcagtgacagcgcggttctgctttgatcggagcacccagcgctgcttgaaggcgtttgcatggtccatggctcatggaccacgctcctagaaaacggaaatgcacttagattgtcaagtggtcagactgttgtttgccattagcttgcagacctggggatccttatcggctaattgctgaagcaagtgtggacaacttcagcaagctgggggtggcgttcatggaagatagactccacatggataatggactggtaccccaaaagattgtgtcggtgcacttgcaggactccactctgaaggaagttaaggatcaggtctcaaacaagcaagcccagatcctagagccgaagcctgaaccttctcttgagattaagcctgagcaggacggtatggagcatgttggcagagatgacccaaaggctcttggtgaagaacccaaacaaaggagaggcagtgcctctgggagtgagcctgctggggacagtgacaggggagggggccccgttgagcattatcacctccatctgtctagttgccacgagtgtctggaacttgagaacagcaccattgagtcagtcaagtttgcgtctgccgagaacattccagaccttccctacgattatagcagcagtttggagagtgttgctgatgagacctcccccgaaagagaagggaggagagtcaacctcacgggaaaggcacccaacatcctcctctatgtgggctccgactcccaggaagccctcggccggttccacgaggtccggtctgtgctggccgactgtgtggacattgacagttatattctctaccacctgctggaggacagtgctctcagagacccgtggacggacaactgtctgctgttggtcattgctaccagggagtccattcccgaagacctgtaccagaagttcatggcctatctttctcagggagggaaggtgttgggcctgtcttcatccttcacctttggtggctttcaggtgacaagcaagggtgcactgcacaagacagtccagaacttggttttctccaaggctgaccagagcgaggtgaagctcagcgtcttgagcagtggctgcaggtaccaggaaggccccgtccggctcagccccggcaggctccagggccacctggagaatgaggacaaggacaggatgattgtgcatgtgccttttggaactcgcgggggagaagctgttctttgccaggtgcacttagaactacctcccagctccaacatagtgcaaactccagaagattttaacttgctcaagtcaagcaattttagaagatacgaagtccttagagagattctgacaacccttggcctcagctgtgacatgaaacaagttcctgccttaactcctctttacttgctgtcagctgcggaggaaatcagggatcctcttatgcagtggcttgggaaacatgtggactccgagggagaaataaaatccggccagctctctcttagatttgtttcatcctacgtgtctgaagtagaaataaccccatcttgtatacctgtggtgaccaacatggaggccttctcatcagaacatttcaacttagagatctatcgccaaaatctgcagaccaagcagttggggaaagtaattttgtttgccgaagtgacccccacaacgatgcgtctcctggatgggctgatgtttcagacaccgcaggaaatgggcttaatagtgatcgcggcccggcagaccgagggcaaaggacggggagggaatgtgtggctgagccctgtgggatgtgctctttctactctgctcatctccattccactgagatcccagctgggacagaggatcccgtttgtccagcatctgatgtccgtggctgtcgtggaagcagtgaggtccattcccgagtatcaggatatcaacttacgagtgaagtggcccaacgatatttattacagtgacctcatgaagatcggcggagttctggttaactcaacactcatgggagaaacattttatatacttattggctgtggatttaatgtgactaacagtaaccctaccatctgcatcaacgacctcatcacagaatacaataaacaacacaaggcagaactgaagcccttaagagccgattatctcatcgccagagtcgtgactgtgctggagaaactgatcaaagagtttcaggacaaagggcccaacagcgtccttcccctttattaccgatactgggtccacagtggtcagcaagtccatctgggcagcgcagagggaccaaaggtgtccatcgttggcctggacgattctggcttcctccaggttcaccaggagggcggcgaggttgtgactgtgcacccggacggcaactccttcgacatgctgagaaacctcatcctccccaaacggcggtaatgccgggcgtccccgagacgcggctgcctgtccgtgcccatgcatctggaaatctaatttagagttgtaggtgaattttcttttcctccaattcatttgttaagtctttgttctttttctgtgtttctgtttgtttttaggtttgttttgttgtcgttttctttggtgtttgaagaggctctgggatagatggttaagaagtagaaaatttagtttagggaaagccctcccacaggtgggaaattgctctcccctctgtggcttggacttacgtttattgtcaaggggagtttttacatggaaatgacaatgggaaaattcagatattttcttagtagtgcagacctttacccctagtctatgaaaaaacaaaccaaaatatgctcttgcgcccaggccagtggtgagttagaggtatgctatcactgtttgtaagcatctggggaggtactgaactgtaagaacatgcttggacacttagtcattgttctgtgtttttattaatgaagaaaagggaagacagacttccaagagttactgtccacccggtggtgtggccccatagcgaagtctaaatgcctgtagagatagagctagctggtgtggttgcagtgaccttgtagaggaaatcagttcattactttgacatcattcagtgagctctcctttcctaaggaagtttaaatgtccttagttagggactgactttcttaagtaagtttaaatttactacatattgtgaagagacaggatcaagttcagaatccttaaatgtctgattaggcatcacttggatgaggaggtgggcgatttggctctgacagctggagatgaaggcacactcataccacatacaagggaggatttggagcttttaagccagtttcagatttactctgaaatgtggagcattcctgcaagactgtgcagctcacggaatatagaagacatggcattttactcagaagtcataagtttttgcccccctcatttacctcgtattaccaagaaagaaaatgttatcgatactaaacaccatcagttcagagggaggatgtgtgtgtgtgcccgcatatgtgtgtgcgtgcgtgtgtgcgcacatagctttaaaagaagacattcaaaatttgatgtgctacaagcctcatgaaagaacaaaagaaatgaagccttttgatatgcattcgctattcccagatgtacgccatgccttttccatgtccctcctatctctgttgaacttatgaatcatactcattacttttcagctttttaaaaggccaatttttgtccagttttctctcttccagtcccagctgaaattagtggaaagaaagtttgatggagctttcagctttgaacaaaatcccttcattgtaaactagcaccatctttatccaggtcttacccagtcaggctaattccagaaacttgtggtttttagtatagtctgtctacctttagccaggcacaggacagccctatgaaaaaatacccaatatatattttttggaaatgaaacattaaaagaacttaaaaagtaatttttggaaatgaggcttcaattagaattatttttctcaaaaaacaaacaaacaaaaaacacaaaaaaaaccactcttctccaaatgcccaagccttctttcaaaattagttagaaacttaagtaaaatacaagtccacaccatccccaaattacaaaatggacttacccttgagagggcatctgcagaatatcatcagggacaaagatctcgaggctaacgatgtaggtttcatttctcagactttgtaatataaggcaagccctctctcagagctgccatcatcactttttgaatttctttgggggttatttaatgaaaaacatgctatgttttgttttaagctgaagtcctattctggacactctgctttgggaaaaaatgttatcatttaatttcctttctgcaaattaaaactaatgaagtgtggccttgtcaaaggctatggagatgttccgggcatactgctgtgctctgtgctttccagcaggcgctcctccctcacgcaggagactcagttgtcctgagagagatgaagcagccttgaagcagatgctgcgttttccataaacctgattttgcctcacatgaaccaaagactctcaaaactccgcttctatagaattagctgaataaaggcattttactgatagctgttcgtgttagcgaaacctgtctacctgctatagcacactctccgatttgggccatttatgcaccccgcaacctgggatctcaaggagctttaaagtcttaatgggaacttggcattttcctgatgatctttaaaatgtggtcactaaactcaggattggcgtgtgcttttagaacactggagtagcccttgttttagaggctgtgcattgagtatcgaccgtattttgtaaaaggcaagatatcctcccttccaggctggtaacgggtttcaaggggactcttgaggaagtgccccctaaaatagaacacagcaataactgggcttcctgtccccacccccaccccagcagtgctctctggcactgggaactctgctagggagtggtggaagtaggaaggatttgtgtgcaaaggaaaatcgtggttgagtttcactgcagcaggctgacgttgcctgatgtgagagcaagtggccgactggggtgcgggtgcacaggtcgggggagcacaggccacagagcgcagcctctgggggtcccccaaggcacagcatatacagcatggtcgccccttgccctggagtctgggaacaaagagaggagccagcctccccgcactgcttcagatggaaaagggaggcagggtgggcttccgttctccagatctgtttgctcttaacaggcagaacatgggagaatccttattcctggttaatcactatgcatatttgaaataaaagaaagcgtaagcctctgcaattttaacttctcaaaggatgtctctgaaaagaatcactttaaaccaatgcctataaaaagcaagtctaccaaaataaactaagactttctatgtggtttgggctccctcttatttttacaagtttcatttttaaaagtaggcaactactttgggttacagtatttttattcatatttaaacatttttacaaaataaataaagtgttttacatagtaaggaatatgtacgtatttccaagtattaagaagccaagtgtttttttttttgacgtattattgacaaatgtattcagcgccatacacaagagaaatattattactccaaagaacgaaagttaacaaaactccaaagcaaaaacccttttaatggaggtgagaaataaatttaatgtaacaacagctagatggtttttaggatttttcttttcttttgtggaaacttcttgacttgacttttcatctgaacagtttttccccccaagattttaatcttatatgtcatacttaagtttaggaacagcttgaataattagcattctagataacacaagggccatgattcactaaaattccaagctactgtaattttatggcatttatttgcaaatgttctttgtatctcattttatctgtagcagtccccactagtctaccttaaccatcttatagctctggtaaattaaaacttacgtagactttatacaagatccattggccgtattaaacctcccccactcttagggcttagggcggaagggacgaaggcagggctgataggacttttaaaaggataaaaggagtgggggcaagggaggcggaaaatacaggctcttgcagataccctccgcgctgccctccacacccagcccactgctctacaaaggtatgaatggaatggcttttctagaaaagggcttccaagaacataaaggaattcctttccctgggaggccccgtggagggctgagccagccttgaattgggcttatttctcaaatccatttgatctggcatttttgtcaacatggtacatgttagg

SEQ ID NO: 368589 - DNA, 6876 bp, Homo sapiens
  misc_feature (20)..(20): n is a, c, g, or t
aattcggcacgaggatgatntggaagaggagaaacaagagtcagaaaaattagcagcatccgtgatctgactctgggtaccagtgggttgttgagatttctgttccccactcactgcagagctgctgcctgccaatgccccctgttgggcagggccacctgtgctagtttaacctggggtctttcactcccggactgcttcttggatgtgagttttaagttgagcaaagcgggctcgccctgccggcggcgcggccatgctcatcacgctgtgctacctgtacctgtgggcgcgctggggtcgccggccggctgagctcgtgcgcgccacggtgcggcggctgcgtgcctcgcgctgttccttcaccttctgcggcgcggccgcggagcccccgggcgcccgcgtgtgcctgagccgtggcggccgcgtcttctgcgtcagcgacagccagtccattgaagacttgaacaagtgggccctatttcttgtgtctccttttatacttgaagcagaacacatagcatttgtgacggagagcatttgggtacaaagtgagaatttacagagatcatcctcttcagaaacaattgtcaagtggtcagactgttgtttgccattagcttgcagacctggggatccttatcggctaattgctgaagcaagtgtggacaacttcagcaagctgggggtggcgttcatggaagatagactccacatggataatggactggtaccccaaaagattgtgtcggtgcacttgcaggactccactctgaaggaagttaaggatcaggtctcaaacaagcaagcccagatcctagagccgaagcctgaaccttctcttgagattaagcctgagcaggacggtatggagcatgttggcagagatgacccaaaggctcttggtgaagaacccaaacaaaggagaggcagtgcctctgggagtgagcctgctggggacagtgacaggggagggggccccgttgagcattatcacctccatctgtctagttgccacgagtgtctggaacttgagaacagcaccattgagtcagtcaagtttgcgtctgccgagaacattccagaccttccctacgattatagcagcagtttggagagtgttgctgatgagacctcccccgaaagagaagggaggagagtcaacctcacgggaaaggcacccaacatcctcctctatgtgggctccgactcccaggaagccctcggccggttccacgaggtccggtctgtgctggccgactgtgtggacattgacagttatattctctaccacctgctggaggacagtgctctcagagacccgtggacggacaactgtctgctgttggtcattgctaccagggagtccattcccgaagacctgtaccagaagttcatggcctatctttctcagggagggaaggtgttgggcctgtcttcatccttcacctttggtggctttcaggtgacaagcaagggtgcactgcacaagacagtccagaacttggttttctccaaggctgaccagagcgaggtgaagctcagcgtcttgagcagtggctgcaggtaccaggaaggccccgtccggctcagccccggcaggctccagggccacctggagaatgaggacaaggacaggatgattgtgcatgtgccttttggaactcgcgggggagaagctgttctttgccaggtgcacttagaactacctcccagctccaacatagtgcaaactccagaagattttaacttgctcaagtcaagcaattttagaagatacgaagtccttagagagattctgacaacccttggcctcagctgtgacatgaaacaagttcctgccttaactcctctttacttgctgtcagctgcggaggaaatcagggatcctcttatgcagtggcttgggaaacatgtggactccgagggagaaataaaatccggccagctctctcttagatttgtttcatcctacgtgtctgaagtagaaataaccccatcttgtatacctgtggtgaccaacatggaggccttctcatcagaacatttcaacttagagatctatcgccaaaatctgcagaccaagcagttggggaaagtaattttgtttgccgaagtgacccccacaacgatgcgtctcctggatgggctgatgtttcagacaccgcaggaaatgggcttaatagtgatcgcggcccggcagaccgagggcaaaggacggggagggaatgtgtggctgagccctgtgggatgtgctctttctactctgctcatctccattccactgagatcccagctgggacagaggatcccgtttgtccagcatctgatgtccgtggctgtcgtggaagcagtgaggtccattcccgagtatcaggatatcaacttacgagtgaagtggcccaacgatatttattacagtgacctcatgaagatcggcggagttctggttaactcaacactcatgggagaaacattttatatacttattggctgtggatttaatgtgactaacagtaaccctaccatctgcatcaacgacctcatcacagaatacaataaacaacacaaggcagaactgaagcccttaagagccgattatctcatcgccagagtcgtgactgtgctggagaaactgatcaaagagtttcaggacaaagggcccaacagcgtccttcccctttattaccgatactgggtccacagtggtcagcaagtccatctgggcagcgcagagggaccaaaggtgtccatcgttggcctggacgattctggcttcctccaggttcaccaggagggcggcgaggttgtgactgtgcacccggacggcaactccttcgacatgctgagaaacctcatcctccccaaacggcggtaatgccgggcgtccccgagacgcggctgcctgtccgtgcccatgcatctggaaatctaatttagagttgtaggtgaattttcttttcctccaattcatttgttaagtctttgttctttttctgtgtttctgtttgtttttaggtttgttttgttgtcgttttctttggtgtttgaagaggctctgggatagatggttaagaagtagaaaatttagtttagggaaagccctcccacaggtgggaaattgctctcccctctgtggcttggacttacgtttattgtcaaggggagtttttacatggaaatgacaatgggaaaattcagatattttcttagtagtgcagacctttacccctagtctatgaaaaaacaaaccaaaatatgctcttgcgcccaggccagtggtgagttagaggtatgctatcactgtttgtaagcatctggggaggtactgaactgtaagaacatgcttggacacttagtcattgttctgtgtttttattaatgaagaaaagggaagacagacttccaagagttactgtccacccggtggtgtggccccatagcgaagtctaaatgcctgtagagatagagctagctggtgtggttgcagtgaccttgtagaggaaatcagttcattactttgacatcattcagtgagctctcctttcctaaggaagtttaaatgtccttagttagggactgactttcttaagtaagtttaaatttactacatattgtgaagagacaggatcaagttcagaatccttaaatgtctgattaggcatcacttggatgaggaggtgggcgatttggctctgacagctggagatgaaggcacactcataccacatacaagggaggatttggagcttttaagccagtttcagatttactctgaaatgtggagcattcctgcaagactgtgcagctcacggaatatagaagacatggcattttactcagaagtcataagtttttgcccccctcatttacctcgtattaccaagaaagaaaatgttatcgatactaaacaccatcagttcagagggaggatgtgtgtgtgtgcccgcatatgtgtgtgcgtgcgtgtgtgcgcacatagctttaaaagaagacattcaaaatttgatgtgctacaagcctcatgaaagaacaaaagaaatgaagccttttgatatgcattcgctattcccagatgtacgccatgccttttccatgtccctcctatctctgttgaacttatgaatcatactcattacttttcagctttttaaaaggccaatttttgtccagttttctctcttccagtcccagctgaaattagtggaaagaaagtttgatggagctttcagctttgaacaaaatcccttcattgtaaactagcaccatctttatccaggtcttacccagtcaggctaattccagaaacttgtggtttttagtatagtctgtctacctttagccaggcacaggacagccctatgaaaaaatacccaatatatattttttggaaatgaaacattaaaagaacttaaaaagtaatttttggaaatgaggcttcaattagaattatttttctcaaaaaacaaacaaacaaaaaacacaaaaaaaaccactcttctccaaatgcccaagccttctttcaaaattagttagaaacttaagtaaaatacaagtccacaccatccccaaattacaaaatggacttacccttgagagggcatctgcagaatatcatcagggacaaagatctcgaggctaacgatgtaggtttcatttctcagactttgtaatataaggcaagccctctctcagagctgccatcatcactttttgaatttctttgggggttatttaatgaaaaacatgctatgttttgttttaagctgaagtcctattctggacactctgctttgggaaaaaatgttatcatttaatttcctttctgcaaattaaaactaatgaagtgtggccttgtcaaaggctatggagatgttccgggcatactgctgtgctctgtgctttccagcaggcgctcctccctcacgcaggagactcagttgtcctgagagagatgaagcagccttgaagcagatgctgcgttttccataaacctgattttgcctcacatgaaccaaagactctcaaaactccgcttctatagaattagctgaataaaggcattttactgatagctgttcgtgttagcgaaacctgtctacctgctatagcacactctccgatttgggccatttatgcaccccgcaacctgggatctcaaggagctttaaagtcttaatgggaacttggcattttcctgatgatctttaaaatgtggtcactaaactcaggattggcgtgtgcttttagaacactggagtagcccttgttttagaggctgtgcattgagtatcgaccgtattttgtaaaaggcaagatatcctcccttccaggctggtaacgggtttcaaggggactcttgaggaagtgccccctaaaatagaacacagcaataactgggcttcctgtccccacccccaccccagcagtgctctctggcactgggaactctgctagggagtggtggaagtaggaaggatttgtgtgcaaaggaaaatcgtggttgagtttcactgcagcaggctgacgttgcctgatgtgagagcaagtggccgactggggtgcgggtgcacaggtcgggggagcacaggccacagagcgcagcctctgggggtcccccaaggcacagcatatacagcatggtcgccccttgccctggagtctgggaacaaagagaggagccagcctccccgcactgcttcagatggaaaagggaggcagggtgggcttccgttctccagatctgtttgctcttaacaggcagaacatgggagaatccttattcctggttaatcactatgcatatttgaaataaaagaaagcgtaagcctctgcaattttaacttctcaaaggatgtctctgaaaagaatcactttaaaccaatgcctataaaaagcaagtctaccaaaataaactaagactttctatgtggtttgggctccctcttatttttacaagtttcatttttaaaagtaggcaactactttgggttacagtatttttattcatatttaaacatttttacaaaataaataaagtgttttacatagtaaggaatatgtacgtatttccaagtattaagaagccaagtgtttttttttttgacgtattattgacaaatgtattcagcgccatacacaagagaaatattattactccaaagaacgaaagttaacaaaactccaaagcaaaaacccttttaatggaggtgagaaataaatttaatgtaacaacagctagatggtttttaggatttttcttttcttttgtggaaacttcttgacttgacttttcatctgaacagtttttccccccaagattttaatcttatatgtcatacttaagtttaggaacagcttgaataattagcattctagataacacaagggccatgattcactaaaattccaagctactgtaattttatggcatttatttgcaaatgttctttgtatctcattttatctgtagcagtccccactagtctaccttaaccatcttatagctctggtaaattaaaacttacgtagactttatacaagatccattggccgtattaaacctcccccactcttagggcttagggcggaagggacgaaggcagggctgataggacttttaaaaggataaaaggagtgggggcaagggaggcggaaaatacaggctcttgcagataccctccgcgctgccctccacacccagcccactgctctacaaaggtatgaatggaatggcttttctagaaaagggcttccaagaacataaaggaattcctttccctgggaggccccgtggagggctgagccagccttgaattgggcttatttctcaaatccatttgatctggcatttttgtcaacatggtacatgttagg

SEQ ID NO: 368590 - DNA, 4370 bp, Homo sapiens
tgcagatggtacgggttactgttagtcacattaaatccacagccaataagtaataaacaacacaaggcagaactgaagcccttaagagccgattatctcatcgccagagtcgtgactgtgctggagaaactgatcaaagagtttcaggacaaagggcccaacagcgtccttcccctttattaccgatactgggtccacagtggtcagcaagtccatctgggcagcgcagagggaccaaaggtgtccatcgttggcctggacgattctggcttcctccaggttcaccaggagggcggcgaggttgtgactgtgcacccggacggcaactccttcgacatgctgagaaacctcatcctccccaaacggcggtaatgccgggcgtccccgagacgcggctgcctgtccgtgcccatgcatctggaaatctaatttagagttgtaggtgaattttcttttcctccaattcatttgttaagtctttgttctttttctgtgtttctgtttgtttttaggtttgttttgttgtcgttttctttggtgtttgaagaggctctgggatagatggttaagaagtagaaaatttagtttagggaaagccctcccacaggtgggaaattgctctcccctctgtggcttggacttacgtttattgtcaaggggagtttttacatggaaatgacaatgggaaaattcagatattttcttagtagtgcagacctttacccctagtctatgaaaaaacaaaccaaaatatgctcttgcgcccaggccagtggtgagttagaggtatgctatcactgtttgtaagcatctggggaggtactgaactgtaagaacatgcttggacacttagtcattgttctgtgtttttattaatgaagaaaagggaagacagacttccaagagttactgtccacccggtggtgtggccccatagcgaagtctaaatgcctgtagagatagagctagctggtgtggttgcagtgaccttgtagaggaaatcagttcattactttgacatcattcagtgagctctcctttcctaaggaagtttaaatgtccttagttagggactgactttcttaagtaagtttaaatttactacatattgtgaagagacaggatcaagttcagaatccttaaatgtctgattaggcatcacttggatgaggaggtgggcgatttggctctgacagctggagatgaaggcacactcataccacatacaagggaggatttggagcttttaagccagtttcagatttactctgaaatgtggagcattcctgcaagactgtgcagctcacggaatatagaagacatggcattttactcagaagtcataagtttttgcccccctcatttacctcgtattaccaagaaagaaaatgttatcgatactaaacaccatcagttcagagggaggatgtgtgtgtgtgcccgcatatgtgtgtgcgtgcgtgtgtgcgcacatagctttaaaagaagacattcaaaatttgatgtgctacaagcctcatgaaagaacaaaagaaatgaagccttttgatatgcattcgctattcccagatgtacgccatgccttttccatgtccctcctatctctgttgaacttatgaatcatactcattacttttcagctttttaaaaggccaatttttgtccagttttctctcttccagtcccagctgaaattagtggaaagaaagtttgatggagctttcagctttgaacaaaatcccttcattgtaaactagcaccatctttatccaggtcttacccagtcaggctaattccagaaacttgtggtttttagtatagtctgtctacctttagccaggcacaggacagccctatgaaaaaatacccaatatatattttttggaaatgaaacattaaaagaacttaaaaagtaatttttggaaatgaggcttcaattagaattatttttctcaaaaaacaaacaaacaaaaaacacaaaaaaaaccactcttctccaaatgcccaagccttctttcaaaattagttagaaacttaagtaaaatacaagtccacaccatccccaaattacaaaatggacttacccttgagagggcatctgcagaatatcatcagggacaaagatctcgaggctaacgatgtaggtttcatttctcagactttgtaatataaggcaagccctctctcagagctgccatcatcactttttgaatttctttgggggttatttaatgaaaaacatgctatgttttgttttaagctgaagtcctattctggacactctgctttgggaaaaaatgttatcatttaatttcctttctgcaaattaaaactaatgaagtgtggccttgtcaaaggctatggagatgttccgggcatactgctgtgctctgtgctttccagcaggcgctcctccctcacgcaggagactcagttgtcctgagagagatgaagcagccttgaagcagatgctgcgttttccataaacctgattttgcctcacatgaaccaaagactctcaaaactccgcttctatagaattagctgaataaaggcattttactgatagctgttcgtgttagcgaaacctgtctacctgctatagcacactctccgatttgggccatttatgcaccccgcaacctgggatctcaaggagctttaaagtcttaatgggaacttggcattttcctgatgatctttaaaatgtggtcactaaactcaggattggcgtgtgcttttagaacactggagtagcccttgttttagaggctgtgcattgagtatcgaccgtattttgtaaaaggcaagatatcctcccttccaggctggtaacgggtttcaaggggactcttgaggaagtgccccctaaaatagaacacagcaataactgggcttcctgtccccacccccaccccagcagtgctctctggcactgggaactctgctagggagtggtggaagtaggaaggatttgtgtgcaaaggaaaatcgtggttgagtttcactgcagcaggctgacgttgcctgatgtgagagcaagtggccgactggggtgcgggtgcacaggtcgggggagcacaggccacagagcgcagcctctgggggtcccccaaggcacagcatatacagcatggtcgccccttgccctggagtctgggaacaaagagaggagccagcctccccgcactgcttcagatggaaaagggaggcagggtgggcttccgttctccagatctgtttgctcttaacaggcagaacatgggagaatccttattcctggttaatcactatgcatatttgaaataaaagaaagcgtaagcctctgcaattttaacttctcaaaggatgtctctgaaaagaatcactttaaaccaatgcctataaaaagcaagtctaccaaaataaactaagactttctatgtggtttgggctccctcttatttttacaagtttcatttttaaaagtaggcaactactttgggttacagtatttttattcatatttaaacatttttacaaaataaataaagtgttttacatagtaaggaatatgtacgtatttccaagtattaagaagccaagtgtttttttttttgacgtattattgacaaatgtattcagcgccatacacaagagaaatattattactccaaagaacgaaagttaacaaaactccaaagcaaaaacccttttaatggaggtgagaaataaatttaatgtaacaacagctagatggtttttaggatttttcttttcttttgtggaaacttcttgacttgacttttcatctgaacagtttttccccccaagattttaatcttatatgtcatacttaagtttaggaacagcttgaataattagcattctagataacacaagggccatgattcactaaaattccaagctactgtaattttatggcatttatttgcaaatgttctttgtatctcattttatctgtagcagtccccactagtctaccttaaccatcttatagctctggtaaattaaaacttacgtagactttatacaagatccattggccgtattaaacctcccccactcttagggcttagggcggaagggacgaaggcagggctgataggacttttaaaaggataaaaggagtgggggcaagggaggcggaaaatacaggctcttgcagataccctccgcgctgccctccacacccagcccactgctctacaaaggtatgaatggaatggcttttctagaaaagggcttccaagaacataaaggaattcctttccctgggaggccccgtggagggctgagccagccttgaattgggcttatttctcaaatccatttgatctggcatttttgtcaacatggtacatgttagg

SEQ ID NO: 368591 - DNA, 230 bp, Homo sapiens
gcttttacctcctggccccaagaggcacttcaatatcggattgtcccaaagaagtgattagctgcctgaaaaagaggagaggacgaggcccatgttaccttggtttctgcttatcttcccttagctcagtgacttgcctgggccccttgtgtcctgtgacggcttaattaatgtgcagatttccctttaggatatcaacttacgagtgaagtggcccaacgatatttatt

SEQ ID NO: 368592 - DNA, 6650 bp, Homo sapiens
acgagagggcgcagcgcggcgcggcagggattcgcgggcgaccacccggcgcaggagcggccgcgtttcggcctcagaatccattgaagacttgaacaagtgggccctatttcttgtgtctccttttatacttgaagcagaacacatagcatttgtgacggagagcatttgggtacaaagtgagaatttacagagatcatcctcttcagaaacagttcggtttttgcccactagggatgatgtggtttctcatgaggttacttgctctaaaggactttatattttggaaccataagagcacccttgtggcccaggcactttatggatgatcccttttagtgctcccagtaaccttccaagattgtcaagtggtcagactgttgtttgccattagcttgcagacctggggatccttatcggctaattgctgaagcaagtgtggacaacttcagcaagctgggggtggcgttcatggaagatagactccacatggataatggactggtaccccaaaagattgtgtcggtgcacttgcaggactccactctgaaggaagttaaggatcaggtctcaaacaagcaagcccagatcctagagccgaagcctgaaccttctcttgagattaagcctgagcaggacggtatggagcatgttggcagagatgacccaaaggctcttggtgaagaacccaaacaaaggagaggcagtgcctctgggagtgagcctgctggggacagtgacaggggagggggccccgttgagcattatcacctccatctgtctagttgccacgagtgtctggaacttgagaacagcaccattgagtcagtcaagtttgcgtctgccgagaacattccagaccttccctacgattatagcagcagtttggagagtgttgctgatgagacctcccccgaaagagaagggaggagagtcaacctcacgggaaaggcacccaacatcctcctctatgtgggctccgactcccaggaagccctcggccggttccacgaggtccggtctgtgctggccgactgtgtggacattgacagttatattctctaccacctgctggaggacagtgctctcagagacccgtggacggacaactgtctgctgttggtcattgctaccagggagtccattcccgaagacctgtaccagaagttcatggcctatctttctcagggagggaaggtgttgggcctgtcttcatccttcacctttggtggctttcaggtgacaagcaagggtgcactgcacaagacagtccagaacttggttttctccaaggctgaccagagcgaggtgaagctcagcgtcttgagcagtggctgcaggtaccaggaaggccccgtccggctcagccccggcaggctccagggccacctggagaatgaggacaaggacaggatgattgtgcatgtgccttttggaactcgcgggggagaagctgttctttgccaggtgcacttagaactacctcccagctccaacatagtgcaaactccagaagattttaacttgctcaagtcaagcaattttagaagatacgaagtccttagagagattctgacaacccttggcctcagctgtgacatgaaacaagttcctgccttaactcctctttacttgctgtcagctgcggaggaaatcagggatcctcttatgcagtggcttgggaaacatgtggactccgagggagaaataaaatccggccagctctctcttagatttgtttcatcctacgtgtctgaagtagaaataaccccatcttgtatacctgtggtgaccaacatggaggccttctcatcagaacatttcaacttagagatctatcgccaaaatctgcagaccaagcagttggggaaagtaattttgtttgccgaagtgacccccacaacgatgcgtctcctggatgggctgatgtttcagacaccgcaggaaatgggcttaatagtgatcgcggcccggcagaccgagggcaaaggacggggagggaatgtgtggctgagccctgtgggatgtgctctttctactctgctcatctccattccactgagatcccagctgggacagaggatcccgtttgtccagcatctgatgtccgtggctgtcgtggaagcagtgaggtccattcccgagtatcaggatatcaacttacgagtgaagtggcccaacgatatttattacagtgacctcatgaagatcggcggagttctggttaactcaacactcatgggagaaacattttatatacttattggctgtggatttaatgtgactaacagtaaccctaccatctgcatcaacgacctcatcacagaatacaataaacaacacaaggcagaactgaagcccttaagagccgattatctcatcgccagagtcgtgactgtgctggagaaactgatcaaagagtttcaggacaaagggcccaacagcgtccttcccctttattaccgatactgggtccacagtggtcagcaagtccatctgggcagcgcagagggaccaaaggtgtccatcgttggcctggacgattctggcttcctccaggttcaccaggagggcggcgaggttgtgactgtgcacccggacggcaactccttcgacatgctgagaaacctcatcctccccaaacggcggtaatgccgggcgtccccgagacgcggctgcctgtccgtgcccatgcatctggaaatctaatttagagttgtaggtgaattttcttttcctccaattcatttgttaagtctttgttctttttctgtgtttctgtttgtttttaggtttgttttgttgtcgttttctttggtgtttgaagaggctctgggatagatggttaagaagtagaaaatttagtttagggaaagccctcccacaggtgggaaattgctctcccctctgtggcttggacttacgtttattgtcaaggggagtttttacatggaaatgacaatgggaaaattcagatattttcttagtagtgcagacctttacccctagtctatgaaaaaacaaaccaaaatatgctcttgcgcccaggccagtggtgagttagaggtatgctatcactgtttgtaagcatctggggaggtactgaactgtaagaacatgcttggacacttagtcattgttctgtgtttttattaatgaagaaaagggaagacagacttccaagagttactgtccacccggtggtgtggccccatagcgaagtctaaatgcctgtagagatagagctagctggtgtggttgcagtgaccttgtagaggaaatcagttcattactttgacatcattcagtgagctctcctttcctaaggaagtttaaatgtccttagttagggactgactttcttaagtaagtttaaatttactacatattgtgaagagacaggatcaagttcagaatccttaaatgtctgattaggcatcacttggatgaggaggtgggcgatttggctctgacagctggagatgaaggcacactcataccacatacaagggaggatttggagcttttaagccagtttcagatttactctgaaatgtggagcattcctgcaagactgtgcagctcacggaatatagaagacatggcattttactcagaagtcataagtttttgcccccctcatttacctcgtattaccaagaaagaaaatgttatcgatactaaacaccatcagttcagagggaggatgtgtgtgtgtgcccgcatatgtgtgtgcgtgcgtgtgtgcgcacatagctttaaaagaagacattcaaaatttgatgtgctacaagcctcatgaaagaacaaaagaaatgaagccttttgatatgcattcgctattcccagatgtacgccatgccttttccatgtccctcctatctctgttgaacttatgaatcatactcattacttttcagctttttaaaaggccaatttttgtccagttttctctcttccagtcccagctgaaattagtggaaagaaagtttgatggagctttcagctttgaacaaaatcccttcattgtaaactagcaccatctttatccaggtcttacccagtcaggctaattccagaaacttgtggtttttagtatagtctgtctacctttagccaggcacaggacagccctatgaaaaaatacccaatatatattttttggaaatgaaacattaaaagaacttaaaaagtaatttttggaaatgaggcttcaattagaattatttttctcaaaaaacaaacaaacaaaaaacacaaaaaaaaccactcttctccaaatgcccaagccttctttcaaaattagttagaaacttaagtaaaatacaagtccacaccatccccaaattacaaaatggacttacccttgagagggcatctgcagaatatcatcagggacaaagatctcgaggctaacgatgtaggtttcatttctcagactttgtaatataaggcaagccctctctcagagctgccatcatcactttttgaatttctttgggggttatttaatgaaaaacatgctatgttttgttttaagctgaagtcctattctggacactctgctttgggaaaaaatgttatcatttaatttcctttctgcaaattaaaactaatgaagtgtggccttgtcaaaggctatggagatgttccgggcatactgctgtgctctgtgctttccagcaggcgctcctccctcacgcaggagactcagttgtcctgagagagatgaagcagccttgaagcagatgctgcgttttccataaacctgattttgcctcacatgaaccaaagactctcaaaactccgcttctatagaattagctgaataaaggcattttactgatagctgttcgtgttagcgaaacctgtctacctgctatagcacactctccgatttgggccatttatgcaccccgcaacctgggatctcaaggagctttaaagtcttaatgggaacttggcattttcctgatgatctttaaaatgtggtcactaaactcaggattggcgtgtgcttttagaacactggagtagcccttgttttagaggctgtgcattgagtatcgaccgtattttgtaaaaggcaagatatcctcccttccaggctggtaacgggtttcaaggggactcttgaggaagtgccccctaaaatagaacacagcaataactgggcttcctgtccccacccccaccccagcagtgctctctggcactgggaactctgctagggagtggtggaagtaggaaggatttgtgtgcaaaggaaaatcgtggttgagtttcactgcagcaggctgacgttgcctgatgtgagagcaagtggccgactggggtgcgggtgcacaggtcgggggagcacaggccacagagcgcagcctctgggggtcccccaaggcacagcatatacagcatggtcgccccttgccctggagtctgggaacaaagagaggagccagcctccccgcactgcttcagatggaaaagggaggcagggtgggcttccgttctccagatctgtttgctcttaacaggcagaacatgggagaatccttattcctggttaatcactatgcatatttgaaataaaagaaagcgtaagcctctgcaattttaacttctcaaaggatgtctctgaaaagaatcactttaaaccaatgcctataaaaagcaagtctaccaaaataaactaagactttctatgtggtttgggctccctcttatttttacaagtttcatttttaaaagtaggcaactactttgggttacagtatttttattcatatttaaacatttttacaaaataaataaagtgttttacatagtaaggaatatgtacgtatttccaagtattaagaagccaagtgtttttttttttgacgtattattgacaaatgtattcagcgccatacacaagagaaatattattactccaaagaacgaaagttaacaaaactccaaagcaaaaacccttttaatggaggtgagaaataaatttaatgtaacaacagctagatggtttttaggatttttcttttcttttgtggaaacttcttgacttgacttttcatctgaacagtttttccccccaagattttaatcttatatgtcatacttaagtttaggaacagcttgaataattagcattctagataacacaagggccatgattcactaaaattccaagctactgtaattttatggcatttatttgcaaatgttctttgtatctcattttatctgtagcagtccccactagtctaccttaaccatcttatagctctggtaaattaaaacttacgtagactttatacaagatccattggccgtattaaacctcccccactcttagggcttagggcggaagggacgaaggcagggctgataggacttttaaaaggataaaaggagtgggggcaagggaggcggaaaatacaggctcttgcagataccctccgcgctgccctccacacccagcccactgctctacaaaggtatgaatggaatggcttttctagaaaagggcttccaagaacataaaggaattcctttccctgggaggccccgtggagggctgagccagccttgaattgggcttatttctcaaatccatttgatctggcatttttgtcaacatggtacatgttagg

SEQ ID NO: 368593 - DNA, 6681 bp, Homo sapiens
  misc_feature (16)..(16): n is a, c, g, or t
  misc_feature (185)..(185): n is a, c, g, or t
ggccgcccggggctcnggggactcgggtgtccaggtgccgaagtcgccgcttcacgggggactcaggcccgtgagtgggtttcctaagaacttaccagattccacggctcgggtttcctgccttggatcctgctttttattccccagggggagttatttatagacaggaatcgtgtgttcaaggnctggctcttcggactcggcgtttttcttgttcgaggtgcttcaatgggggctggatgccatcatcttccagtccattgaagacttgaacaagtgggccctatttcttgtgtctccttttatacttgaagcagaacacatagcatttgtgacggagagcatttgggtacaaagtgagaatttacagagatcatcctcttcagaaacaattgtcaagtggtcagactgttgtttgccattagcttgcagacctggggatccttatcggctaattgctgaagcaagtgtggacaacttcagcaagctgggggtggcgttcatggaagatagactccacatggataatggactggtaccccaaaagattgtgtcggtgcacttgcaggactccactctgaaggaagttaaggatcaggtctcaaacaagcaagcccagatcctagagccgaagcctgaaccttctcttgagattaagcctgagcaggacggtatggagcatgttggcagagatgacccaaaggctcttggtgaagaacccaaacaaaggagaggcagtgcctctgggagtgagcctgctggggacagtgacaggggagggggccccgttgagcattatcacctccatctgtctagttgccacgagtgtctggaacttgagaacagcaccattgagtcagtcaagtttgcgtctgccgagaacattccagaccttccctacgattatagcagcagtttggagagtgttgctgatgagacctcccccgaaagagaagggaggagagtcaacctcacgggaaaggcacccaacatcctcctctatgtgggctccgactcccaggaagccctcggccggttccacgaggtccggtctgtgctggccgactgtgtggacattgacagttatattctctaccacctgctggaggacagtgctctcagagacccgtggacggacaactgtctgctgttggtcattgctaccagggagtccattcccgaagacctgtaccagaagttcatggcctatctttctcagggagggaaggtgttgggcctgtcttcatccttcacctttggtggctttcaggtgacaagcaagggtgcactgcacaagacagtccagaacttggttttctccaaggctgaccagagcgaggtgaagctcagcgtcttgagcagtggctgcaggtaccaggaaggccccgtccggctcagccccggcaggctccagggccacctggagaatgaggacaaggacaggatgattgtgcatgtgccttttggaactcgcgggggagaagctgttctttgccaggtgcacttagaactacctcccagctccaacatagtgcaaactccagaagattttaacttgctcaagtcaagcaattttagaagatacgaagtccttagagagattctgacaacccttggcctcagctgtgacatgaaacaagttcctgccttaactcctctttacttgctgtcagctgcggaggaaatcagggatcctcttatgcagtggcttgggaaacatgtggactccgagggagaaataaaatccggccagctctctcttagatttgtttcatcctacgtgtctgaagtagaaataaccccatcttgtatacctgtggtgaccaacatggaggccttctcatcagaacatttcaacttagagatctatcgccaaaatctgcagaccaagcagttggggaaagtaattttgtttgccgaagtgacccccacaacgatgcgtctcctggatgggctgatgtttcagacaccgcaggaaatgggcttaatagtgatcgcggcccggcagaccgagggcaaaggacggggagggaatgtgtggctgagccctgtgggatgtgctctttctactctgctcatctccattccactgagatcccagctgggacagaggatcccgtttgtccagcatctgatgtccgtggctgtcgtggaagcagtgaggtccattcccgagtatcaggatatcaacttacgagtgaagtggcccaacgatatttattacagtgacctcatgaagatcggcggagttctggttaactcaacactcatgggagaaacattttatatacttattggctgtggatttaatgtgactaacagtaaccctaccatctgcatcaacgacctcatcacagaatacaataaacaacacaaggcagaactgaagcccttaagagccgattatctcatcgccagagtcgtgactgtgctggagaaactgatcaaagagtttcaggacaaagggcccaacagcgtccttcccctttattaccgatactgggtccacagtggtcagcaagtccatctgggcagcgcagagggaccaaaggtgtccatcgttggcctggacgattctggcttcctccaggttcaccaggagggcggcgaggttgtgactgtgcacccggacggcaactccttcgacatgctgagaaacctcatcctccccaaacggcggtaatgccgggcgtccccgagacgcggctgcctgtccgtgcccatgcatctggaaatctaatttagagttgtaggtgaattttcttttcctccaattcatttgttaagtctttgttctttttctgtgtttctgtttgtttttaggtttgttttgttgtcgttttctttggtgtttgaagaggctctgggatagatggttaagaagtagaaaatttagtttagggaaagccctcccacaggtgggaaattgctctcccctctgtggcttggacttacgtttattgtcaaggggagtttttacatggaaatgacaatgggaaaattcagatattttcttagtagtgcagacctttacccctagtctatgaaaaaacaaaccaaaatatgctcttgcgcccaggccagtggtgagttagaggtatgctatcactgtttgtaagcatctggggaggtactgaactgtaagaacatgcttggacacttagtcattgttctgtgtttttattaatgaagaaaagggaagacagacttccaagagttactgtccacccggtggtgtggccccatagcgaagtctaaatgcctgtagagatagagctagctggtgtggttgcagtgaccttgtagaggaaatcagttcattactttgacatcattcagtgagctctcctttcctaaggaagtttaaatgtccttagttagggactgactttcttaagtaagtttaaatttactacatattgtgaagagacaggatcaagttcagaatccttaaatgtctgattaggcatcacttggatgaggaggtgggcgatttggctctgacagctggagatgaaggcacactcataccacatacaagggaggatttggagcttttaagccagtttcagatttactctgaaatgtggagcattcctgcaagactgtgcagctcacggaatatagaagacatggcattttactcagaagtcataagtttttgcccccctcatttacctcgtattaccaagaaagaaaatgttatcgatactaaacaccatcagttcagagggaggatgtgtgtgtgtgcccgcatatgtgtgtgcgtgcgtgtgtgcgcacatagctttaaaagaagacattcaaaatttgatgtgctacaagcctcatgaaagaacaaaagaaatgaagccttttgatatgcattcgctattcccagatgtacgccatgccttttccatgtccctcctatctctgttgaacttatgaatcatactcattacttttcagctttttaaaaggccaatttttgtccagttttctctcttccagtcccagctgaaattagtggaaagaaagtttgatggagctttcagctttgaacaaaatcccttcattgtaaactagcaccatctttatccaggtcttacccagtcaggctaattccagaaacttgtggtttttagtatagtctgtctacctttagccaggcacaggacagccctatgaaaaaatacccaatatatattttttggaaatgaaacattaaaagaacttaaaaagtaatttttggaaatgaggcttcaattagaattatttttctcaaaaaacaaacaaacaaaaaacacaaaaaaaaccactcttctccaaatgcccaagccttctttcaaaattagttagaaacttaagtaaaatacaagtccacaccatccccaaattacaaaatggacttacccttgagagggcatctgcagaatatcatcagggacaaagatctcgaggctaacgatgtaggtttcatttctcagactttgtaatataaggcaagccctctctcagagctgccatcatcactttttgaatttctttgggggttatttaatgaaaaacatgctatgttttgttttaagctgaagtcctattctggacactctgctttgggaaaaaatgttatcatttaatttcctttctgcaaattaaaactaatgaagtgtggccttgtcaaaggctatggagatgttccgggcatactgctgtgctctgtgctttccagcaggcgctcctccctcacgcaggagactcagttgtcctgagagagatgaagcagccttgaagcagatgctgcgttttccataaacctgattttgcctcacatgaaccaaagactctcaaaactccgcttctatagaattagctgaataaaggcattttactgatagctgttcgtgttagcgaaacctgtctacctgctatagcacactctccgatttgggccatttatgcaccccgcaacctgggatctcaaggagctttaaagtcttaatgggaacttggcattttcctgatgatctttaaaatgtggtcactaaactcaggattggcgtgtgcttttagaacactggagtagcccttgttttagaggctgtgcattgagtatcgaccgtattttgtaaaaggcaagatatcctcccttccaggctggtaacgggtttcaaggggactcttgaggaagtgccccctaaaatagaacacagcaataactgggcttcctgtccccacccccaccccagcagtgctctctggcactgggaactctgctagggagtggtggaagtaggaaggatttgtgtgcaaaggaaaatcgtggttgagtttcactgcagcaggctgacgttgcctgatgtgagagcaagtggccgactggggtgcgggtgcacaggtcgggggagcacaggccacagagcgcagcctctgggggtcccccaaggcacagcatatacagcatggtcgccccttgccctggagtctgggaacaaagagaggagccagcctccccgcactgcttcagatggaaaagggaggcagggtgggcttccgttctccagatctgtttgctcttaacaggcagaacatgggagaatccttattcctggttaatcactatgcatatttgaaataaaagaaagcgtaagcctctgcaattttaacttctcaaaggatgtctctgaaaagaatcactttaaaccaatgcctataaaaagcaagtctaccaaaataaactaagactttctatgtggtttgggctccctcttatttttacaagtttcatttttaaaagtaggcaactactttgggttacagtatttttattcatatttaaacatttttacaaaataaataaagtgttttacatagtaaggaatatgtacgtatttccaagtattaagaagccaagtgtttttttttttgacgtattattgacaaatgtattcagcgccatacacaagagaaatattattactccaaagaacgaaagttaacaaaactccaaagcaaaaacccttttaatggaggtgagaaataaatttaatgtaacaacagctagatggtttttaggatttttcttttcttttgtggaaacttcttgacttgacttttcatctgaacagtttttccccccaagattttaatcttatatgtcatacttaagtttaggaacagcttgaataattagcattctagataacacaagggccatgattcactaaaattccaagctactgtaattttatggcatttatttgcaaatgttctttgtatctcattttatctgtagcagtccccactagtctaccttaaccatcttatagctctggtaaattaaaacttacgtagactttatacaagatccattggccgtattaaacctcccccactcttagggcttagggcggaagggacgaaggcagggctgataggacttttaaaaggataaaaggagtgggggcaagggaggcggaaaatacaggctcttgcagataccctccgcgctgccctccacacccagcccactgctctacaaaggtatgaatggaatggcttttctagaaaagggcttccaagaacataaaggaattcctttccctgggaggccccgtggagggctgagccagccttgaattgggcttatttctcaaatccatttgatctggcatttttgtcaacatggtacatgttagg

SEQ ID NO: 368594 - DNA, 928 bp, Homo sapiens
  misc_feature (20)..(20): n is a, c, g, or t
aattcggcacgaggatgatntggaagaggagaaacaagagtcagaaaaattagcagcatccgtgatctgactctgggtaccagtgggttgttgagatttctgttccccactcactgcagagctgctgcctgccaatgccccctgttgggcagggccacctgtgctagtttaacctggggtctttcactcccggactgcttcttggatgtgagttttaagttgagcaaagcgggctcgccctgccggcggcgcggccatgctcatcacgctgtgctacctgtacctgtgggcgcgctggggtcgccggccggctgagctcgtgcgcgccacggtgcggcggctgcgtgcctcgcgctgttccttcaccttctgcggcgcggccgcggagcccccgggcgcccgcgtgtgcctgagccgtggcggccgcgtcttctgcgtcagcgacagccaggtgggcgggtcgggcgggcgggcgacccgggccccgcgagccggaagtgcccccgtccctgcgcctcgtccccgccgggagcccgggagttcgggagccccggagtggcgccctcagtgcggcctgtgcggcccgggaggggctgttgccccggggcccagagagaggccggaggtgcgggactcggaccacggacccggtcgcctcttcccggccagccgggcggtgctggacgcgtgactctaggcgcgcacctgtgaggacgtgagctgtggattgacagccggacgccagcagtgcccacctggggtcgcccccaacctcctctcccacacttcgagccggcgtttgggtgaccgtgaaccaggagagacagctgtggcgggccgggagcggtggcttatgcctgtaatccctgcactctgggaggcctaggaggaaggacagctttgagcccaggagatggagaccagcctg

SEQ ID NO: 368595 - DNA, 777 bp, Homo sapiens
gaccccctcacgaccacctcgccccaaggcgacctcgaagtgcccccaactccgccacttctcaggaaagagattgggagaatgcggcagaactccccggaggagcaggcccgctcctcaccgcgcccccgcagggagaagggaggaccacctctcccccagaccctagccaaacctgacactcgggaccctgggatgggacgatctcccaggtgccagctcagggagtccatgaaaagcttcaacgaatcgaatgagccccttccccagccataatacccagccgccagagatgagggaggctatcattatttacattgcccgtgcctggaagggaaactgaagttgcgcaggaacaatccgaggaactgggccttgaaccgaaattccgaactcggacccgaataggcccagacagaactccgacaccgccccctacggtgcggcacgagagggctaaggggcgggggcatgtgcaccggaagctgcctctgcccacaaccaagatggctgaggagagggcggaagtgtccgcacgtcgggcctccgaggcttctctttctccccatggctctcccctagagccagtgggacccttcaggaccctgggctggaaccaccaccactggtcctgtctcaagtgcacttagggggtggtggaggcagggacacctgagacacacctgtctccatttccagttccaggaccccaaagccatttgcccctgtgccttatacacgtgccaacctggaaataaaatgtcagccttttttata

SEQ ID NO: 368596 - DNA, 1822 bp, Homo sapiens
gaccccctcacgaccacctcgccccaaggcgacctcgaagtgcccccaactccgccacttctcaggaaagagattgggagaatgcggcagaactccccggaggagcaggcccgctcctcaccgcgcccccgcagggagaagggaggaccacctctcccccagaccctagccaaacctgacactcgggaccctgggatgggacgatctcccaggtgccagctcagggagtccatgaaaagcttcaacgaatcgaatgagccccttccccagccataatacccagccgccagagatgagggaggctatcattatttacattgcccgtgcctggaagggaaactgaagttgcgcaggaacaatccgaggaactgggccttgaaccgaaattccgaactcggacccgaataggcccagacagaactccgacaccgccccctacggtgcggcacgagagggctaaggggcgggggcatgtgcaccggaagctgcctctgcccacaaccaagatggctgaggagagggcggaagtgtccgcacgtcgggcctccgaggcttctctttctcccctggcggtccggctctcgatggtggcgtgacgggggcgggggtggcggcgcgttctcctcggttgggagggaaccagcccgcgaacccaggccgggaggggggttcggcctgggggggaagggactgacatgtctctcgaagaccccttttttgtagtccgaggcgaggtgcagaaggcggtgaacacggcccgcgggctgtaccagcgctggtgcgagctcctgcaggaaagcgcggcggtcggacgcgaggagctggactggacgaccaatgagctgcggaatggcctgcgcagcatcgagtgggacctcgaggacctggaagagaccatcggtatagtggaagccaacccaggcaagttcaagctcccagccggggacctgcaggagagaaaggtgttcgtggagcggatgcgagaggcagtccaggaaatgaaggaccatatggtcagcccaacagccgtagcatttttggagaggaataacagagagatactcgcaggcaagccagctgcccagaagtcacccagcgacctgctggatgccagcgcagtctcggccacatctcgctacatcgaggagcagcaggccacacagcagctgatcatggatgaacaggatcaacagctggagatggtgtctgggagcatccaggttctgaagcacatgtccggccgcgttggagaagagctggacgagcagggcatcatgctggatgccttcgcccaagagatggaccacacccagtcccgcatggacggggtcctcaggaagttggccaaagtatcccacatgacgagtgaccgccgacagtggtgtgccatcgccgtgctagtgggggtgcttctcctcgttctcatcttactattctctctctgaccccagccctccctggcaggctggtcccttaagcctggggagccaccaagcactttggagctggcctcgccccctaggaggagagggtccctcctgggtagctggagagtagagggtcccgcctggggagctgtccccatggctctcccctagagccagtgggacccttcaggaccctgggctggaaccaccaccactggtcctgtctcaagtgcacttagggggtggtggaggcagggacacctgagacacacctgtctccatttccagttccaggaccccaaagccatttgcccctgtgccttatacacgtgccaacctggaaataaaatgtcagccttttttataataaaaaaaaaaaaacccaggattatacg

SEQ ID NO: 368597 - DNA, 1966 bp, Homo sapiens
gaccccctcacgaccacctcgccccaaggcgacctcgaagtgcccccaactccgccacttctcaggaaagagattgggagaatgcggcagaactccccggaggagcaggcccgctcctcaccgcgcccccgcagggagaagggaggaccacctctcccccagaccctagccaaacctgacactcgggaccctgggatgggacgatctcccaggtgccagctcagggagtccatgaaaagcttcaacgaatcgaatgagccccttccccagccataatacccagccgccagagatgagggaggctatcattatttacattgcccgtgcctggaagggaaactgaagttgcgcaggaacaatccgaggaactgggccttgaaccgaaattccgaactcggacccgaataggcccagacagaactccgacaccgccccctacggtgcggcacgagagggctaaggggcgggggcatgtgcaccggaagctgcctctgcccacaaccaagatggctgaggagagggcggaagtgtccgcacgtcgggcctccgaggcttctctttctcccctggcggtccggctctcgatggtggcgtgacgggggcgggggtggcggcgcgttctcctcggttgggagggaaccagcccgcgaacccaggccgggaggggggttcggcctgggggggaagggactgacatgtctctcgaagaccccttttttgtagtccgaggcgaggtgcagaaggcggtgaacacggcccgcgggctgtaccagcgctggtgcgagctcctgcaggaaagcgcggcggtcggacgcgaggagctggactggacgaccaatgagctgcggaatggcctgcgcagcatcgagtgggacctcgaggacctggaagagaccatcggtatagtggaagccaacccaggcaagttcaagctcccagccggggacctgcaggagagaaaggtgttcgtggagcggatgcgagaggcagtccaggaaatgaaggaccatatggtcagcccaacagccgtagcatttttggagaggaataacagagagatactcgcaggcaagccagctgcccagaagtcacccagcgacctgctggatgccagcgcagtctcggccacatctcgctacatcgaggagcagcaggccacacagcagctgatcatggatgaacaggatcaacagctggagatggtgtctgggagcatccaggttctgaagcacatgtccggccgcgttggagaagagctggacgagcagggcatcatgctggatgccttcgcccaagagatggaccacacccagtcccgcatggacggggtcctcaggaagttggccaaagtatcccacatgacgagtgaccgccgacagtggtgtgccatcgccgtgctagtgggggtgcttctcctcgttctcatcttactattctctctctgaccccagccctccctggcaggctggtcccttaagcctggggagccaccaagcactttggagctggcctcgccccctaggaggagagggtccctcctgggtagctggagagtagagggtcccgcctggggagctgtccccatggctctcccctagagccagtgggacccttcaggaccctgggctggaaccaccaccactggtcctgtctcaagtgcacttagggggtggtggaggcagggacacctgagacacacctgtctccatttccagttccaggaccccaaagccatttgcccctgtgccttatacacgtgccaacctggaaataaaatgtcagccttttttataaaaaaaaaaaaaaacaaacaaacaaacaaaacaaagaagaaaaaaaaagaaacagaaaaaaagagacagaaaaaaagacaaggaaaaaaaacaaaaaagaagaacacaaaaaaagacaagaaacagcagacgaaaacacagagataacacagagtgacgagccgctgcgcggg

SEQ ID NO: 368598 - DNA, 2034 bp, Homo sapiens
gaccccctcacgaccacctcgccccaaggcgacctcgaagtgcccccaactccgccacttctcaggaaagagattgggagaatgcggcagaactccccggaggagcaggcccgctcctcaccgcgcccccgcagggagaagggaggaccacctctcccccagaccctagccaaacctgacactcgggaccctgggatgggacgatctcccaggtgccagctcagggagtccatgaaaagcttcaacgaatcgaatgagccccttccccagccataatacccagccgccagagatgagggaggctatcattatttacattgcccgtgcctggaagggaaactgaagttgcgcaggaacaatccgaggaactgggccttgaaccgaaattccgaactcggacccgaataggcccagacagaactccgacaccgccccctacggtgcggcacgagagggctaaggggcgggggcatgtgcaccggaagctgcctctgcccacaaccaagatggctgaggagagggcggaagtgtccgcacgtcgggcctccgaggcttctctttctcccctggcggtccggctctcgatggtggcgtgacgggggcgggggtggcggcgcgttctcctcggttgggagggaaccagcccgcgaacccaggccgggaggggggttcggcctgggggggaagggactgacatgtctctcgaagaccccttttttgtagtccgagggtgagtgacaacgacgggggagggcggagggtgctctgtacccaagccagccagtgcccgggtgccggccccagcgtgcccggcgggctgggcaaggccgtcggggtgcagagtgggaggcgcacgcaggggtatataggggtctccggagtcccccatgcgtttgggtttgcagtcgggggcagaggcaggcgggaggaccgcctgcccccagccgcgcccgccgtgcccctgcccgcagcgaggtgcagaaggcggtgaacacggcccgcgggctgtaccagcgctggtgcgagctcctgcaggaaagcgcggcggtcggacgcgaggagctggactggacgaccaatgagctgcggaatggcctgcgcagcatcgagtgggacctcgaggacctggaagagaccatcggtatagtggaagccaacccaggcaagttcaagctcccagccggggacctgcaggagagaaaggtgttcgtggagcggatgcgagaggcagtccaggaaatgaaggaccatatggtcagcccaacagccgtagcatttttggagaggaataacagagagatactcgcaggcaagccagctgcccagaagtcacccagcgacctgctggatgccagcgcagtctcggccacatctcgctacatcgaggagcagcaggccacacagcagctgatcatggatgaacaggatcaacagctggagatggtgtctgggagcatccaggttctgaagcacatgtccggccgcgttggagaagagctggacgagcagggcatcatgctggatgccttcgcccaagagatggaccacacccagtcccgcatggacggggtcctcaggaagttggccaaagtatcccacatgacgagtgaccgccgacagtggtgtgccatcgccgtgctagtgggggtgcttctcctcgttctcatcttactattctctctctgaccccagccctccctggcaggctggtcccttaagcctggggagccaccaagcactttggagctggcctcgccccctaggaggagagggtccctcctgggtagctggagagtagagggtcccgcctggggagctgtccccatggctctcccctagagccagtgggacccttcaggaccctgggctggaaccaccaccactggtcctgtctcaagtgcacttagggggtggtggaggcagggacacctgagacacacctgtctccatttccagttccaggaccccaaagccatttgcccctgtgccttatacacgtgccaacctggaaataaaatgtcagccttttttata

SEQ ID NO: 368599 - DNA, 1839 bp, Homo sapiens
gaccccctcacgaccacctcgccccaaggcgacctcgaagtgcccccaactccgccacttctcaggaaagagattgggagaatgcggcagaactccccggaggagcaggcccgctcctcaccgcgcccccgcagggagaagggaggaccacctctcccccagaccctagccaaacctgacactcgggaccctgggatgggacgatctcccaggtgccagctcagggagtccatgaaaagcttcaacgaatcgaatgagccccttccccagccataatacccagccgccagagatgagggaggctatcattatttacattgcccgtgcctggaagggaaactgaagttgcgcaggaacaatccgaggaactgggccttgaaccgaaattccgaactcggacccgaataggcccagacagaactccgacaccgccccctacggtgcggcacgagagggctaaggggcgggggcatgtgcaccggaagctgcctctgcccacaaccaagatggctgaggagagggcggaagtgtccgcacgtcgggcctccgaggcttctctttctcccctggcggtccggctctcgatggtggcgtgacgggggcgggggtggcggcgcgttctcctcggttgggagggaaccagcccgcgaacccaggccgggaggggtatataggggtctccggagtcccccatgcgtttgggtttgcagtcgggggcagaggcaggcgggaggaccgcctgcccccagccgcgcccgccgtgcccctgcccgcagcgaggtgcagaaggcggtgaacacggcccgcgggctgtaccagcgctggtgcgagctcctgcaggaaagcgcggcggtcggacgcgaggagctggactggacgaccaatgagctgcggaatggcctgcgcagcatcgagtgggacctcgaggacctggaagagaccatcggtatagtggaagccaacccaggcaagttcaagctcccagccggggacctgcaggagagaaaggtgttcgtggagcggatgcgagaggcagtccaggaaatgaaggaccatatggtcagcccaacagccgtagcatttttggagaggaataacagagagatactcgcaggcaagccagctgcccagaagtcacccagcgacctgctggatgccagcgcagtctcggccacatctcgctacatcgaggagcagcaggccacacagcagctgatcatggatgaacaggatcaacagctggagatggtgtctgggagcatccaggttctgaagcacatgtccggccgcgttggagaagagctggacgagcagggcatcatgctggatgccttcgcccaagagatggaccacacccagtcccgcatggacggggtcctcaggaagttggccaaagtatcccacatgacgagtgaccgccgacagtggtgtgccatcgccgtgctagtgggggtgcttctcctcgttctcatcttactattctctctctgaccccagccctccctggcaggctggtcccttaagcctggggagccaccaagcactttggagctggcctcgccccctaggaggagagggtccctcctgggtagctggagagtagagggtcccgcctggggagctgtccccatggctctcccctagagccagtgggacccttcaggaccctgggctggaaccaccaccactggtcctgtctcaagtgcacttagggggtggtggaggcagggacacctgagacacacctgtctccatttccagttccaggaccccaaagccatttgcccctgtgccttatacacgtgccaacctggaaataaaatgtcagccttttttata

SEQ ID NO: 368600 - DNA, 2168 bp, Homo sapiens
gaccccctcacgaccacctcgccccaaggcgacctcgaagtgcccccaactccgccacttctcaggaaagagattgggagaatgcggcagaactccccggaggagcaggcccgctcctcaccgcgcccccgcagggagaagggaggaccacctctcccccagaccctagccaaacctgacactcgggaccctgggatgggacgatctcccaggtgccagctcagggagtccatgaaaagcttcaacgaatcgaatgagccccttccccagccataatacccagccgccagagatgagggaggctatcattatttacattgcccgtgcctggaagggaaactgaagttgcgcaggaacaatccgaggaactgggccttgaaccgaaattccgaactcggacccgaataggcccagacagaactccgacaccgccccctacggtgcggcacgagagggctaaggggcgggggcatgtgcaccggaagctgcctctgcccacaaccaagatggctgaggagagggcggaagtgtccgcacgtcgggcctccgaggcttctctttctcccctggcggtccggctctcgatggtggcgtgacgggggcgggggtggcggcgcgttctcctcggttgggagggaaccagcccgcgaacccaggccgggaggggggttcggcctgggggggaagggactgacatgtctctcgaagaccccttttttgtagtccgagggtgagtgacaacgacgggggagggcggagggtgctctgtacccaagccagccagtgcccgggtgccggccccagcgtgcccggcgggctgggcaaggccgtcggggtgcagagtgggaggcgcacgcaggggtatataggggtctccggagtcccccatgcgtttgggtttgcagtcgggggcagaggcaggcgggaggaccgcctgcccccagccgcgcccgccgtgcccctgcccgcagcgaggtgcagaaggcggtgaacacggcccgcgggctgtaccagcgctggtgcgagctcctgcaggaaagcgcggcggtcggacgcgaggagctggactggacgaccaatgagctgcggaatggcctgcgcagcatcgagtgggacctcgaggacctggaagagaccatcgatatcctggggctttgtggcagagggtggcatgggagagcccattgcggtggcagcccaccttcgggtagggctggacccctagggacggggatgatatctggctccggccttgacccttgactctcagcccacgtatagtggaagccaacccaggcaagttcaagctcccagccggggacctgcaggagagaaaggtgttcgtggagcggatgcgagaggcagtccaggaaatgaaggaccatatggtcagcccaacagccgtagcatttttggagaggaataacagagagatactcgcaggcaagccagctgcccagaagtcacccagcgacctgctggatgccagcgcagtctcggccacatctcgctacatcgaggagcagcaggccacacagcagctgatcatggatgaacaggatcaacagctggagatggtgtctgggagcatccaggttctgaagcacatgtccggccgcgttggagaagagctggacgagcagggcatcatgctggatgccttcgcccaagagatggaccacacccagtcccgcatggacggggtcctcaggaagttggccaaagtatcccacatgacgagtgaccgccgacagtggtgtgccatcgccgtgctagtgggggtgcttctcctcgttctcatcttactattctctctctgaccccagccctccctggcaggctggtcccttaagcctggggagccaccaagcactttggagctggcctcgccccctaggaggagagggtccctcctgggtagctggagagtagagggtcccgcctggggagctgtccccatggctctcccctagagccagtgggacccttcaggaccctgggctggaaccaccaccactggtcctgtctcaagtgcacttagggggtggtggaggcagggacacctgagacacacctgtctccatttccagttccaggaccccaaagccatttgcccctgtgccttatacacgtgccaacctggaaataaaatgtcagccttttttata

SEQ ID NO: 368601 - DNA, 1319 bp, Homo sapiens
  misc_feature (5)..(5): n is a, c, g, or t
ggcgnaatttagagtatcggctaggtacgaggctgggtttgaatcggccgagggttctcctcggttgggagggaaccagcccgcgaacccaggccgggaggggggttcggcctgggggggaagggactgacatgtctctcgaagaccccttttttgtagtccgaggcgaggtgcagaaggcggtgaacacggcccgcgggctgtaccagcgctggtgcgagctcctgcaggaaagcgcggcggtcggacgcgaggagctggactggacgaccaatgagctgcggaatggcctgcgcagcatcgagtgggacctcgaggacctggaagagaccatcggtatagtggaagccaacccaggcaagttcaagctcccagccggggacctgcaggagagaaaggtgttcgtggagcggatgcgagaggcagtccaggaaatgaaggaccatatggtcagcccaacagccgtagcatttttggagaggaataacagagagatactcgcaggcaagccagctgcccagaagtcacccagcgacctgctggatgccagcgcagtctcggccacatctcgctacatcgaggagcagcaggccacacagcagctgatcatggatgaacaggatcaacagctggagatggtgtctgggagcatccaggttctgaagcacatgtccggccgcgttggagaagagctggacgagcagggcatcatgctggatgccttcgcccaagagatggaccacacccagtcccgcatggacggggtcctcaggaagttggccaaagtatcccacatgacgagtggtgagtcccctcaggggaggggtcagtcctggtgggggcaggttgtaggtggtaccctctccccgtgacccctgaccttctcgttcccagaccgccgacagtggtgtgccatcgccgtgctagtgggggtgcttctcctcgttctcatcttactattctctctctgaccccagccctccctggcaggctggtcccttaagcctggggagccaccaagcactttggagctggcctcgccccctaggaggagagggtccctcctgggtagctggagagtagagggtcccgcctggggagctgtccccatggctctcccctagagccagtgggacccttcaggaccctgggctggaaccaccaccactggtcctgtctcaagtgcacttagggggtggtggaggcagggacacctgagacacacctgtctccatttccagttccaggaccccaaagccatttgcccctgtgccttatacacgtgccaacctggaaataaaatgtcagccttttttata

SEQ ID NO: 368602 - DNA, 1635 bp, Homo sapiens
gaccccctcacgaccacctcgccccaaggcgacctcgaagtgcccccaactccgccacttctcaggaaagagattgggagaatgcggcagaactccccggaggagcaggcccgctcctcaccgcgcccccgcagggagaagggaggaccacctctcccccagaccctagccaaacctgacactcgggaccctgggatgggacgatctcccaggtgccagctcagggagtccatgaaaagcttcaacgaatcgaatgagccccttccccagccataatacccagccgccagagatgagggaggctatcattatttacattgcccgtgcctggaagggaaactgaagttgcgcaggaacaatccgaggaactgggccttgaaccgaaattccgaactcggacccgaataggcccagacagaactccgacaccgccccctacggtgcggcacgagagggctaaggggcgggggcatgtgcaccggaagctgcctctgcccacaaccaagatggctgaggagagggcggaagtgtccgcacgtcgggcctccgaggcttctctttctcccctggcggtccggctctcgatggtggcgtgacgggggcgggggtggcggcgcgttctcctcggttgggagggaaccagcccgcgaacccaggccgggaggggggttcggcctgggggggaagggactgacatgtctctcgaagaccccttttttgtagtccgaggcgaggtgcagaaggcggtgaacacggcccgcgggctgtaccagcgctggtgcgagctcctgcaggaaagcgcggcggtcggacgcgaggagctggactggacgaccaatgagctgcggaatggcctgcgcagcatcgagtgggacctcgaggacctggaagagaccatcgatactcgcaggcaagccagctgcccagaagtcacccagcgacctgctggatgccagcgcagtctcggccacatctcgctacatcgaggagcagcaggccacacagcagctgatcatggatgaacaggatcaacagctggagatggtgtctgggagcatccaggttctgaagcacatgtccggccgcgttggagaagagctggacgagcagggcatcatgctggatgccttcgcccaagagatggaccacacccagtcccgcatggacggggtcctcaggaagttggccaaagtatcccacatgacgagtgaccgccgacagtggtgtgccatcgccgtgctagtgggggtgcttctcctcgttctcatcttactattctctctctgaccccagccctccctggcaggctggtcccttaagcctggggagccaccaagcactttggagctggcctcgccccctaggaggagagggtccctcctgggtagctggagagtagagggtcccgcctggggagctgtccccatggctctcccctagagccagtgggacccttcaggaccctgggctggaaccaccaccactggtcctgtctcaagtgcacttagggggtggtggaggcagggacacctgagacacacctgtctccatttccagttccaggaccccaaagccatttgcccctgtgccttatacacgtgccaacctggaaataaaatgtcagccttttttata

SEQ ID NO: 368603 - DNA, 612 bp, Homo sapiens
agctcggtaccccgtccagctcttctcccacgcggccggacatgtgcttcagaacctggatgcgttggagaagagctggacgagcagggcatcatgctggatgccttcgcccaagagatggaccacacccagtcccgcatggacggggtcctcaggaagttggccaaagtatcccacatgacgagtgaccgccgacagtggtgtgccatcgccgtgctagtgggggtgcttctcctcgttctcatcttactattctctctctgaccccagccctccctggcaggctggtcccttaagcctggggagccaccaagcactttggagctggcctcgccccctaggaggagagggtccctcctgggtagctggagagtagagggtcccgcctggggagctgtccccatggctctcccctagagccagtgggacccttcaggaccctgggctggaaccaccaccactggtcctgtctcaagtgcacttagggggtggtggaggcagggacacctgagacacacctgtctccatttccagttccaggaccccaaagccatttgcccctgtgccttatacacgtgccaacctggaaataaaatgtcagccttttttata

SEQ ID NO: 368604 - DNA, 1793 bp, Homo sapiens
gaccccctcacgaccacctcgccccaaggcgacctcgaagtgcccccaactccgccacttctcaggaaagagattgggagaatgcggcagaactccccggaggagcaggcccgctcctcaccgcgcccccgcagggagaagggaggaccacctctcccccagaccctagccaaacctgacactcgggaccctgggatgggacgatctcccaggtgccagctcagggagtccatgaaaagcttcaacgaatcgaatgagccccttccccagccataatacccagccgccagagatgagggaggctatcattatttacattgcccgtgcctggaagggaaactgaagttgcgcaggaacaatccgaggaactgggccttgaaccgaaattccgaactcggacccgaataggcccagacagaactccgacaccgccccctacggtgcggcacgagagggctaaggggcgggggcatgtgcaccggaagctgcctctgcccacaaccaagatggctgaggagagggcggaagtgtccgcacgtcgggcctccgaggcttctctttctcccctggcggtccggctctcgatggtggcgtgacgggggcgggggtggcggcgcgttctcctcggttgggagggaaccagcccgcgaacccaggccgggaggggggttcggcctgggggggaagggactgacatgtctctcgaagaccccttttttgtagtccgaggcgaggtgcagaaggcggtgaacacggcccgcgggctgtaccagcgctggtgcgagctcctgcaggaaagcgcggcggtcggacgcgaggagctggactggacgaccaatgagctgcggaatggcctgcgcagcatcgagtgggacctcgaggacctggaagagaccatcggtatagtggaagccaacccaggcaagttcaagctcccagccggggacctgcaggagagaaaggtgttcgtggagcggatgcgagaggcagtccaggaaatgaaggaccatatggtcagcccaacagccgtagcatttttggagaggaataacagagagatactcgcaggcaagccagctgcccagaagtcacccagcgacctgctggatgccagcgcagtctcggccacatctcgctacatcgaggagcagcaggccacacagcagctgatcatggatgaacaggatcaacagctggagatggtgtctgggagcatccaggttctgaagcacatgtccggccgcgttggagaagagctggacgagcagggcatcatgctggatgccttcgcccaagagatggaccacacccagtcccgcatggacggggtcctcaggaagttggccaaagtatcccacatgacgagtgaccgccgacagtggtgtgccatcgccgtgctagtgggggtgcttctcctcgttctcatcttactattctctctctgaccccagccctccctggcaggctggtcccttaagcctggggagccaccaagcactttggagctggcctcgccccctaggaggagagggtccctcctgggtagctggagagtagagggtcccgcctggggagctgtccccatggctctcccctagagccagtgggacccttcaggaccctgggctggaaccaccaccactggtcctgtctcaagtgcacttagggggtggtggaggcagggacacctgagacacacctgtctccatttccagttccaggaccccaaagccatttgcccctgtgccttatacacgtgccaacctggaaataaaatgtcagccttttttata

SEQ ID NO: 368605 - DNA, 1229 bp, Homo sapiens
  misc_feature (5)..(5): n is a, c, g, or t
ggcgnaatttagagtatcggctaggtacgaggctgggtttgaatcggccgagggttctcctcggttgggagggaaccagcccgcgaacccaggccgggaggggggttcggcctgggggggaagggactgacatgtctctcgaagaccccttttttgtagtccgaggcgaggtgcagaaggcggtgaacacggcccgcgggctgtaccagcgctggtgcgagctcctgcaggaaagcgcggcggtcggacgcgaggagctggactggacgaccaatgagctgcggaatggcctgcgcagcatcgagtgggacctcgaggacctggaagagaccatcggtatagtggaagccaacccaggcaagttcaagctcccagccggggacctgcaggagagaaaggtgttcgtggagcggatgcgagaggcagtccaggaaatgaaggaccatatggtcagcccaacagccgtagcatttttggagaggaataacagagagatactcgcaggcaagccagctgcccagaagtcacccagcgacctgctggatgccagcgcagtctcggccacatctcgctacatcgaggagcagcaggccacacagcagctgatcatggatgaacaggatcaacagctggagatggtgtctgggagcatccaggttctgaagcacatgtccggccgcgttggagaagagctggacgagcagggcatcatgctggatgccttcgcccaagagatggaccacacccagtcccgcatggacggggtcctcaggaagttggccaaagtatcccacatgacgagtgaccgccgacagtggtgtgccatcgccgtgctagtgggggtgcttctcctcgttctcatcttactattctctctctgaccccagccctccctggcaggctggtcccttaagcctggggagccaccaagcactttggagctggcctcgccccctaggaggagagggtccctcctgggtagctggagagtagagggtcccgcctggggagctgtccccatggctctcccctagagccagtgggacccttcaggaccctgggctggaaccaccaccactggtcctgtctcaagtgcacttagggggtggtggaggcagggacacctgagacacacctgtctccatttccagttccaggaccccaaagccatttgcccctgtgccttatacacgtgccaacctggaaataaaatgtcagccttttttata

SEQ ID NO: 368606 - DNA, 1883 bp, Homo sapiens
gaccccctcacgaccacctcgccccaaggcgacctcgaagtgcccccaactccgccacttctcaggaaagagattgggagaatgcggcagaactccccggaggagcaggcccgctcctcaccgcgcccccgcagggagaagggaggaccacctctcccccagaccctagccaaacctgacactcgggaccctgggatgggacgatctcccaggtgccagctcagggagtccatgaaaagcttcaacgaatcgaatgagccccttccccagccataatacccagccgccagagatgagggaggctatcattatttacattgcccgtgcctggaagggaaactgaagttgcgcaggaacaatccgaggaactgggccttgaaccgaaattccgaactcggacccgaataggcccagacagaactccgacaccgccccctacggtgcggcacgagagggctaaggggcgggggcatgtgcaccggaagctgcctctgcccacaaccaagatggctgaggagagggcggaagtgtccgcacgtcgggcctccgaggcttctctttctcccctggcggtccggctctcgatggtggcgtgacgggggcgggggtggcggcgcgttctcctcggttgggagggaaccagcccgcgaacccaggccgggaggggggttcggcctgggggggaagggactgacatgtctctcgaagaccccttttttgtagtccgaggcgaggtgcagaaggcggtgaacacggcccgcgggctgtaccagcgctggtgcgagctcctgcaggaaagcgcggcggtcggacgcgaggagctggactggacgaccaatgagctgcggaatggcctgcgcagcatcgagtgggacctcgaggacctggaagagaccatcggtatagtggaagccaacccaggcaagttcaagctcccagccggggacctgcaggagagaaaggtgttcgtggagcggatgcgagaggcagtccaggaaatgaaggaccatatggtcagcccaacagccgtagcatttttggagaggaataacagagagatactcgcaggcaagccagctgcccagaagtcacccagcgacctgctggatgccagcgcagtctcggccacatctcgctacatcgaggagcagcaggccacacagcagctgatcatggatgaacaggatcaacagctggagatggtgtctgggagcatccaggttctgaagcacatgtccggccgcgttggagaagagctggacgagcagggcatcatgctggatgccttcgcccaagagatggaccacacccagtcccgcatggacggggtcctcaggaagttggccaaagtatcccacatgacgagtggtgagtcccctcaggggaggggtcagtcctggtgggggcaggttgtaggtggtaccctctccccgtgacccctgaccttctcgttcccagaccgccgacagtggtgtgccatcgccgtgctagtgggggtgcttctcctcgttctcatcttactattctctctctgaccccagccctccctggcaggctggtcccttaagcctggggagccaccaagcactttggagctggcctcgccccctaggaggagagggtccctcctgggtagctggagagtagagggtcccgcctggggagctgtccccatggctctcccctagagccagtgggacccttcaggaccctgggctggaaccaccaccactggtcctgtctcaagtgcacttagggggtggtggaggcagggacacctgagacacacctgtctccatttccagttccaggaccccaaagccatttgcccctgtgccttatacacgtgccaacctggaaataaaatgtcagccttttttata

SEQ ID NO: 368607 - DNA, 1710 bp, Homo sapiens
gaccccctcacgaccacctcgccccaaggcgacctcgaagtgcccccaactccgccacttctcaggaaagagattgggagaatgcggcagaactccccggaggagcaggcccgctcctcaccgcgcccccgcagggagaagggaggaccacctctcccccagaccctagccaaacctgacactcgggaccctgggatgggacgatctcccaggtgccagctcagggagtccatgaaaagcttcaacgaatcgaatgagccccttccccagccataatacccagccgccagagatgagggaggctatcattatttacattgcccgtgcctggaagggaaactgaagttgcgcaggaacaatccgaggaactgggccttgaaccgaaattccgaactcggacccgaataggcccagacagaactccgacaccgccccctacggtgcggcacgagagggctaaggggcgggggcatgtgcaccggaagctgcctctgcccacaaccaagatggctgaggagagggcggaagtgtccgcacgtcgggcctccgaggcttctctttctcccctggcggtccggctctcgatggtggcgtgacgggggcgggggtggcggcgcgttctcctcggttgggagggaaccagcccgcgaacccaggccgggaggggggttcggcctgggggggaagggactgacatgtctctcgaagaccccttttttgtagtccgaggcgaggtgcagaaggcggtgaacacggcccgcgggctgtaccagcgctggtgcgagctcctgcaggaaagcgcggcggtcggacgcgaggagctggactggacgaccaatgagctgcggaatggcctgcgcagcatcgagtgggacctcgaggacctggaagagaccatcggtatagtggaagccaacccaggcaagttcaagctcccagccggggacctgcaggagagaaaggtgttcgtggagcggatgcgagaggcagtccaggaaatgaaggaccatatggtcagcccaacagccgtagcatttttggagaggaataacagagagatactcgcaggcaagccagctgcccagaagtcacccagcgacctgctggatgccagcgcagtctcggccacatctcgctacatcgaggagcagcaggccacacagcagctgatcatggatgaacaggatcaacagctggagatggtgtctgggagcatccaggttctgaagcacatgtccggccgcgttggagaagagctggacgagcagggcatcatgctggatgccttcgcccaagagatggaccacacccagtcccgcatggacggggtcctcaggaagttggccaaagtatcccacatgacgagtgccctccctggcaggctggtcccttaagcctggggagccaccaagcactttggagctggcctcgccccctaggaggagagggtccctcctgggtagctggagagtagagggtcccgcctggggagctgtccccatggctctcccctagagccagtgggacccttcaggaccctgggctggaaccaccaccactggtcctgtctcaagtgcacttagggggtggtggaggcagggacacctgagacacacctgtctccatttccagttccaggaccccaaagccatttgcccctgtgccttatacacgtgccaacctggaaataaaatgtcagccttttttata

SEQ ID NO: 368608 - DNA, 1964 bp, Homo sapiens
gaccccctcacgaccacctcgccccaaggcgacctcgaagtgcccccaactccgccacttctcaggaaagagattgggagaatgcggcagaactccccggaggagcaggcccgctcctcaccgcgcccccgcagggagaagggaggaccacctctcccccagaccctagccaaacctgacactcgggaccctgggatgggacgatctcccaggtgccagctcagggagtccatgaaaagcttcaacgaatcgaatgagccccttccccagccataatacccagccgccagagatgagggaggctatcattatttacattgcccgtgcctggaagggaaactgaagttgcgcaggaacaatccgaggaactgggccttgaaccgaaattccgaactcggacccgaataggcccagacagaactccgacaccgccccctacggtgcggcacgagagggctaaggggcgggggcatgtgcaccggaagctgcctctgcccacaaccaagatggctgaggagagggcggaagtgtccgcacgtcgggcctccgaggcttctctttctcccctggcggtccggctctcgatggtggcgtgacgggggcgggggtggcggcgcgttctcctcggttgggagggaaccagcccgcgaacccaggccgggaggggggttcggcctgggggggaagggactgacatgtctctcgaagaccccttttttgtagtccgagggtgagtgacaacgacgggggagggcggagggtgctctgtacccaagccagccagtgcccgggtgccggccccagcgtgcccggcgggctgggcaaggccgtcggggtgcagagtgggaggcgcacgcaggggtatataggggtctccggagtcccccatgcgtttgggtttgcagtcgggggcagaggcaggcgggaggaccgcctgcccccagccgcgcccgccgtgcccctgcccgcagcgaggtgcagaaggcggtgaacacggcccgcgggctgtaccagcgctggtgcgagctcctgcaggaaagcgcggcggtcggacgcgaggagctggactggacgaccaatgagctgcggaatggcctgcgcagcatcgagtgggacctcgaggacctggaagagaccatcggtatagtggaagccaacccaggcaagttcaagctcccagccggggacctgcaggagagaaaggtgttcgtggagcggatgcgagaggcagtccaggaaatgaaggaccatatggtcagcccaacagccgtagcatttttggagaggaataacagagagatactcgcaggcaagccagctgcccagaagtcacccagctgatcatggatgaacaggatcaacagctggagatggtgtctgggagcatccaggttctgaagcacatgtccggccgcgttggagaagagctggacgagcagggcatcatgctggatgccttcgcccaagagatggaccacacccagtcccgcatggacggggtcctcaggaagttggccaaagtatcccacatgacgagtgaccgccgacagtggtgtgccatcgccgtgctagtgggggtgcttctcctcgttctcatcttactattctctctctgaccccagccctccctggcaggctggtcccttaagcctggggagccaccaagcactttggagctggcctcgccccctaggaggagagggtccctcctgggtagctggagagtagagggtcccgcctggggagctgtccccatggctctcccctagagccagtgggacccttcaggaccctgggctggaaccaccaccactggtcctgtctcaagtgcacttagggggtggtggaggcagggacacctgagacacacctgtctccatttccagttccaggaccccaaagccatttgcccctgtgccttatacacgtgccaacctggaaataaaatgtcagccttttttata

SEQ ID NO: 368609 - DNA, 1446 bp, Homo sapiens
gaccccctcacgaccacctcgccccaaggcgacctcgaagtgcccccaactccgccacttctcaggaaagagattgggagaatgcggcagaactccccggaggagcaggcccgctcctcaccgcgcccccgcagggagaagggaggaccacctctcccccagaccctagccaaacctgacactcgggaccctgggatgggacgatctcccaggtgccagctcagggagtccatgaaaagcttcaacgaatcgaatgagccccttccccagccataatacccagccgccagagatgagggaggctatcattatttacattgcccgtgcctggaagggaaactgaagttgcgcaggaacaatccgaggaactgggccttgaaccgaaattccgaactcggacccgaataggcccagacagaactccgacaccgccccctacggtgcggcacgagagggctaaggggcgggggcatgtgcaccggaagctgcctctgcccacaaccaagatggctgaggagagggcggaagtgtccgcacgtcgggcctccgaggcttctctttctcccctggcggtccggctctcgatggtggcgtgacgggggcgggggtggcggcgcgttctcctcggttgggagggaaccagcccgcgaacccaggccgggaggggggttcggcctgggggggaagggactgacatgtctctcgaagaccccttttttgtagtccgaggcgaggtgcagaaggcggtgaacacggcccgcgggctgtaccagcgctggtgcgagctcctgcaggaaagcgcggcggtcggacgcgaggagctggactggacgaccaatgagctgcggaatggcctgcgcagcatcgagtgggacctcgaggacctggaagagaccatcggtatagtggaagccaacccaggcaagttcaagctcccagccggggacctgcaggagagaaaggtgttcgtggagcggatgcgagaggcagtccaggaaatgaaggaccatatggtcagcccaacagccgtagcatttttggagaggaataacagagagatactcgcaggcaagccagctgcccagaagtcacccagcgacctgctggatgccagcgcagtctcggccacatctcgctacatcgaggagcagcaggccacacagcagctgatcatggatgaacaggatcaacagctggagatggtgtctgggagcatccaggttctgaagcacatgtccggccgcgttggagaagagctggacgagcagggcatcatgctggatgccttcgcccaagagatggaccacacccagtcccgcatggacggggtcctcaggaagttggccaaagtatcccacatgacgagtgttccaggaccccaaagccatttgcccctgtgccttatacacgtgccaacctggaaataaaatgtcagccttttttata

SEQ ID NO: 368610 - DNA, 1540 bp, Homo sapiens
gaccccctcacgaccacctcgccccaaggcgacctcgaagtgcccccaactccgccacttctcaggaaagagattgggagaatgcggcagaactccccggaggagcaggcccgctcctcaccgcgcccccgcagggagaagggaggaccacctctcccccagaccctagccaaacctgacactcgggaccctgggatgggacgatctcccaggtgccagctcagggagtccatgaaaagcttcaacgaatcgaatgagccccttccccagccataatacccagccgccagagatgagggaggctatcattatttacattgcccgtgcctggaagggaaactgaagttgcgcaggaacaatccgaggaactgggccttgaaccgaaattccgaactcggacccgaataggcccagacagaactccgacaccgccccctacggtgcggcacgagagggctaaggggcgggggcatgtgcaccggaagctgcctctgcccacaaccaagatggctgaggagagggcggaagtgtccgcacgtcgggcctccgaggcttctctttctcccctggcggtccggctctcgatggtggcgtgacgggggcgggggtggcggcgcgttctcctcggttgggagggaaccagcccgcgaacccaggccgggaggggggttcggcctgggggggaagggactgacatgtctctcgaagaccccttttttgtagtccgagggtgagtgacaacgacgggggagggcggagggtgctctgtacccaagccagccagtgcccgggtgccggccccagcgtgcccggcgggctgggcaaggccgtcggggtgcagagtgggaggcgcacgcaggggtatataggggtctccggagtcccccatgcgtttgggtttgcagtcgggggcagaggcaggcgggaggaccgcctgcccccagccgcgcccgccgtgcccctgcccgcagcgaggtgcagaaggcggtgaacacggcccgcgggctgtaccagcgctggtgcgagctcctgcaggaaagcgcggcggtcggacgcgaggagctggactggacgaccaatgagctgcggaatggcctgcgcagcatcgagtgggacctcgaggacctggaagagaccatcggtatagtggaagccaacccaggcaagttcaagctcccagccggggacctgcaggagagaaaggtgttcgtggagcggatgcgagaggcagtccaggaaatgaaggaccatatggtcagcccaacagccgtagcatttttggagaggaataacagagagagtagagggtcccgcctggggagctgtccccatggctctcccctagagccagtgggacccttcaggaccctgggctggaaccaccaccactggtcctgtctcaagtgcacttagggggtggtggaggcagggacacctgagacacacctgtctccatttccagttccaggaccccaaagccatttgcccctgtgccttatacacgtgccaacctggaaataaaatgtcagccttttttata

SEQ ID NO: 368611 - DNA, 432 bp, Homo sapiens
ctaaatatacaaatcctccgaaatatataaaaatgagacctactgggcagctaaaacagtacaaccctacaaagaacaagacatgattttggccataaaacctactagaaaacccaaggattttgtataatgtgaactaagcatacaaatatagaaagagatttttatttcttgccaccacatttcttattgagaagaaaataatcggtattggcaaaatggtccatgaagactcctatgaaagcacagaaagtgctagatgatgatgaaattagaataaagtgggacttggaaatgttttaaaaaggggaacacattaaccgaattatttggaatgctagaatggaagtgtcctacaaataattcaaaggtcattacatctgtctttagaatgtaccaatcctttttgcaataaaattaacaattaattcc

SEQ ID NO: 368612 - DNA, 487 bp, Homo sapiens
gaggaccagggcatgtgcagggatgaccaccttctccctgggacctgaacagggcagagaaatgggaagctcgggtgcaaagggagtggggaagatgggtccgggcttacagtactgaacccaggaatgacaataactgtgtgtgttgctgcagtgacaaaatatctgaacagaagaggacttaggagagatctgaactccagctgccctacaaactccatctcagcttttcttctcacttcatgtgaaaactactccagtggctgactgaattgctgacccttcaagctctgtccttatccattacctcaaagcagtcattccttagtaaagtttccaacaaatagaaattaatgacactttggtagcactaatatggagattatcctttcattgagccttttatcctctgttctcctttgaagaacccctcactgtcaccttcccgagaataccctaagaccaataaatacttcagtatttcaga

SEQ ID NO: 368613 - DNA, 299 bp, Homo sapiens
gcggccgcctactactactactgctcgaattcaagcttctaacgatgtacggggatgtgaaaactactccagtggctgactgaattgctgacccttcaagctctgtccttatccattacctcaaagcagtcattccttagtaaagtttccaacaaatagaaattaatgacactttggtagcactaatatggagattatcctttcattgagccttttatcctctgttctcctttgaagaacccctcactgtcaccttcccgagaataccctaagaccaataaatacttcagtatttcaga

SEQ ID NO: 368614 - DNA, 354 bp, Homo sapiens
ggcgctgcagggtcatgggcccgcccagctcgtagttgtgtctgcacatcctgtccggcactgcccgcttctcctccaggatgtccttctggctgttccagtactccgcatcaggccgccccagctccgtcaccgcccggaactcccccacgtcgctgtcgaagcgcacgaactcctcccggttgtagatgtatctctccaggaagcgctgtgtcccattaaacgcgtagcattcctgccgtccctggaaaaggtactggagtggccctgccctggaccacagatgtgagcagcaccatcagtaacgccgtcagagccactgtccggggggccgcagaaacctgcgaaccatca

SEQ ID NO: 368615 - DNA, 1525 bp, Homo sapiens
ggcgctgcagggtcatgggcccgcccagctcgtagttgtgtctgcacatcctgtccggcactgcccgcttctcctccaggatgtccttctggctgttccagtactccgcatcaggccgccccagctccgtcaccgcccggaactcccccacgtcgctgtcgaagcgcacgaactcctcccggttgtagatgtatctctccaggaagcgctgtgtcccattaaacgcgtagcattcctgccgtccctggaaaaggtagtgaatcccagccatgctgattcctctccacccatttccagtgctagaggcccacagtttcagtctcatctgcctccactcggcctcagttcctcatcactgttcctgtgctcacagtcatcaattatagaccccacaacatgcgccctgaagacagaatgttccatatcagagctgtgatcttgagagccctctccttggctttcctgctgagtctccgaggagctggggccatcaaggcggaccatgtgtcaacttatgccgcgtttgtacagacgcatagaccaacaggggagtttatgtttgaatttgatgaagatgagatgttctatgtggatctggacaagaaggagaccgtctggcatctggaggagtttggccaagccttttcctttgaggctcagggcgggctggctaacattgctatattgaacaacaacttgaataccttgatccagcgttccaaccacactcaggccaccaacgatccccctgaggtgaccgtgtttcccaaggagcctgtggagctgggccagcccaacaccctcatctgccacattgacaagttcttcccaccagtgctcaacgtcacgtggctgtgcaacggggagctggtcactgagggtgtcgctgagagcctcttcctgcccagaacagattacagcttccacaagttccattacctgacctttgtgccctcagcagaggacttctatgactgcagggtggagcactggggcttggaccagccgctcctcaagcactgggaggcccaagagccaatccagatgcctgagacaacggagactgtgctctgtgccctgggcctggtgctgggcctagtcggcatcatcgtgggcaccgtcctcatcataaagtctctgcgttctggccatgacccccgggcccaggggaccctgtgaaatactgtaaaggtgacaaaatatctgaacagaagaggacttaggagagatctgaactccagctgccctacaaactccatctcagcttttcttctcacttcatgtgaaaactactccagtggctgactgaattgctgacccttcaagctctgtccttatccattacctcaaagcagtcattccttagtaaagtttccaacaaatagaaattaatgacactttggtagcactaatatggagattatcctttcattgagccttttatcctctgttctcctttgaagaacccctcactgtcaccttcccgagaataccctaagaccaataaatacttcagtatttcaga

SEQ ID NO: 368616 - DNA, 1258 bp, Homo sapiens
ctctctctctctctctctctctctctctctctctctcctcgtgccgaattcggcacgagtgcctccactcggcctcagttcctcatcactgttcctgtgctcacagtcatcaattatagaccccacaacatgcgccctgaagacagaatgttccatatcagagctgtgatcttgagagccctctccttggctttcctgctgagtctccgaggagctggggccatcaaggcggaccatgtgtcaacttatgccgcgtttgtacagacgcatagaccaacaggggagtttatgtttgaatttgatgaagatgagatgttctatgtggatctggacaagaaggagaccgtctggcatctggaggagtttggccaagccttttcctttgaggctcagggcgggctggctaacattgctatattgaacaacaacttgaataccttgatccagcgttccaaccacactcaggccaccaacgatccccctgaggtgaccgtgtttcccaaggagcctgtggagctgggccagcccaacaccctcatctgccacattgacaagttcttcccaccagtgctcaacgtcacgtggctgtgcaacggggagctggtcactgagggtgtcgctgagagcctcttcctgcccagaacagattacagcttccacaagttccattacctgacctttgtgccctcagcagaggacttctatgactgcagggtggagcactggggcttggaccagccgctcctcaagcactgggaggcccaagagccaatccagatgcctgagacaacggagactgtgctctgtgccctgggcctggtgctgggcctagtcggcatcatcgtgggcaccgtcctcatcataaagtctctgcgttctggccatgacccccgggcccaggggaccctgtgaaatactgtaaaggtgacaaaatatctgaacagaagaggacttaggagagatctgaactccagctgccctacaaactccatctcagcttttcttctcacttcatgtgaaaactactccagtggctgactgaattgctgacccttcaagctctgtccttatccattacctcaaagcagtcattccttagtaaagtttccaacaaatagaaattaatgacactttggtagcactaatatggagattatcctttcattgagccttttatcctctgttctcctttgaagaacccctcactgtcaccttcccgagaataccctaagaccaataaatacttcagtatttcaga

SEQ ID NO: 368617 - DNA, 1944 bp, Homo sapiens
ggcgctgcagggtcatgggcccgcccagctcgtagttgtgtctgcacatcctgtccggcactgcccgcttctcctccaggatgtccttctggctgttccagtactccgcatcaggccgccccagctccgtcaccgcccggaactcccccacgtcgctgtcgaagcgcacgaactcctcccggttgtagatgtatctctccaggaagcgctgtgtcccattaaacgcgtagcattcctgccgtccctggaaaaggtacaccttccagcgtcctctttacccagcaacagagaatgtcagctctatgatttctctgataggtgaatcccagccatgctgattcctctccacccatttccagtgctagaggcccacagtttcagtctcatctgcctccactcggcctcagttcctcatcactgttcctgtgctcacagtcatcaattatagaccccacaacatgcgccctgaagacagaatgttccatatcagagctgtgatcttgagagccctctccttggctttcctgctgagtctccgaggagctggggccatcaaggcggaccatgtgtcaacttatgccgcgtttgtacagacgcatagaccaacaggggagtttatgtttgaatttgatgaagatgagatgttctatgtggatctggacaagaaggagaccgtctggcatctggaggagtttggccaagccttttcctttgaggctcagggcgggctggctaacattgctatattgaacaacaacttgaataccttgatccagcgttccaaccacactcaggccaccaacgatccccctgaggtgaccgtgtttcccaaggagcctgtggagctgggccagcccaacaccctcatctgccacattgacaagttcttcccaccagtgctcaacgtcacgtggctgtgcaacggggagctggtcactgagggtgtcgctgagagcctcttcctgcccagaacagattacagcttccacaagttccattacctgacctttgtgccctcagcagaggacttctatgactgcagggtggagcactggggcttggaccagccgctcctcaagcactgggaggcccaagagccaatccagatgcctgagacaacggagactgtgctctgtgccctgggcctggtgctgggcctagtcggcatcatcgtgggcaccgtcctcatcataaagtctctgcgttctggccatgacccccgggcccaggggaccctgtgaaatactgtaaaggtgacaaaatatctgaacagaagaggacttaggagagatctgaactccagctgccctacaaactccatctcagcttttcttctcacttcatgtgaaaactactccagtggctgactgaattgctgacccttcaagctctgtccttatccattacctcaaagcagtcattccttagtaaagtttccaacaaatagaaattaatgacactttggtagcactaatatggagattatcctttcattgagccttttatcctctgttctcctttgaagaacccctcactgtcaccttcccgagaataccctaagaccaataaatacttcagtatttcagaaaaaaaaaaaaaaaaaaaaaaaaaaaacctgtgtgggccgcgacttgggcccttaaaaaaagtttctaaaacgcactccttttgggcgcgccggggccccatagagggtaaaggtagaccactggcgacaaacaggggtcccaaagggaaaacccgtggggacaaagtgacaataggcagcgtggggtttcttcaccccgatgatacaaaaagggccccgggggggagcaacacagaggtcgtgttgtgagaccaaaatcccaagaaggggacactcagggaagggcccaaaacggggcgactatatcataagagggaggcgtcccaagcgaaagccccagaattcaaatatcgccg

SEQ ID NO: 368618 - DNA, 1609 bp, Homo sapiens
ggcgctgcagggtcatgggcccgcccagctcgtagttgtgtctgcacatcctgtccggcactgcccgcttctcctccaggatgtccttctggctgttccagtactccgcatcaggccgccccagctccgtcaccgcccggaactcccccacgtcgctgtcgaagcgcacgaactcctcccggttgtagatgtatctctccaggaagcgctgtgtcccattaaacgcgtagcattcctgccgtccctggaaaaggtacaccttccagcgtcctctttacccagcaacagagaatgtcagctctatgatttctctgataggtgaatcccagccatgctgattcctctccacccatttccagtgctagaggcccacagtttcagtctcatctgcctccactcggcctcagttcctcatcactgttcctgtgctcacagtcatcaattatagaccccacaacatgcgccctgaagacagaatgttccatatcagagctgtgatcttgagagccctctccttggctttcctgctgagtctccgaggagctggggccatcaaggcggaccatgtgtcaacttatgccgcgtttgtacagacgcatagaccaacaggggagtttatgtttgaatttgatgaagatgagatgttctatgtggatctggacaagaaggagaccgtctggcatctggaggagtttggccaagccttttcctttgaggctcagggcgggctggctaacattgctatattgaacaacaacttgaataccttgatccagcgttccaaccacactcaggccaccaacgatccccctgaggtgaccgtgtttcccaaggagcctgtggagctgggccagcccaacaccctcatctgccacattgacaagttcttcccaccagtgctcaacgtcacgtggctgtgcaacggggagctggtcactgagggtgtcgctgagagcctcttcctgcccagaacagattacagcttccacaagttccattacctgacctttgtgccctcagcagaggacttctatgactgcagggtggagcactggggcttggaccagccgctcctcaagcactgggaggcccaagagccaatccagatgcctgagacaacggagactgtgctctgtgccctgggcctggtgctgggcctagtcggcatcatcgtgggcaccgtcctcatcataaagtctctgcgttctggccatgacccccgggcccaggggaccctgtgaaatactgtaaaggtgacaaaatatctgaacagaagaggacttaggagagatctgaactccagctgccctacaaactccatctcagcttttcttctcacttcatgtgaaaactactccagtggctgactgaattgctgacccttcaagctctgtccttatccattacctcaaagcagtcattccttagtaaagtttccaacaaatagaaattaatgacactttggtagcactaatatggagattatcctttcattgagccttttatcctctgttctcctttgaagaacccctcactgtcaccttcccgagaataccctaagaccaataaatacttcagtatttcagacagagcggggaaaaaaaaaaca

SEQ ID NO: 368619 - DNA, 1529 bp, Homo sapiens
ggcgctgcagggtcatgggcccgcccagctcgtagttgtgtctgcacatcctgtccggcactgcccgcttctcctccaggatgtccttctggctgttccagtactccgcatcaggccgccccagctccgtcaccgcccggaactcccccacgtcgctgtcgaagcgcacgaactcctcccggttgtagatgtatctctccaggaagcgctgtgtcccattaaacgcgtagcattcctgccgtccctggaaaaggtacaccttccagcgtcctctttacccagcaacagagaatgtcagctctatgatttctctgataggtgaatcccagccatgctgattcctctccacccatttccagtgctagaggcccacagtttcagtctcatctgcctccactcggcctcagttcctcatcactgttcctgtgctcacagtcatcaattatagaccccacaacatgcgccctgaagacagaatgttccatatcagagctgtgatcttgagagccctctccttggctttcctgctgagtctccgaggagctggggccatcaaggcggaccatgtgtcaacttatgccgcgtttgtacagacgcatagaccaacaggggagtttatgtttgaatttgatgaagatgagatgttctatgtggatctggacaagaaggagaccgtctggcatctggaggagtttggccaagccttttcctttgaggctcagggcgggctggctaacattgctatattgaacaacaacttgaataccttgatccagcgttccaaccacactcaggccaccaacgatccccctgaggtgaccgtgtttcccaaggagcctgtggagctgggccagcccaacaccctcatctgccacattgacaagttcttcccaccagtgctcaacgtcacgtggctgtgcaacggggagctggtcactgagggtgtcgctgagagcctcttcctgcccagaacagattacagcttccacaagttccattacctgacctttgtgccctcagcagaggacttctatgactgcagggtggagcactggggcttggaccagccgctcctcaagcactgggaggcccaagagccaatccagatgcctgagacaacggagactgtgctctgtgccctgggcctggtgctgggcctagtcggcatcatcgtgggcaccgtcctcatcataaagtctctgcgttctggccatgacccccgggcccaggggaccctgtgaaatactgtaaaggtgacaaaatatctgaacagaagaggacttaggagagatctgaactccagctgccctacaaactccatctcagcttttcttctcacttcacattacctcaaagcagtcattccttagtaaagtttccaacaaatagaaattaatgacactttggtagcactaatatggagattatcctttcattgagccttttatcctctgttctcctttgaagaacccctcactgtcaccttcccgagaataccctaagaccaataaatacttcagtatttcaga

SEQ ID NO: 368620 - DNA, 1437 bp, Homo sapiens
ggcgctgcagggtcatgggcccgcccagctcgtagttgtgtctgcacatcctgtccggcactgcccgcttctcctccaggatgtccttctggctgttccagtactccgcatcaggccgccccagctccgtcaccgcccggaactcccccacgtcgctgtcgaagcgcacgaactcctcccggttgtagatgtatctctccaggaagcgctgtgtcccattaaacgcgtagcattcctgccgtccctggaaaaggtagtgaatcccagccatgctgattcctctccacccatttccagtgctagaggcccacagtttcagtctcatctgcctccactcggcctcagttcctcatcactgttcctgtgctcacagtcatcaattatagaccccacaacatgcgccctgaagacagaatgttccatatcagagctgtgatcttgagagccctctccttggctttcctgctgagtctccgaggagctggggccatcaaggcggaccatgtgtcaacttatgccgcgtttgtacagacgcatagaccaacaggggagtttatgtttgaatttgatgaagatgagatgttctatgtggatctggacaagaaggagaccgtctggcatctggaggagtttggccaagccttttcctttgagatccccctgaggtgaccgtgtttcccaaggagcctgtggagctgggccagcccaacaccctcatctgccacattgacaagttcttcccaccagtgctcaacgtcacgtggctgtgcaacggggagctggtcactgagggtgtcgctgagagcctcttcctgcccagaacagattacagcttccacaagttccattacctgacctttgtgccctcagcagaggacttctatgactgcagggtggagcactggggcttggaccagccgctcctcaagcactgggaggcccaagagccaatccagatgcctgagacaacggagactgtgctctgtgccctgggcctggtgctgggcctagtcggcatcatcgtgggcaccgtcctcatcataaagtctctgcgttctggccatgacccccgggcccaggggaccctgtgaaatactgtaaaggtgacaaaatatctgaacagaagaggacttaggagagatctgaactccagctgccctacaaactccatctcagcttttcttctcacttcatgtgaaaactactccagtggctgactgaattgctgacccttcaagctctgtccttatccattacctcaaagcagtcattccttagtaaagtttccaacaaatagaaattaatgacactttggtagcactaatatggagattatcctttcattgagccttttatcctctgttctcctttgaagaacccctcactgtcaccttcccgagaataccctaagaccaataaatacttcagtatttcaga

SEQ ID NO: 368621 - DNA, 1626 bp, Homo sapiens
ggcgctgcagggtcatgggcccgcccagctcgtagttgtgtctgcacatcctgtccggcactgcccgcttctcctccaggatgtccttctggctgttccagtactccgcatcaggccgccccagctccgtcaccgcccggaactcccccacgtcgctgtcgaagcgcacgaactcctcccggttgtagatgtatctctccaggaagcgctgtgtcccattaaacgcgtagcattcctgccgtccctggaaaaggtacaccttccagcgtcctctttacccagcaacagagaatgtcagctctatgatttctctgataggtgaatcccagccatgctgattcctctccacccatttccagtgctagaggcccacagtttcagtctcatctgcctccactcggcctcagttcctcatcactgttcctgtgctcacagtcatcaattatagaccccacaacatgcgccctgaagacagaatgttccatatcagagctgtgatcttgagagccctctccttggctttcctgctgagtctccgaggagctggggccatcaaggcggaccatgtgtcaacttatgccgcgtttgtacagacgcatagaccaacaggggagtttatgtttgaatttgatgaagatgagatgttctatgtggatctggacaagaaggagaccgtctggcatctggaggagtttggccaagccttttcctttgaggctcagggcgggctggctaacattgctatattgaacaacaacttgaataccttgatccagcgttccaaccacactcaggccaccaacgatccccctgaggtgaccgtgtttcccaaggagcctgtggagctgggccagcccaacaccctcatctgccacattgacaagttcttcccaccagtgctcaacgtcacgtggctgtgcaacggggagctggtcactgagggtgtcgctgagagcctcttcctgcccagaacagattacagcttccacaagttccattacctgacctttgtgccctcagcagaggacttctatgactgcagggtggagcactggggcttggaccagccgctcctcaagcactgggaggcccaagagccaatccagatgcctgagacaacggagactgtgctctgtgccctgggcctggtgctgggcctagtcggcatcatcgtgggcaccgtcctcatcataaagtctctgcgttctggccatgacccccgggcccaggggaccctgtgaaatactgtaaagggtgggaatgtaaagaggaggccctaggatttgtagaatgtgacaaaatatctgaacagaagaggacttaggagagatctgaactccagctgccctacaaactccatctcagcttttcttctcacttcatgtgaaaactactccagtggctgactgaattgctgacccttcaagctctgtccttatccattacctcaaagcagtcattccttagtaaagtttccaacaaatagaaattaatgacactttggtagcactaatatggagattatcctttcattgagccttttatcctctgttctcctttgaagaacccctcactgtcaccttcccgagaataccctaagaccaataaatacttcagtatttcaga

SEQ ID NO: 368622 - DNA, 1263 bp, Homo sapiens
ggcgctgcagggtcatgggcccgcccagctcgtagttgtgtctgcacatcctgtccggcactgcccgcttctcctccaggatgtccttctggctgttccagtactccgcatcaggccgccccagctccgtcaccgcccggaactcccccacgtcgctgtcgaagcgcacgaactcctcccggttgtagatgtatctctccaggaagcgctgtgtcccattaaacgcgtagcattcctgccgtccctggaaaaggtatcatcaattatagaccccacaacatgcgccctgaagacagaatgttccatatcagagctgtgatcttgagagccctctccttggctttcctgctgagtctccgaggagctggggccatcaaggcggaccatgtgtcaacttatgccgcgtttgtacagacgcatagaccaacaggggagtttatgtttgaatttgatgaagatgagatgttctatgtggatctggacaagaaggagaccgtctggcatctggaggagtttggccaagccttttcctttgaggctcagggcgggctggctaacattgctatattgaacaacaacttgaataccttgatccagcgttccaaccacactcaggccaccaacgtgagagcctcttcctgcccagaacagattacagcttccacaagttccattacctgacctttgtgccctcagcagaggacttctatgactgcagggtggagcactggggcttggaccagccgctcctcaagcactgggaggcccaagagccaatccagatgcctgagacaacggagactgtgctctgtgccctgggcctggtgctgggcctagtcggcatcatcgtgggcaccgtcctcatcataaagtctctgcgttctggccatgacccccgggcccaggggaccctgtgaaatactgtaaaggtgacaaaatatctgaacagaagaggacttaggagagatctgaactccagctgccctacaaactccatctcagcttttcttctcacttcatgtgaaaactactccagtggctgactgaattgctgacccttcaagctctgtccttatccattacctcaaagcagtcattccttagtaaagtttccaacaaatagaaattaatgacactttggtagcactaatatggagattatcctttcattgagccttttatcctctgttctcctttgaagaacccctcactgtcaccttcccgagaataccctaagaccaataaatacttcagtatttcaga

SEQ ID NO: 368623 - DNA, 509 bp, Homo sapiens
  misc_feature (31)..(32): n is a, c, g, or t
gaaatactgaagtatttattggtcttagggnnttctcgggaaggagactgtgctctgtgccctgggcctggtgctgggcctagtcggcatcatcgtgggcaccgtcctcatcataaagtctctgcgttctggccatgacccccgggcccaggggaccctgtgaaatactgtaaaggtgacaaaatatctgaacagaagaggacttaggagagatctgaactccagctgccctacaaactccatctcagcttttcttctcacttcatgtgaaaactactccagtggctgactgaattgctgacccttcaagctctgtccttatccattacctcaaagcagtcattccttagtaaagtttccaacaaatagaaattaatgacactttggtagcactaatatggagattatcctttcattgagccttttatcctctgttctcctttgaagaacccctcactgtcaccttcccgagaataccctaagaccaataaatacttcagtatttcaga

SEQ ID NO: 368624 - DNA, 1532 bp, Homo sapiens
ggcgctgcagggtcatgggcccgcccagctcgtagttgtgtctgcacatcctgtccggcactgcccgcttctcctccaggatgtccttctggctgttccagtactccgcatcaggccgccccagctccgtcaccgcccggaactcccccacgtcgctgtcgaagcgcacgaactcctcccggttgtagatgtatctctccaggaagcgctgtgtcccattaaacgcgtagcattcctgccgtccctggaaaaggtacaccttccagcgtcctctttacccagcaacagagaatgtcagctctatgatttctctgataggtgaatcccagccatgctgattcctctccacccatttccagtgctagaggcccacagtttcagtctcatctgcctccactcggcctcagttcctcatcactgttcctgtgctcacagtcatcaattatagaccccacaacatgcgccctgaagacagaatgttccatatcagagctgtgatcttgagagccctctccttggctttcctgctgagtctccgaggagctggggccatcaaggcggaccatgtgtcaacttatgccgcgtttgtacagacgcatagaccaacaggggagtttatgtttgaatttgatgaagatgagatgttctatgtggatctggacaagaaggagaccgtctggcatctggaggagtttggccaagccttttcctttgaggctcagggcgggctggctaacattgctatattgaacaacaacttgaataccttgatccagcgttccaaccacactcaggccaccaacgatccccctgaggtgaccgtgtttcccaaggagcctgtggagctgggccagcccaacaccctcatctgccacattgacaagttcttcccaccagtgctcaacgtcacgtggctgtgcaacggggagctggtcactgagggtgtcgctgagagcctcttcctgcccagaacagattacagcttccacaagttccattacctgacctttgtgccctcagcagaggacttctatgactgcagggtggagcactggtgctgggcctagtcggcatcatcgtgggcaccgtcctcatcataaagtctctgcgttctggccatgacccccgggcccaggggaccctgtgaaatactgtaaagggtgggaatgtaaagaggaggccctaggatttgtagaatgtgacaaaatatctgaacagaagaggacttaggagagatctgaactccagctgccctacaaactccatctcagcttttcttctcacttcatgtgaaaactactccagtggctgactgaattgctgacccttcaagctctgtccttatccattacctcaaagcagtcattccttagtaaagtttccaacaaatagaaattaatgacactttggtagcactaatatggagattatcctttcattgagccttttatcctctgttctcctttgaagaacccctcactgtcaccttcccgagaataccctaagaccaataaatacttcagtatttcaga

SEQ ID NO: 368625 - DNA, 1183 bp, Homo sapiens
ggcgctgcagggtcatgggcccgcccagctcgtagttgtgtctgcacatcctgtccggcactgcccgcttctcctccaggatgtccttctggctgttccagtactccgcatcaggccgccccagctccgtcaccgcccggaactcccccacgtcgctgtcgaagcgcacgaactcctcccggttgtagatgtatctctccaggaagcgctgtgtcccattaaacgcgtagcattcctgccgtccctggaaaaggtagtgaatcccagccatgctgattcctctccacccatttccagtgctagaggcccacagtttcagtctcatctgcctccactcggcctcagttcctcatcactgttcctgtgctcacagtcatcaattatagaccccacaacatgcgccctgaagacagaatgttccatatcagagctgtgatcttgagagccctctccttggctttcctgctgagtctccgaggagctggggccatcaaggcggaccatgtgtcaacttatgccgcgtttgtacagacgcatagaccaacaggggagtttatgtttgaatttgatgaagatgagatgttctatgtggatctggacaagaaggagaccgtctggcatctggaggagtttggccaagccttttcctttgaggctcagggcgggctggctaacattgctatattgaacaacaacttgaataccttgatccagcgttccaaccacactcaggccaccaacgatccccctgaggtgaccgtgtttcccaaggagcctgtggagctgggccagcccaacaccctcatctgccacattgacaagttcttcccaccagtgctcaacgtcacgtggctgtgcaacggggagctggtcactgagggtgtcgctgagagcctcttcctgcccagaacagattacagcttccacaagttccattactgtgaaaactactccagtggctgactgaattgctgacccttcaagctctgtccttatccattacctcaaagcagtcattccttagtaaagtttccaacaaatagaaattaatgacactttggtagcactaatatggagattatcctttcattgagccttttatcctctgttctcctttgaagaacccctcactgtcaccttcccgagaataccctaagaccaataaatacttcagtatttcaga

SEQ ID NO: 368626 - DNA, 838 bp, Homo sapiens
ggcgctgcagggtcatgggcccgcccagctcgtagttgtgtctgcacatcctgtccggcactgcccgcttctcctccaggatgtccttctggctgttccagtactccgcatcaggccgccccagctccgtcaccgcccggaactcccccacgtcgctgtcgaagcgcacgaactcctcccggttgtagatgtatctctccaggaagcgctgtgtcccattaaacgcgtagcattcctgccgtccctggaaaaggtagtgaatcccagccatgctgattcctctccacccatttccagtgctagaggcccacagtttcagtctcatctgcctccactcggcctcagttcctcatcactgttcctgtgctcacagtcatcaattatagaccccacaacatgcgccctgaagacagaatgttccatatcagagctgtgatcttgagagccctctccttggctttcctgctgagtctccgaggagctggggccatcaaggcggaccatgtgtcaacttatgccgcgtttgtacagacgcatagaccaacaggggagtttatgtttgaatttgatgaagatgagatgttctatgtggattgtgaaaactactccagtggctgactgaattgctgacccttcaagctctgtccttatccattacctcaaagcagtcattccttagtaaagtttccaacaaatagaaattaatgacactttggtagcactaatatggagattatcctttcattgagccttttatcctctgttctcctttgaagaacccctcactgtcaccttcccgagaataccctaagaccaataaatacttcagtatttcaga

SEQ ID NO: 368627 - DNA, 257 bp, Homo sapiens
tccttcctttgacctcttaccttcttcctttttatattcataagtctttattcattctctagctttgaccacttgcatattcaaactgacattttgtcgtgtttttctctactgtctttatgcagcggaccatgtgtcaacttatgccgcgtttgtacagacgcatagaccaacaggggagtttatgtttgaatttgatgaagatgagatgttctatgtggatctggacaagaaggagaccgtctggcatctggagg

SEQ ID NO: 368628 - DNA, 428 bp, Homo sapiens
atcctgtccggcactgcccgcttctcctccaggatgtccttctggctgttccagtactccgcatcaggccgccccagctccgtcaccgcccggaactcccccacgtcgctgtcgaagcgcacgaactcctcccggttgtagatgtatctctccaggaagcgctgtgtcccattaaacgcgtagcattcctgccgtccctggaaaaggtaattctctgcggggagggggcggacatgagcggaggcgccactctcatctaatcctctttctccctctctctctcaatattaacgattcttcccaaatcttcccacccagggctggattttaaaataggagttttcctagtaccgagttctgtggtcctaagcgggtcgcagagcctctccaggcctgttttctcaccacgcagagagagaatttactga

SEQ ID NO: 368629 - DNA, 1587 bp, Homo sapiens
ggcgctgcagggtcatgggcccgcccagctcgtagttgtgtctgcacatcctgtccggcactgcccgcttctcctccaggatgtccttctggctgttccagtactccgcatcaggccgccccagctccgtcaccgcccggaactcccccacgtcgctgtcgaagcgcacgaactcctcccggttgtagatgtatctctccaggaagcgctgtgtcccattaaacgcgtagcattcctgccgtccctggaaaaggtacaccttccagcgtcctctttacccagcaacagagaatgtcagctctatgatttctctgataggtgaatcccagccatgctgattcctctccacccatttccagtgctagaggcccacagtttcagtctcatctgcctccactcggcctcagttcctcatcactgttcctgtgctcacagtcatcaattatagaccccacaacatgcgccctgaagacagaatgttccatatcagagctgtgatcttgagagccctctccttggctttcctgctgagtctccgaggagctggggccatcaaggcggaccatgtgtcaacttatgccgcgtttgtacagacgcatagaccaacaggggagtttatgtttgaatttgatgaagatgagatgttctatgtggatctggacaagaaggagaccgtctggcatctggaggagtttggccaagccttttcctttgaggctcagggcgggctggctaacattgctatattgaacaacaacttgaataccttgatccagcgttccaaccacactcaggccaccaacgatccccctgaggtgaccgtgtttcccaaggagcctgtggagctgggccagcccaacaccctcatctgccacattgacaagttcttcccaccagtgctcaacgtcacgtggctgtgcaacggggagctggtcactgagggtgtcgctgagagcctcttcctgcccagaacagattacagcttccacaagttccattacctgacctttgtgccctcagcagaggacttctatgactgcagggtggagcactggggcttggaccagccgctcctcaagcactgggaggcccaagagccaatccagatgcctgagacaacggagactgtgctctgtgccctgggcctggtgctgggcctagtcggcatcatcgtgggcaccgtcctcatcataaagtctctgcgttctggccatgacccccgggcccaggggaccctgtgaaatactgtaaaggtgacaaaatatctgaacagaagaggacttaggagagatctgaactccagctgccctacaaactccatctcagcttttcttctcacttcatgtgaaaactactccagtggctgactgaattgctgacccttcaagctctgtccttatccattacctcaaagcagtcattccttagtaaagtttccaacaaatagaaattaatgacactttggtagcactaatatggagattatcctttcattgagccttttatcctctgttctcctttgaagaacccctcactgtcaccttcccgagaataccctaagaccaataaatacttcagtatttcaga

SEQ ID NO: 368630 - DNA, 1293 bp, Homo sapiens
tgaacattcgtgtccgccttgatggccccagctcctcggagactcagcaggaaagccaaggagagggctctcaagatcacagctctgatatgagtgcctccactcggcctcagttcctcatcactgttcctgtgctcacagtcatcaattatagaccccacaacatgcgccctgaagacagaatgttccatatcagagctgtgatcttgagagccctctccttggctttcctgctgagtctccgaggagctggggccatcaaggcggaccatgtgtcaacttatgccgcgtttgtacagacgcatagaccaacaggggagtttatgtttgaatttgatgaagatgagatgttctatgtggatctggacaagaaggagaccgtctggcatctggaggagtttggccaagccttttcctttgaggctcagggcgggctggctaacattgctatattgaacaacaacttgaataccttgatccagcgttccaaccacactcaggccaccaacgatccccctgaggtgaccgtgtttcccaaggagcctgtggagctgggccagcccaacaccctcatctgccacattgacaagttcttcccaccagtgctcaacgtcacgtggctgtgcaacggggagctggtcactgagggtgtcgctgagagcctcttcctgcccagaacagattacagcttccacaagttccattacctgacctttgtgccctcagcagaggacttctatgactgcagggtggagcactggggcttggaccagccgctcctcaagcactgggaggcccaagagccaatccagatgcctgagacaacggagactgtgctctgtgccctgggcctggtgctgggcctagtcggcatcatcgtgggcaccgtcctcatcataaagtctctgcgttctggccatgacccccgggcccaggggaccctgtgaaatactgtaaaggtgacaaaatatctgaacagaagaggacttaggagagatctgaactccagctgccctacaaactccatctcagcttttcttctcacttcatgtgaaaactactccagtggctgactgaattgctgacccttcaagctctgtccttatccattacctcaaagcagtcattccttagtaaagtttccaacaaatagaaattaatgacactttggtagcactaatatggagattatcctttcattgagccttttatcctctgttctcctttgaagaacccctcactgtcaccttcccgagaataccctaagaccaataaatacttcagtatttcaga

SEQ ID NO: 368631 - DNA, 1887 bp, Homo sapiens
ggcgctgcagggtcatgggcccgcccagctcgtagttgtgtctgcacatcctgtccggcactgcccgcttctcctccaggatgtccttctggctgttccagtactccgcatcaggccgccccagctccgtcaccgcccggaactcccccacgtcgctgtcgaagcgcacgaactcctcccggttgtagatgtatctctccaggaagcgctgtgtcccattaaacgcgtagcattcctgccgtccctggaaaaggtacaccttccagcgtcctctttacccagcaacagagaatgtcagctctatgatttctctgataggtgaatcccagccatgctgattcctctccacccatttccagtgctagaggcccacagtttcagtctcatctgcctccactcggcctcagttcctcatcactgttcctgtgctcacagtcatcaattatagaccccacaacatgcgccctgaagacagaatgttccatatcagagctgtgatcttgagagccctctccttggctttcctgctgagtctccgaggagctggggccatcaaggcggaccatgtgtcaacttatgccgcgtttgtacagacgcatagaccaacaggggagtttatgtttgaatttgatgaagatgagatgttctatgtggatctggacaagaaggagaccgtctggcatctggaggagtttggccaagccttttcctttgaggctcagggcgggctggctaacattgctatattgaacaacaacttgaataccttgatccagcgttccaaccacactcaggccaccaacgatccccctgaggtgaccgtgtttcccaaggagcctgtggagctgggccagcccaacaccctcatctgccacattgacaagttcttcccaccagtgctcaacgtcacgtggctgtgcaacggggagctggtcactgagggtgtcgctgagagcctcttcctgcccagaacagattacagcttccacaagttccattacctgacctttgtgccctcagcagaggacttctatgactgcagggtggagcactggggcttggaccagccgctcctcaagcactgggaggcccaagagccaatccagatgcctgagacaacggagactgtgctctgtgccctgggcctggtgctgggcctagtcggcatcatcgtgggcaccgtcctcatcataaagtctctgcgttctggccatgacccccgggcccaggggaccctgtgaaatactgtaaaggtgacaaaatatctgaacagaagaggacttaggagagatctgaactccagctgccctacaaactccatctcagcttttcttctcacttcatgtgaaaactactccagtggctgactgaattgctgacccttcaagctctgtccttatccattacctcaaagcagtcattccttagtaaagtttccaacaaatagaaattaatgacactttggtagcactaatatggagattatcctttcattgagccttttatcctctgttctcctttgaagaacccctcactgtcaccttcccgagaataccctaagaccaataaatacttcagtatttcagaaaaaaaaaaaaaaaaaaaaaaaaaaaaattttgggggggccgggccccgaaaagtttttaaaacctttggtgggggggggggccccataagtgtaaggtggaccattggcgccaaacgtggttactcaaggaaaacccggcgtcctcaaaataacgtgcggtcggattctccccccatttaaaaaaagccccggggggacaccggagtctttcggaaccaatcccagtaggaggtcccaaaggcacctgacggggattcataaaccagggggtccaagcaaattccaatatcaatcaggc

SEQ ID NO: 368632 - DNA, 1496 bp, Homo sapiens
ggcgctgcagggtcatgggcccgcccagctcgtagttgtgtctgcacatcctgtccggcactgcccgcttctcctccaggatgtccttctggctgttccagtactccgcatcaggccgccccagctccgtcaccgcccggaactcccccacgtcgctgtcgaagcgcacgaactcctcccggttgtagatgtatctctccaggaagcgctgtgtcccattaaacgcgtagcattcctgccgtccctggaaaaggtacaccttccagcgtcctctttacccagcaacagagaatgtcagctctatgatttctctgataggtgaatcccagccatgctgattcctctccacccatttccagtgctagaggcccacagtttcagtctcatctgcctccactcggcctcagttcctcatcactgttcctgtgctcacagtcatcaattatagaccccacaacatgcgccctgaagacagaatgttccatatcagagctgtgatcttgagagccctctccttggctttcctgctgagtctccgaggagctggggccatcaaggcggaccatgtgtcaacttatgccgcgtttgtacagacgcatagaccaacaggggagtttatgtttgaatttgatgaagatgagatgttctatgtggatctggacaagaaggagaccgtctggcatctggaggagtttggccaagccttttcctttgaggctcagggcgggctggctaacattgctatattgaacaacaacttgaataccttgatccagcgttccaaccacactcaggccaccaacgatccccctgaggtgaccgtgtttcccaaggagcctgtggagctgggccagcccaacaccctcatctgccacattgacaagttcttcccaccagtgctcaacgtcacgtggctgtgcaacggggagctggtcactgagggtgtcgctgagagcctcttcctgcccagaacagattacagcttccacaagttccattacctgacctttgtgccctcagcagaggacttctatgactgcagggtggagcactggggcttggaccagccgctcctcaagcactgggaggcccaagagccaatccagatgcctgagacaacggagactgtgctctgtgccctgggcctggtgctgggcctagtcggcatcatcgtgggcaccgtcctcatcataaagtctctgcgttctggccatgacccccgggcccaggggaccctgtgaaatactgtaaaggtgacaaaatatctgaacagaagaggacttaggagagatctgaactccagctgccctacaaactccatctcagcttttcttctcacttcatgtgaaaactactccagtggctgactgaattgctgacccttcaagctctgtccttatccattacctcaaagcagtcattccttagtaaagtttccaacaaatagaaattaatgaataaatgttgacactttgatagcactgaaaaaaaaaaaa

SEQ ID NO: 368633 - DNA, 2238 bp, Homo sapiens
ggcgctgcagggtcatgggcccgcccagctcgtagttgtgtctgcacatcctgtccggcactgcccgcttctcctccaggatgtccttctggctgttccagtactccgcatcaggccgccccagctccgtcaccgcccggaactcccccacgtcgctgtcgaagcgcacgaactcctcccggttgtagatgtatctctccaggaagcgctgtgtcccattaaacgcgtagcattcctgccgtccctggaaaaggtacaccttccagcgtcctctttacccagcaacagagaatgtcagctctatgatttctctgataggtgaatcccagccatgctgattcctctccacccatttccagtgctagaggcccacagtttcagtctcatctgcctccactcggcctcagttcctcatcactgttcctgtgctcacagtcatcaattatagaccccacaacatgcgccctgaagacagaatgttccatatcagagctgtgatcttgagagccctctccttggctttcctgctgagtctccgaggagctggggccatcaaggcggaccatgtgtcaacttatgccgcgtttgtacagacgcatagaccaacaggggagtttatgtttgaatttgatgaagatgagatgttctatgtggatctggacaagaaggagaccgtctggcatctggaggagtttggccaagccttttcctttgaggctcagggcgggctggctaacattgctatattgaacaacaacttgaataccttgatccagcgttccaaccacactcaggccaccaacgatccccctgaggtgaccgtgtttcccaaggagcctgtggagctgggccagcccaacaccctcatctgccacattgacaagttcttcccaccagtgctcaacgtcacgtggctgtgcaacggggagctggtcactgagggtgtcgctgagagcctcttcctgcccagaacagattacagcttccacaagttccattacctgacctttgtgccctcagcagaggacttctatgactgcagggtggagcactggggcttggaccagccgctcctcaagcactgggaggcccaagagccaatccagatgcctgagacaacggagactgtgctctgtgccctgggcctggtgctgggcctagtcggcatcatcgtgggcaccgtcctcatcataaagtctctgcgttctggccatgacccccgggcccaggggaccctgtgaaatactgtaaagggtgggaatgtaaagaggaggccctaggatttgtagaatgtaaggaagggaggaaaaattcaatctgataagtgttcattgatcttctaatgggttaaaagcattcagccacataacaacaacaacaccgataactaactgagtagttaatatggtcaggcgctattctgaggatttacatttattaactcactttattctcacacatagtctttgaggtaggtactattattttcactatttcacatgagagatacttacatctttttacatacacagagactttaagcactttgatcaagttcccacagctatgaagtagtagggctagcttccaatccagaaagtctggatccaagactgtttatccactgtcctattcaccctattttgtgaaggaaaagaccaagttcaaattctccagagtccattgccaaataatggagtcagatctatatttctatacataattacaacacagtgtggtgggtgcctgtaactacttactgtctctacttggactcattccatggcaatgttcacacaaaaaatgcccctccagagatcttacaggtttctatttatcataacactcaccatgctttatatttttatatgttttgggaattctcttagcattagacagtgaacttccatgcagatgaccacatctaattcattattattattgttattcatgctggacctcaggtacaaaaggttaagaacttctcagttcattatatgatcatcattggtgcctccgagctctctctctctcccttgatttatttggtcccttttatctccagtccttactcccatatctaacctcttacccctacctcataggtaaacattttaatgaatttgatgtttccttttatttgcatagatcctctgtaatatgtagtagtgtccagtgtacatgtatttttaattaaccaaaatggcattaaattatagatctaaaaaaaacatccag

SEQ ID NO: 368634 - DNA, 1467 bp, Homo sapiens
ggcgctgcagggtcatgggcccgcccagctcgtagttgtgtctgcacatcctgtccggcactgcccgcttctcctccaggatgtccttctggctgttccagtactccgcatcaggccgccccagctccgtcaccgcccggaactcccccacgtcgctgtcgaagcgcacgaactcctcccggttgtagatgtatctctccaggaagcgctgtgtcccattaaacgcgtagcattcctgccgtccctggaaaaggtagtgaatcccagccatgctgattcctctccacccatttccagtgctagaggcccacagtttcagtctcatctgcctccactcggcctcagttcctcatcactgttcctgtgctcacagtcatcaattatagaccccacaacatgcgccctgaagacagaatgttccatatcagagctgtgatcttgagagccctctccttggctttcctgctgagtctccgaggagctggggccatcaaggcggaccatgtgtcaacttatgccgcgtttgtacagacgcatagaccaacaggggagtttatgtttgaatttgatgaagatgagatgttctatgtggatctggacaagaaggagaccgtctggcatctggaggagtttggccaagccttttcctttgaggctcagggcgggctggctaacattgctatattgaacaacaacttgaataccttgatccagcgttccaaccacactcaggccaccaacgcctcatctgccacattgacaagttcttcccaccagtgctcaacgtcacgtggctgtgcaacggggagctggtcactgagggtgtcgctgagagcctcttcctgcccagaacagattacagcttccacaagttccattacctgacctttgtgccctcagcagaggacttctatgactgcagggtggagcactggggcttggaccagccgctcctcaagcactgggaggcccaagagccaatccagatgcctgagacaacggagactgtgctctgtgccctgggcctggtgctgggcctagtcggcatcatcgtgggcaccgtcctcatcataaagtctctgcgttctggccatgacccccgggcccaggggaccctgtgaaatactgtaaaggtgacaaaatatctgaacagaagaggacttaggagagatctgaactccagctgccctacaaactccatctcagcttttcttctcacttcatgtgaaaactactccagtggctgactgaattgctgacccttcaagctctgtccttatccattacctcaaagcagtcattccttagtaaagtttccaacaaatagaaattaatgacactttggtagcactaatatggagattatcctttcattgagccttttatcctctgttctcctttgaagaacccctcactgtcaccttcccgagaataccctaagaccaataaatacttcagtatttcaga

SEQ ID NO: 368635 - DNA, 1246 bp, Homo sapiens
ggcgctgcagggtcatgggcccgcccagctcgtagttgtgtctgcacatcctgtccggcactgcccgcttctcctccaggatgtccttctggctgttccagtactccgcatcaggccgccccagctccgtcaccgcccggaactcccccacgtcgctgtcgaagcgcacgaactcctcccggttgtagatgtatctctccaggaagcgctgtgtcccattaaacgcgtagcattcctgccgtccctggaaaaggtacaccttccagcgtcctctttacccagcaacagagaatgtcagctctatgatttctctgataggtgaatcccagccatgctgattcctctccacccatttccagtgctagaggcccacagtttcagtctcatctgcctccactcggcctcagttcctcatcactgttcctgtgctcacagtcatcaattatagaccccacaacatgcgccctgaagacagaatgttccatatcagagctgtgatcttgagagccctctccttggctttcctgctgagtctccgaggagctggggccatcaaggcggaccatgtgtcaacttatgccgcgtttgtacagacgcatagaccaacaggggagtttatgtttgaatttgatgaagatgagatgttctatgtggatctggacaagaaggagaccgtctggcatctggaggagtttggccaagccttttcctttgaggctcagggcgggctggctaacattgctatattgaacaacaacttgaataccttgatccagcgttccaaccacactcaggccaccaacgatccccctgaggtgaccgtgtttcccaaggagcctgtggagctgggccagcccaacaccctcatctgccacattgacaagttcttcccaccagtgctcaacgtcacgtggctgtgcaacggggagctggtcactgagggtgtcgctgagagcctcttcctgcccagaacagattacagcttccacaagttccattacctgacctttgtgccctcagcagaggacttctatgactgcagggtggagcactggggcttggaccagccgctcctcaagcactgggaggcccaagagccaatccagatgcctgagacaacggagactgtgctctgtgccctgggcctggtgctgggcctagtcggcatcatcgtggcacgcctcctaagttctgcgtctggctgcccgggccgggccctgtgatcctgtcggtgcctttgcgaagt

SEQ ID NO: 368636 - DNA, 1007 bp, Homo sapiens
tgaacattcgtgtccgccttgatggccccagctcctcggagactcagcaggaaagccaaggagagggctctcaagatcacagctctgatatgagtgcctccactcggcctcagttcctcatcactgttcctgtgctcacagtcatcaattatagaccccattctataccaacacctattctgatttttcggtcaccctgaagtttatattcttatcctaccaggcttcggaataatctcccatatgtaacttactactccggaaaaaaagaaccattggatacataggtatggtctgagctatgatatcaatggcttcctagggtttatcgtgtgagcacaccatatatttacagtaggaatagacgtagacacacgagcatatttcacctccgctaccataatcatcgctatccccaccggcgtcaaagtatttagctgactcgccacactccacggaagcaatatgaaatgatctgctgcagtgctctgagccctaggattcatctttcttttcaccgtaggtggcctgactggcatgtattagcaaactcatcactagacatcgtactacacgacacgtactacgttgtagctcacttccactatgtcctatcaataggagctgtattgccatcataggaggcttcattcactgatttcccctattctcaggctacaccctagacaaactacgccaaaatccatttcactatcatattcatccggcgtaggatctaacttttcttcccacaacactttctccggctatccggaatgcccgacgttactcggactacccgatgcatacaccaatggaaaatctataatcttggaagatcattcattctcttacagcaggaaaattaataatttccgattgggaagccttgttctaaagaagcctatagttgaaaacccctaaccggggggtatttgtgtcgccccctcaaattgaagccgtattattaaaagagggtgcccgggttgccggcccgtttaaaaaag

SEQ ID NO: 368637 - DNA, 533 bp, Homo sapiens
agctgaggcagaattgcttgaatgtgggaggcaaaggttgcagagccgagattacgccactgcactccagcctgggcgacaagagtgaaacttcatctcaaaacaaaaaaataaataaaacagtacagtaggtgaagggtaagtcttagaaaactgggctcattgtccactgtccctatctggccctgaatttggcatctatttcttactgtccaaaaaaagcaaaactgcagtcagcacctacaaacaaaccaagatgaattaaaagctactttctttctcttttgctcattcctttttcttgaggaataagagcccagaatagaggaagacagcttagaagaaaagagaaaaaggcctgaggagggccttaccaaaagactaaaagcagaattggtttactagtctaaaatcaccatcctcaaaattaagtctttaaaaaaatttctgacggtaggagatcaaggcaggcggatcactcgaagctcaggagtttgagaccagcctgggcaatgtggagaaaccgcatctct

SEQ ID NO: 368638 - DNA, 304 bp, Homo sapiens
gacagggtagttaagacacaatgaaacgctgtgggagaagtatatatgtgcgccttctcattaggaatgggctattatttttcggttgaggtatactgtgggcaagaggtggaaaaaactacctcctcgttggtgggagttgtggctggtgctttacaattttctggagacagggtattcattatgagctgatgtgagcaaagcagtccctcagaacagcactgagaaggaaagaccaagtaagagcaacaggtggcattcagggtggggctctcaagcctggagcatttggaactatgaggct

SEQ ID NO: 368639 - DNA, 451 bp, Homo sapiens
ttccgcctcttaataccaccacagtggagattaagtttcaatgtgaattttgtaggggacacacgttcagactggtgctctgcctctgcccctcgcccccaaaaagtttatgtccttttcacatacaaatacattcattccattccagtagctccagaagtcttaacttgttctagcaccagctcaaaagtctaaagttgagtctcatctaaacatcatttcaatcagatacggtgagactcaaagatacgcttcatcctgtggcagatttctctctagctgtgaacctgtgaagtcaaacaagttacctgctttcaaaacacagtgtctacactgttggtgggaatgtaaattattaatagtacagccactgtggagaacagtatgaggttcctcagaaaactaaaaatagattaccatgtgatccagtaattccactactgagtatata

SEQ ID NO: 368640 - DNA, 1377 bp, Homo sapiens
aaaaaaaaaaaaaaaaaaaaaaaaaaaaaggtttttgaagatggcggccctcaaggctctggtgtccggctgtgggcggcttctccgtgggctactagcgggcccggcagcgaccagctggtctcggcttccagctcgcgggttcagggaagtggtggagacccaagaagggaagacaactataattgaaggccgtatcacagcgactcccaaggagagtccaaatcctcctaacccctctggccagtgccccatctgccgttggaacctgaagcacaagtataactatgacgatgttctgctgcttagccagttcatccggcctcatggaggcatgctgccccgaaagatcacaggcctatgccaggaagaacaccgcaagatcgaggagtgtgtgaagatggcccaccgagcaggtctattaccaaatcacaggcctcggcttcctgaaggagttgttccgaagagcaaaccccaactcaaccggtacctgacgcgctgggctcctggctccgtcaagcccatctacaaggacaatgtctgctactcaagaacaccttggaagctgtatcactgacagagagcagtgcttccagagttcctcctgcacctgtgctggggagtaggaggcccactcacaagcccttggccacaactatactcctgtcccaccccaccacgatggcctggtccctccaacatgcatggacaggggacagtgggactaacttcagtacccttggcctgcacagtagcaatgctgggagctagaggcaggcagggcagttgggtcccttgccagctgctatggggcttaggccatgctcagtgctggggacaggagttttgcccaacgcagtgtcataaactgggttcatgggcttacccattgggtgtgcgctcactgcttgggaagtgcagggggtcctgggcacattgccagctgggtgctgagcattgagtcactgatctcttgtgatggggccaatgagtcaattgaattcatgggccaaacaggtcccatcctcttcatgaaaaaagtgagctccttactgtgggagagctgcagggagccaaggtgggctgcctgacacacttgccgctctcgtgtgaatccaagaaactgcgttcctcaaaggggccctggttgtcaccttctcccacagccatttccacccatcgttgtctagaatctctttcattagcacattccaacccctctgccacttggtttagaaatgagctccctggctcagtgggcctttcagaatctggaaccagacggaggtggagttaagaagataggacagaacaggcaggccaagttcactgaagcttaagaaaatcatgtttagactctgtttaaaaacatccagg

SEQ ID NO: 368641 - DNA, 1459 bp, Homo sapiens
  misc_feature (166)..(166): n is a, c, g, or t
aaaaaaaaaaaaaaaaaaaaaaaaaaaaaggtttttgaagatggcggccctcaaggctctggtgtccggctgtgggcggcttctccgtgggctactagcgggcccggcagcgaccagctggtctcggcttcccaaaaggggctccttccccgggccccgggggggnggttccaagggaagtggtggagacccaagaagggaagacaactataattgaaggccgtatcacagcgactcccaaggagagtccaaatcctcctaacccctctggccagtgccccatctgccgttggaacctgaagcacaagtataactatgacgatgttctgctgcttagccagttcatccggcctcatggaggcatgctgccccgaaagatcacaggcctatgccaggaagaacaccgcaagatcgaggagtgtgtgaagatggcccaccgagcaggtctattaccaaatcacaggcctcggcttcctgaaggagttgttccgaagagcaaaccccaactcaaccggtacctgacgcgctgggctcctggctccgtcaagcccatctacaaaaaaggcccccgctggaacagggtgcgcatgcccgtggggtcaccccttctgagggacaatgtctgctactcaagaacaccttggaagctgtatcactgacagagagcagtgcttccagagttcctcctgcacctgtgctggggagtaggaggcccactcacaagcccttggccacaactatactcctgtcccaccccaccacgatggcctggtccctccaacatgcatggacaggggacagtgggactaacttcagtacccttggcctgcacagtagcaatgctgggagctagaggcaggcagggcagttgggtcccttgccagctgctatggggcttaggccatgctcagtgctggggacaggagttttgcccaacgcagtgtcataaactgggttcatgggcttacccattgggtgtgcgctcactgcttgggaagtgcagggggtcctgggcacattgccagctgggtgctgagcattgagtcactgatctcttgtgatggggccaatgagtcaattgaattcatgggccaaacaggtcccatcctcttcatgaaaaaagtgagctccttactgtgggagagctgcagggagccaaggtgggctgcctgacacacttgccgctctcgtgtgaatccaagaaactgcgttcctcaaaggggccctggttgtcaccttctcccacagccatttccacccatcgttgtctagaatctctttcattagcacattccaacccctctgccacttggtttagaaatgagctccctggctcagtgggcctttcagaatctggaaccagacggaggtggagttaagaagataggacagaacaggcaggccaagttcactgaagcttaagaaaatcatgtttagactctgtttaaaaacatccagg

SEQ ID NO: 368642 - DNA, 1653 bp, Homo sapiens
aaaaaaaaaaaaaaaaaaaaaaaaaaaaaggtttttgaagatggcggccctcaaggctctggtgtccggctgtgggcggcttctccgtgggctactagcgggcccggcagcgaccagctggtctcggcttccagctcgcgggttcagggaagtggtggagacccaagaagggaagacaactataattgaaggccgtatcacagcgactcccaaggagagtccaaatcctcctaacccctctggccagtgccccatctgccgttggaacctgaagcacaagtataactatgacgatgttctgctgcttagccagttcatccggcctcatggaggcatgctgccccgaaagatcacaggcctatgccaggaagaacaccgcaagatcgaggagtgtgtgaagatggcccaccgagcaggtagaaggccctggggaccaagaggggcagagggctgcaggcactctctccccacccagctgccccatgtttcagcccctcctggaagaaaagtggatatccggagtgttaattatactcaccacccaatgccaaccttcccgctcccttgggctttccctctggccccctcagagctgcagagggagctgcaaagactatcccctcttccccgccactcaggtctattaccaaatcacaggcctcggcttcctgaaggagttgttccgaagagcaaaccccaactcaaccggtacctgacgcgctgggctcctggctccgtcaagcccatctacaaaaaaggcccccgctggaacagggtgcgcatgcccgtggggtcaccccttctgagggacaatgtctgctactcaagaacaccttggaagctgtatcactgacagagagcagtgcttccagagttcctcctgcacctgtgctggggagtaggaggcccactcacaagcccttggccacaactatactcctgtcccaccccaccacgatggcctggtccctccaacatgcatggacaggggacagtgggactaacttcagtacccttggcctgcacagtagcaatgctgggagctagaggcaggcagggcagttgggtcccttgccagctgctatggggcttaggccatgctcagtgctggggacaggagttttgcccaacgcagtgtcataaactgggttcatgggcttacccattgggtgtgcgctcactgcttgggaagtgcagggggtcctgggcacattgccagctgggtgctgagcattgagtcactgatctcttgtgatggggccaatgagtcaattgaattcatgggccaaacaggtcccatcctcttcatgaaaaaagtgagctccttactgtgggagagctgcagggagccaaggtgggctgcctgacacacttgccgctctcgtgtgaatccaagaaactgcgttcctcaaaggggccctggttgtcaccttctcccacagccatttccacccatcgttgtctagaatctctttcattagcacattccaacccctctgccacttggtttagaaatgagctccctggctcagtgggcctttcagaatctggaaccagacggaggtggagttaagaagataggacagaacaggcaggccaagttcactgaagcttaagaaaatcatgtttagactctgtttaaaaacatccagg

SEQ ID NO: 368643 - DNA, 1161 bp, Homo sapiens
aaaaaaaaaaaaaaaaaaaaaaaaaaaaaggtttttgaagatggcggccctcaaggctctggtgtccggctgtgggcggcttctccgtgggctactagcgggcccggcagcgaccagctggtctcggcttccagctcgcgggttcagggaagtggtggagacccaagaagggaagacaactataattgaaggccgtatcacagcgactcccaaggagagtccaaatcctcctaacccctctggccagtgccccatctgccgttggaacctgaagcacaagtataactatgacgatgttctgctgcttagccagttcatccggcctcatggaggcatgctgccccgaaagatcacaggcctatgccaggaagaacaccgcaagatcgaggagtgtgtgaagatggcccaccgagcaggtagaaggccctggggaccaagaggggcagagggctgcaggcactctctccccacccagctgccccatgtttcagcccctcctggaagaaaagtggatatccggagtgttaattatactcaccacccaatgccaaccttcccgctcccttgggctttccctctggccccctcagagctgcagagggagctgcaaagactatcccctcttccccgccactcaggtctattaccaaatcacaggcctcggcttcctgaaggagttgttccgaagagcaaaccccaactcaaccggtacctgacgcgctgggctcctggctccgtcaagcccatctacaaaaaaggcccccgctggaacagggtgcgcatgcccgtggggtcaccccttctgagggacaatgtctgctactcaagaacaccttggaagctgtatcactgacagagagcagtgcttccagagttcctcctgcacctgtgctggggagtaggaggcccactcacaagcccttggccacaactatactcctgtcccaccccaccacgatggcctggtccctccaacatgcatggacaggggacagtgggactaacttcagtacccttggcctgcacagtagcaatgctgggagctagaggcaggcagggcagttgggtcccttgccagctgctatggggcttaggccatgctcagtgctggggacaggagttttgcccaacgcagtgtcataaactgggttcatgggctta

SEQ ID NO: 368644 - DNA, 869 bp, Homo sapiens
aaaaaaaaaaaaaaaaaaaaaaaaaaaaaggtttttgaagatggcggccctcaaggctctggtgtccggctgtgggcggcttctccgtgggctactagcgggcccggcagcgaccagctggtctcggcttccagctcgcgggttcagggaagtggtggagacccaagaagggaagacaactataattgaaggccgtatcacagcgactcccaaggagagtccaaatcctcctaacccctctggccagtgccccatctgccgttggaacctgaagcacaagtataactatgacgatgttctgctgcttagccagttcatccggcctcatggaggcatgctgccccgaaagatcacaggcctatgccaggaagaacaccgcaagatcgaggagtgtgtgaagatggcccaccgagcaggtacctgacgcgctgggctcctggctccgtcaagcccatctacaaaaaaggcccccgctggaacagggtgcgcatgcccgtggggtcaccccttctgagggacaatgtctgctactcaagaacaccttggaagctgtatcactgacagagagcagtgcttccagagttcctcctgcacctgtgctggggagtaggaggcccactcacaagcccttggccacaactatactcctgtcccaccccaccacgatggcctggtccctccaacatgcatggacaggggacagtgggactaacttcagtacccttggcctgcacagtagcaatgctgggagctagaggcaggcagggcagttgggtcccttgccagctgctatggggcttaggccatgctcagtgctggggacaggagttttgcccaacgcagtgtcataaactgggttcatgggctta

SEQ ID NO: 368645 - DNA, 913 bp, Homo sapiens
  misc_feature (527)..(527): n is a, c, g, or t
aaaaaaaaaaaaaaaaaaaaaaaaaaaaaggtttttgaagatggcggccctcaaggctctggtgtccggctgtgggcggcttctccgtgggctactagcgggcccggcagcgaccagctggtctcggcttccagctcgcgggttcagggaagtggtgcgagaccccaaagaaaggggaagaacaaacttataattgaagggccggtattcaccaggcggaacttccccaagggagaggttccaaaattccttccttaaagcccctctgggccagtggccccaattccttggccggtttgggaaccctttggaagcacaaaggttttaacttattggacggaaggtccttggacagtggagttaagcaccgagatctccatgtccggggcccttcacgggaaagggccatgtgcttggccccacgggcaagagaatctcacacggggccctatagggccccggggtcaggggaaacacaccgcaaacaaaggaactccgcagggcacggcgtgggctgtctggaaggnaataggggccccacaccgggaaggacaggagggctcataatacacccgagaatactacaacgagggccccatgcggggcttccccgtgcacaagcgagcaagttagtgatcccagcaggaagaagacggccaaaaaaaccccctcgaaaagtcttcaagcccgggggatcaccccggaggacgcgcagtctgggagcgcctctggggaggcatcgaggcacaaagacgcccagcagtctcataccaccaatcagcaggtgggcccccacgcgtggggcgaacctatggggatctggcagcatgttgccggcgggggggggtctaacacccccatttctcgtggagggggccccacgcgggctggcgactagcgccggagaaaaagc

SEQ ID NO: 368646 - DNA, 1431 bp, Homo sapiens
aaaaaaaaaaaaaaaaaaaaaaaaaaaaaggtttttgaagatggcggccctcaaggctctggtgtccggctgtgggcggcttctccgtgggctactagcgggcccggcagcgaccagctggtctcggcttccagctcgcgggttcagggaagtggtggagacccaagaagggaagacaactataattgaaggccgtatcacagcgactcccaaggagagtccaaatcctcctaacccctctggccagtgccccatctgccgttggaacctgaagcacaagtataactatgacgatgttctgctgcttagccagttcatccggcctcatggaggcatgctgccccgaaagatcacaggcctatgccaggaagaacaccgcaagatcgaggagtgtgtgaagatggcccaccgagcaggtctattaccaaatcacaggcctcggcttcctgaaggagttgttccgaagagcaaaccccaactcaaccggtacctgacgcgctgggctcctggctccgtcaagcccatctacaaaaaaggcccccgctggaacagggtgcgcatgcccgtggggtcaccccttctgagggacaatgtctgctactcaagaacaccttggaagctgtatcactgacagagagcagtgcttccagagttcctcctgcacctgtgctggggagtaggaggcccactcacaagcccttggccacaactatactcctgtcccaccccaccacgatggcctggtccctccaacatgcatggacaggggacagtgggactaacttcagtacccttggcctgcacagtagcaatgctgggagctagaggcaggcagggcagttgggtcccttgccagctgctatggggcttaggccatgctcagtgctggggacaggagttttgcccaacgcagtgtcataaactgggttcatgggcttacccattgggtgtgcgctcactgcttgggaagtgcagggggtcctgggcacattgccagctgggtgctgagcattgagtcactgatctcttgtgatggggccaatgagtcaattgaattcatgggccaaacaggtcccatcctcttcatgaaaaaagtgagctccttactgtgggagagctgcagggagccaaggtgggctgcctgacacacttgccgctctcgtgtgaatccaagaaactgcgttcctcaaaggggccctggttgtcaccttctcccacagccatttccacccatcgttgtctagaatctctttcattagcacattccaacccctctgccacttggtttagaaatgagctccctggctcagtgggcctttcagaatctggaaccagacggaggtggagttaagaagataggacagaacaggcaggccaagttcactgaagcttaagaaaatcatgtttagactctgtttaaaaacatccagg

SEQ ID NO: 368647 - DNA, 939 bp, Homo sapiens
aaaaaaaaaaaaaaaaaaaaaaaaaaaaaggtttttgaagatggcggccctcaaggctctggtgtccggctgtgggcggcttctccgtgggctactagcgggcccggcagcgaccagctggtctcggcttccagctcgcgggttcagggaagtggtggagacccaagaagggaagacaactataattgaaggccgtatcacagcgactcccaaggagagtccaaatcctcctaacccctctggccagtgccccatctgccgttggaacctgaagcacaagtataactatgacgatgttctgctgcttagccagttcatccggcctcatggaggcatgctgccccgaaagatcacaggcctatgccaggaagaacaccgcaagatcgaggagtgtgtgaagatggcccaccgagcaggtctattaccaaatcacaggcctcggcttcctgaaggagttgttccgaagagcaaaccccaactcaaccggtacctgacgcgctgggctcctggctccgtcaagcccatctacaaaaaaggcccccgctggaacagggtgcgcatgcccgtggggtcaccccttctgagggacaatgtctgctactcaagaacaccttggaagctgtatcactgacagagagcagtgcttccagagttcctcctgcacctgtgctggggagtaggaggcccactcacaagcccttggccacaactatactcctgtcccaccccaccacgatggcctggtccctccaacatgcatggacaggggacagtgggactaacttcagtacccttggcctgcacagtagcaatgctgggagctagaggcaggcagggcagttgggtcccttgccagctgctatggggcttaggccatgctcagtgctggggacaggagttttgcccaacgcagtgtcataaactgggttcatgggctta
